United States Patent Application Publication US 2024/0327476 A1 - sequence listing, part 41

SEQ ID NO: 74541 - DNA, 1845 bp, synthetic construct
  misc_feature 1..1845: note = Description of Artificial Sequence: Synthetic coding sequence
  source 1..1845: mol_type = other DNA
atgggcaaccagatgagcgtgccccagagagtggaggaccaggagaacgagcccgaggccgagacctaccaggacaacgccagcgccctgaacggcgtgcccgtggtggtgagcacccacaccgtgcagcacctggaggaggtggacctgggcatcagcgtgaagaccgacaacgtggccaccagcagccccgagaccaccgagatcagcgccgtggccgacgccaacggcaagaacctgggcaaggaggccaagcccgaggcccccgccgccaagagcagattcttcctgatgctgagcagacccgtgcccggcagaaccggcgaccaggccgccgacagcagcctgggcagcgtgaagctggacgtgagcagcaacaaggcccccgccaacaaggaccccagcgagagctggaccctgcccgtggccgccggccccggccaggacaccgacaagacccccggccacgcccccgcccaggacaaggtgctgagcgccgccagagaccccaccctgctgccccccgagaccggcggcgccggcggcgaggcccccagcaagcccaaggacagcagcttcttcgacaagttcttcaagctggacaagggccaggagaaggtgcccggcgacagccagcaggaggccaagagagccgagcaccaggacaaggtggacgaggtgcccggcctgagcggccagagcgacgacgtgcccgccggcaaggacatcgtggacggcaaggagaaggagggccaggagctgggcaccgccgactgcagcgtgcccggcgaccccgagggcctggagaccgccaaggacgacagccaggccgccgccatcgccgagaacaacaacagcatcatgagcttcttcaagaccctggtgagccccaacaaggccgagaccaagaaggaccccgaggacaccgccagcaaggccgagagcgtgtgcgacggccaggccggccagaagaccagcgagatccaggccagaggcaccaagaagaagcacctggacagccccagactgggcctggccttcagaaagttcttcagacacaagggcgccgagaagagccccaccaccagcgccgacctgaagagcgacaaggccaacttcaccagccaggagacccagggcgccggcaagaacagcaagggctgcaaccccagcggccacacccagagcgtgaccacccccgagcccgccaaggagggcaccaaggagaagagcggccccaccagcctgcccctgggcaagctgttctggaagaaggtggtgtgcgagagccccgtggagatcatcaagagcaaggaggtggagagcgccctgcagaccgtggacctgaacgagggcgacgccgcccccgagcccaccgaggccaagctgaagagagaggagagcaagcccagaaccagcctgatggccttcctgagacagatgaccagcgacagcaccgagaagaccatcaccccccccgagcccgagcccaccggcgccccccagaagggcaaggagggcagcagcaaggacaagaagagcgccgccgagatgaacaagcagaagagcaacaagcaggaggccaaggagcccgcccagtgcaccgagcaggccaccgtggacaccaacagcctgcagaacggcgacaagctgcagaagagacccgagaagagacagcagagcctgggcggcttcttcaagggcctgggccccaagagaatgctggacgcccaggtgcagaccgaccccgtgagcatcggccccgtgggcaagagcaagtacaccggcaagtgcgtgttcagccacgtgaagaagaagtggcccttccaggagtggagctactag

SEQ ID NO: 74542 - DNA, 1755 bp, synthetic construct
  misc_feature 1..1755: note = Description of Artificial Sequence: Synthetic coding sequence
  source 1..1755: mol_type = other DNA
atgggcaaccagatgagcgtgccccagagagtggaggaccaggagaacgagcccgaggccgagacctaccaggacaacgccagcgccctgaacggcgtgcccgtggtggtgagcacccacaccgtgcagcacctggaggaggtggacctgggcatcagcgtgaagaccgacaacgtggccaccagcagccccgagaccaccgagatcagcgccgtggccgacgccaacggcaagaacctgggcaaggaggccaagcccgaggcccccgccgccaagagcagattcttcctgatgctgagcagacccgtgcccggcagaaccggcgaccaggccgccgacagcagcctgggcagcgtgaagctggacgtgagcagcaacaaggcccccgccaacaaggaccccagcgagagctggaccctgcccgtggccgccggccccggccaggacaccgacaagacccccggccacgcccccgcccaggacaaggtgctgagcgccgccagagaccccaccctgctgccccccgagaccggcggcgccggcggcgaggcccccagcaagcccaaggacagcagcttcttcgacaagttcttcaagctggacaagggccaggagaaggtgcccggcgacagccagcaggaggccaagagagccgagcaccaggacaaggtggacgaggtgcccggcctgagcggccagagcgacgacgtgcccgccggcaaggacatcgtggacggcaaggagaaggagggccaggagctgggcaccgccgactgcagcgtgcccggcgaccccgagggcctggagaccgccaaggacgacagccaggccgccgccatcgccgagaacaacaacagcatcatgagcttcttcaagaccctggtgagccccaacaaggccgagaccaagaaggaccccgaggacaccggcgccgagaagagccccaccaccagcgccgacctgaagagcgacaaggccaacttcaccagccaggagacccagggcgccggcaagaacagcaagggctgcaaccccagcggccacacccagagcgtgaccacccccgagcccgccaaggagggcaccaaggagaagagcggccccaccagcctgcccctgggcaagctgttctggaagaagagcgtgaaggaggacagcgtgcccaccggcgccgaggagaacgtggtgtgcgagagccccgtggagatcatcaagagcaaggaggtggagagcgccctgcagaccgtggacctgaacgagggcgacgccgcccccgagcccaccgaggccaagctgaagagagaggagagcaagcccagaaccagcctgatggccttcctgagacagatgagcgtgaagggcgacggcggcatcacccacagcgaggagatcaacggcaaggacagcagctgccagaccagcgacagcaccgagaagaccatcaccccccccgagcccgagcccaccggcgccccccagaagggcaaggagggcagcagcaaggacaagaagagcgccgccgagatgaacaagcagaagagcaacaagcaggaggccaaggagcccgcccagtgcaccgagcaggccaccgtggacaccaacagcctgcagaacggcgacaagctgcagaagagacccgagaagagacagcagagcctgggcggcttcttcaagggcctgggccccaagagaatgctggacgcccaggtgcagaccgaccccgtgagcatcggccccgtgggcaagagcaagtag

SEQ ID NO: 74543 - DNA, 495 bp, synthetic construct
  misc_feature 1..495: note = Description of Artificial Sequence: Synthetic coding sequence
  source 1..495: mol_type = other DNA
atgctgagcagacccgtgcccggcagaaccggcgaccaggccgccgacagcagcctgggcagcgtgaagctggacgtgagcagcaacaaggcccccgccaacaaggaccccagcgagagctggaccctgcccgtggccgccggccccggccaggacaccgacaagacccccggccacgcccccgcccaggacaaggtgctgagcgccgccagagaccccaccctgctgccccccgagaccggcggcgccggcggcgaggcccccagcaagcccaaggacagcagcttcttcgacaagttcttcaagctggacaagggccaggagaaggtgcccggcgacagccagcaggaggccaagagagccgagcaccaggacaaggtggacgaggtgcccggcctgagcggccagagcgacgacgtgcccgccggcaaggtgagcgtgcccagatgcatccacctggtgctgaacgcctgcagcggcgccctgatgggctag

SEQ ID NO: 74544 - DNA, 753 bp, synthetic construct
  misc_feature 1..753: note = Description of Artificial Sequence: Synthetic coding sequence
  source 1..753: mol_type = other DNA
atgagcttcttcaagaccctggtgagccccaacaaggccgagaccaagaaggaccccgaggacaccgccagcaaggccgagagcgtgtgcgacggccaggccggccagaagaccagcgagatccaggccagaggcaccaagaagaagcacctggacagccccagactgggcctggccttcagaaagttcttcagacacaagggcgccgagaagagccccaccaccagcgccgacctgaagagcgacaaggccaacttcaccagccaggagacccagggcgccggcaagaacagcaagggctgcaaccccagcggccacacccagagcgtgaccacccccgagcccgccaaggagggcaccaaggagaagagcggccccaccagcctgcccctgggcaagctgttctggaagaagaccagcgacagcaccgagaagaccatcaccccccccgagcccgagcccaccggcgccccccagaagggcaaggagggcagcagcaaggacaagaagagcgccgccgagatgaacaagcagaagagcaacaagcaggaggccaaggagcccgcccagtgcaccgagcaggccaccgtggacaccaacagcctgcagaacggcgacaagctgcagaagagacccgagaagagacagcagagcctgggcggcttcttcaagggcctgggccccaagagaatgctggacgcccaggtgcagaccgaccccgtgagcatcggccccgtgggcaagagcaagtag

SEQ ID NO: 74545 - DNA, 1155 bp, synthetic construct
  misc_feature 1..1155: note = Description of Artificial Sequence: Synthetic coding sequence
  source 1..1155: mol_type = other DNA
atgagcgcccccatcaagctgcagagaaccaagacccaggtgagagccggccacttcagatggcagctggacagaggcagaacccagatcaagccccagggcacccccagacccaagaccagaagcagcctgccccccggcatccccagattcagccacctgagacagggcgagcaggaggagaagctgccccccagccccagaacccccttcttcgacaagttcttcaagctggacaagggccaggagaaggtgcccggcgacagccagcaggaggccaagagagccgagcaccaggacaaggtggacgaggtgcccggcctgagcggccagagcgacgacgtgcccgccggcaaggacatcgtggacggcaaggagaaggagggccaggagctgggcaccgccgactgcagcgtgcccggcgaccccgagggcctggagaccgccaaggacgacagccaggccgccgccatcgccgagaacaacaacagcatcatgagcttcttcaagaccctggtgagccccaacaaggccgagaccaagaaggaccccgaggacaccggcgccgagaagagccccaccaccagcgccgacctgaagagcgacaaggccaacttcaccagccaggagacccagggcgccggcaagaacagcaagggctgcaaccccagcggccacacccagagcgtgaccacccccgagcccgccaaggagggcaccaaggagaagagcggccccaccagcctgcccctgggcaagctgttctggaagaagagcgtgaaggaggacagcgtgcccaccggcgccgaggagaacaccagcgacagcaccgagaagaccatcaccccccccgagcccgagcccaccggcgccccccagaagggcaaggagggcagcagcaaggacaagaagagcgccgccgagatgaacaagcagaagagcaacaagcaggaggccaaggagcccgcccagtgcaccgagcaggccaccgtggacaccaacagcctgcagaacggcgacaagctgcagaagagacccgagaagagacagcagagcctgggcggcttcttcaagggcctgggccccaagagaatgctggacgcccaggtgcagaccgaccccgtgagcatcggccccgtgggcaagagcaagtag

SEQ ID NO: 74546 - DNA, 678 bp, synthetic construct
  misc_feature 1..678: note = Description of Artificial Sequence: Synthetic coding sequence
  source 1..678: mol_type = other DNA
atggccggcaccggcctggtggccggcgaggtggtggtggacgccctgccctacttcgaccagggctacgaggcccccggcgtgagagaggccgccgccgccctggtggaggaggagaccagaagatacagacccaccaagaactacctgagctacctgaccgcccccgactacagcgccttcgagaccgacatcatgagaaacgagttcgagagactggccgccagacagcccatcgagctgctgagcatgaagagatacgagctgcccgcccccagcagcggccagaagaacgacatcaccgcctggcaggagtgcgtgaacaacagcatggcccagctggagcaccaggccgtgagaatcgagaacctggagctgatgagccagcacggctgcaacgcctggaaggtgtacaacgagaacctggtgcacatgatcgagcacgcccagaaggagctgcagaagctgagaaagcacatccaggacctgaactggcagagaaagaacatgcagctgaccgccggcagcaagctgagagagatggagagcaactgggtgagcctggtgagcaagaactacgagatcgagagaaccatcgtgcagctggagaacgagatctaccagatcaagcagcagcacggcgaggccaacaaggagaacatcagacaggacttctag

SEQ ID NO: 74547 - DNA, 477 bp, synthetic construct
  misc_feature 1..477: note = Description of Artificial Sequence: Synthetic coding sequence
  source 1..477: mol_type = other DNA
atgcagagaaccggcggcggcgcccccagacccggcagaaaccacggcctgcccggcagcctgagacagcccgaccccgtggccctgctgatgctgctggtggacgccgaccagcccgagcccatgagaagcggcgccagagagctggccctgttcctgacccccgagcccggcgccgaggccaaggaggtggaggagaccatcgagggcatgctgctgagactggaggagttctgcagcctggccgacctgatcagaagcgacaccagccagatcctggaggagaacatccccgtgctgaaggccaagctgaccgagatgagaggcatctacgccaaggtggacagactggagaagagccccgcccccgtgcccgtgacctacgagctgcccaccctgtacagaaccgaggactacttccccgtggacgccggcgaggcccagcaccaccccagaacctgccccagacccctgtag

SEQ ID NO: 74548 - DNA, 570 bp, synthetic construct
  misc_feature 1..570: note = Description of Artificial Sequence: Synthetic coding sequence
  source 1..570: mol_type = other DNA
atgcagagaaccggcggcggcgcccccagacccggcagaaaccacggcctgcccggcagcctgagacagcccgaccccgtggccctgctgatgctgctggtggacgccgaccagcccgagcccatgagaagcggcgccagagagctggccctgttcctgacccccgagcccggcgccgaggccaaggaggtggaggagaccatcgagggcatgctgctgagactggaggagttctgcagcctggccgacctgatcagaagcgacaccagccagatcctggaggagaacatccccgtgctgaaggccaagctgaccgagatgagaggcatctacgccaaggtggacagactggaggccttcgtgaagatggtgggccaccacgtggccttcctggaggccgacgtgctgcaggccgagagagaccacggcgccttcccccaggccctgagaagatggctgggcagcgccggcctgcccagcttcagaaacctggagtgcagcggcgccatcctggcccactgcaacctgagactgagcggcagcagcgacagccccgccagcgccagctag

SEQ ID NO: 74549 - DNA, 636 bp, synthetic construct
  misc_feature 1..636: note = Description of Artificial Sequence: Synthetic coding sequence
  source 1..636: mol_type = other DNA
atgcagagaaccggcggcggcgcccccagacccggcagaaaccacggcctgcccggcagcctgagacagcccgaccccgtggccctgctgatgctgctggtggacgccgaccagcccgagcccatgagaagcggcgccagagagctggccctgttcctgacccccgagcccggcgccgaggccaaggaggtggaggagaccatcgagggcatgctgctgagactggaggagttctgcagcctggccgacctgatcagaagcgacaccagccagatcctggaggagaacatccccgtgctgaaggccaagctgaccgagatgagaggcatctacgccaaggtggacagactggaggccttcgtgaagatggtgggccaccacgtggccttcctggaggccgacgtgctgcaggccgagagagaccacggcgccttcccccaggccctgagaagatggctgggcagcgccggcctgcccagcttcagaaacgtggagtgcagcggcaccatccccgccagatgcaacctgagactgcccggcagcagcgacagccccgccagcgccagccaggtggccggcatcaccgaggtgacctgcaccggcgccagagacgtgagagccgcccacaccgtgtag

SEQ ID NO: 74550 - DNA, 612 bp, synthetic construct
  misc_feature 1..612: note = Description of Artificial Sequence: Synthetic coding sequence
  source 1..612: mol_type = other DNA
atgcagagaaccggcggcggcgcccccagacccggcagaaaccacggcctgcccggcagcctgagacagcccgaccccgtggccctgctgatgctgctggtggacgccgaccagcccgagcccatgagaagcggcgccagagagctggccctgttcctgacccccgagcccggcgccgaggccaaggaggtggaggagaccatcgagggcatgctgctgagactggaggagttctgcagcctggccgacctgatcagaagcgacaccagccagatcctggaggagaacatccccgtgctgaaggccaagctgaccgagatgagaggcatctacgccaaggtggacagactggaggccttcgtgaagatggtgggccaccacgtggccttcctggaggccgacgtgctgcaggccgagagagaccacggcgccttcccccaggccctgagaagatggctgggcagcgccggcctgcccagcttcagaaacaagagccccgcccccgtgcccgtgacctacgagctgcccaccctgtacagaaccgaggactacttccccgtggacgccggcgaggcccagcaccaccccagaacctgccccagacccctgtag

SEQ ID NO: 74551 - DNA, 627 bp, synthetic construct
  misc_feature 1..627: note = Description of Artificial Sequence: Synthetic coding sequence
  source 1..627: mol_type = other DNA
atgaccggcagagtgtgcagaggctgcggcggcaccgacatcgagctggacgccgccagaggcgacgccgtgtgcaccgcctgcggcagcgtgctggaggacaacatcatcgtgagcgaggtgcagttcgtggagagcagcggcggcggcagcagcgccgtgggccagttcgtgagcctggacggcgccggcaagacccccaccctgggcggcggcttccacgtgaacctgggcaaggagagcagagcccagaccctgcagaacggcagaagacacatccaccacctgggcaaccagctgcagctgaaccagcactgcctggacaccgccttcaacttcttcaagatggccgtgagcagacacctgaccagaggcagaaagatggcccacgtgatcgccgcctgcctgtacctggtgtgcagaaccgagggcaccccccacatgctgctggacctgagcgacctgctgcaggtggacagcctgagacccgccagcttccccacctggggctgcgacctgggcgtggtgaccagagtggtgaccggcgtgtaccccagatgcctgcacgccagccagtggcccgtgtgcgccgcctgccccgtgagaaagttctggagcgtgggctag

SEQ ID NO: 74552 - DNA, 1689 bp, synthetic construct
  misc_feature 1..1689: note = Description of Artificial Sequence: Synthetic coding sequence
  source 1..1689: mol_type = other DNA
atggccgtgagcagacacctgaccagaggcagaaagatggcccacgtgatcgccgcctgcctgtacctggtgtgcagaaccgagggcaccccccacatgctgctggacctgagcgacctgctgcaggtgaacgtgtacgtgctgggcaagaccttcctgctgctggccagagagctgtgcatcaacgcccccgccatcgacccctgcctgtacatccccagattcgcccacctgctggagttcggcgagaagaaccacgaggtgagcatgaccgccctgagactgctgcagagaatgaagagagactggatgcacaccggcagaagacccagcggcctgtgcggcgccgccctgctggtggccgccagaatgcacgacttcagaagaaccgtgaaggaggtgatcagcgtggtgaaggtgtgcgagagcaccctgagaaagagactgaccgagttcgaggacacccccaccagccagctgaccatcgacgagttcatgaagatcgacctggaggaggagtgcgacccccccagctacaccgccggccagagaaagctgagaatgaagcagctggagcaggtgctgagcaagaagctggaggaggtggagggcgagatcagcagctaccaggacgccatcgagatcgagctggagaacagcagacccaaggccaagggcggcctggccagcctggccaaggacggcagcaccgaggacaccgccagcagcctgtgcggcgaggaggacaccgaggacgaggagctggaggccgccgccagccacctgaacaaggacctgtacagagagctgctgggcggcgcccccggcagcagcgaggccgccggcagccccgagtggggcggcagaccccccgccctgggcagcctgctggaccccctgcccaccgccgccagcctgggcatcagcgacagcatcagagagtgcatcagcagccagagcagcgaccccaaggacgccagcggcgacggcgagctggacctgagcggcatcgacgacctggagatcgacagatacatcctgaacgagagcgaggccagagtgaaggccgagctgtggatgagagagaacgccgagtacctgagagagcagagagagaaggaggccagaatcgccaaggagaaggagctgggcatctacaaggagcacaagcccaagaagagctgcaagagaagagagcccatccaggccagcaccgccagagaggccatcgagaagatgctggagcagaagaagatcagcagcaagatcaactacagcgtgctgagaggcctgagcagcgccggcggcggcagcccccacagagaggacgcccagcccgagcacagcgccagcgccagaaagctgagcagaagaagaacccccgccagcagaagcggcgccgaccccgtgaccagcgtgggcaagagactgagacccctggtgagcacccagcccgccaagaaggtggccaccggcgaggccctgctgcccagcagccccaccctgggcgccgagcccgccagaccccaggccgtgctggtggagagcggccccgtgagctaccacgccgacgaggaggccgacgaggaggagcccgacgaggaggacggcgagccctgcgtgagcgccctgcagatgatgggcagcaacgactacggctgcgacggcgacgaggacgacggctactag

SEQ ID NO: 74553 - DNA, 408 bp, synthetic construct
  misc_feature 1..408: note = Description of Artificial Sequence: Synthetic coding sequence
  source 1..408: mol_type = other DNA
atgaccgccctgagactgctgcagagaatgaagagagactggatgcacaccggcagaagacccagcggcctgtgcggcgccgccctgctggtggccgccagaatgcacgacttcagaagaaccgtgaaggaggtgatcagcgtggtgaaggtgtgcgagagcaccctgagaaagagactgaccgagttcgaggacacccccaccagccagctgaccatcgacgagttcatgaagatcgacctggaggaggagtgcgaccccccccccatcgaggagggcggccagaccgaggccagagagcccccccaggccagcagctgggagggccccagcaccaccagaagaagaagccagctgtggcacggctgccccggctgcggcagaggcggcttcaccctgtgcccctag

SEQ ID NO: 74554 - DNA, 723 bp, synthetic construct
  misc_feature 1..723: note = Description of Artificial Sequence: Synthetic coding sequence
  source 1..723: mol_type = other DNA
atgaccggcagagtgtgcagaggctgcggcggcaccgacatcgagctggacgccgccagaggcgacgccgtgtgcaccgcctgcggcagcgtgctggaggacaacatcatcgtgagcgaggtgcagttcgtggagagcagcggcggcggcagcagcgccgtgggccagttcgtgagcctggacggcgccggcaagacccccaccctgggcggcggcttccacgtgaacctgggcaaggagagcagagcccagaccctgcagaacggcagaagacacatccaccacctgggcaaccagctgcagctgaaccagcactgcctggacaccgccttcaacttcttcaagatggccgtgagcagacacctgaccagaggcagaaagatggcccacgtgatcgccgcctgcctgtacctggtgtgcagaaccgagggcaccccccacatgctgctggacctgagcgacctgctgcaggtggacagcctgagacccgccagcttccccacctggggctgcgacctgggcgtggtgaccagagtggtgaccggcgtgtaccccagatgccccagaatcagcgtggccggcctgtgctgcctgcccagccaggaggtgctggtgtgcagaatgagaggcctgcacgacatgggcgtgaccgtgagagacctgtgggagtgcggcagcccctggcaggagcacctgcccatgctgggcaccgtgggctgctag

SEQ ID NO: 74555 - DNA, 555 bp, synthetic construct
  misc_feature 1..555: note = Description of Artificial Sequence: Synthetic coding sequence
  source 1..555: mol_type = other DNA
atgaccgccctgagactgctgcagagaatgaagagagactggatgcacaccggcagaagacccagcggcctgtgcggcgccgccctgctggtggccgccagaatgcacgacttcagaagaaccgtgaaggaggtgatcagcgtggtgaaggtgtgcgagagcaccctgagaaagagactgaccgagttcgaggacacccccaccagccagctgaccatcgacgagttcatgaagatcgacctggaggaggagtgcgacccccccagctacaccgccggccagagaaagctgagaatgaagcagctggagcaggtgctgagcaagaagctggaggaggtggagggcgagatcagcagctaccaggacgccatcgagatcgagctggagaacagcccccccagcagaagagagggcagaagaagacccgagagcctgcccagacccctgagaggcaaggcccccgtgcccctggtgggcggcctgagcagcggcatggccgcccccgacgtggccgagggcgccagcccctgcgtgctgagaagaggctggccctag

SEQ ID NO: 74556 - DNA, 1953 bp, synthetic construct
  misc_feature 1..1953: note = Description of Artificial Sequence: Synthetic coding sequence
  source 1..1953: mol_type = other DNA
atgaccggcagagtgtgcagaggctgcggcggcaccgacatcgagctggacgccgccagaggcgacgccgtgtgcaccgcctgcggcagcgtgctggaggacaacatcatcgtgagcgaggtgcagttcgtggagagcagcggcggcggcagcagcgccgtgggccagttcgtgagcctggacggcagaagacacatccaccacctgggcaaccagctgcagctgaaccagcactgcctggacaccgccttcaacttcttcaagatggccgtgagcagacacctgaccagaggcagaaagatggcccacgtgatcgccgcctgcctgtacctggtgtgcagaaccgagggcaccccccacatgctgctggacctgagcgacctgctgcaggtgaacgtgtacgtgctgggcaagaccttcctgctgctggccagagagctgtgcatcaacgcccccgccatcgacccctgcctgtacatccccagattcgcccacctgctggagttcggcgagaagaaccacgaggtgagcatgaccgccctgagactgctgcagagaatgaagagagactggatgcacaccggcagaagacccagcggcctgtgcggcgccgccctgctggtggccgccagaatgcacgacttcagaagaaccgtgaaggaggtgatcagcgtggtgaaggtgtgcgagagcaccctgagaaagagactgaccgagttcgaggacacccccaccagccagctgaccatcgacgagttcatgaagatcgacctggaggaggagtgcgacccccccagctacaccgccggccagagaaagctgagaatgaagcagctggagcaggtgctgagcaagaagctggaggaggtggagggcgagatcagcagctaccaggacgccatcgagatcgagctggagaacagcagacccaaggccaagggcggcctggccagcctggccaaggacggcagcaccgaggacaccgccagcagcctgtgcggcgaggaggacaccgaggacgaggagctggaggccgccgccagccacctgaacaaggacctgtacagagagctgctgggcggcgcccccggcagcagcgaggccgccggcagccccgagtggggcggcagaccccccgccctgggcagcctgctggaccccctgcccaccgccgccagcctgggcatcagcgacagcatcagagagtgcatcagcagccagagcagcgaccccaaggacgccagcggcgacggcgagctggacctgagcggcatcgacgacctggagatcgacagatacatcctgaacgagagcgaggccagagtgaaggccgagctgtggatgagagagaacgccgagtacctgagagagcagagagagaaggaggccagaatcgccaaggagaaggagctgggcatctacaaggagcacaagcccaagaagagctgcaagagaagagagcccatccaggccagcaccgccagagaggccatcgagaagatgctggagcagaagaagatcagcagcaagatcaactacagcgtgctgagaggcctgagcagcgccggcggcggcagcccccacagagaggacgcccagcccgagcacagcgccagcgccagaaagctgagcagaagaagaacccccgccagcagaagcggcgccgaccccgtgaccagcgtgggcaagagactgagacccctggtgagcacccagcccgccaagaaggtggccaccggcgaggccctgctgcccagcagccccaccctgggcgccgagcccgccagaccccaggccgtgctggtggagagcggccccgtgagctaccacgccgacgaggaggccgacgaggaggagcccgacgaggaggacggcgagccctgcgtgagcgccctgcagatgatgggcagcaacgactacggctgcgacggcgacgaggacgacggctactag

SEQ ID NO: 74557 - DNA, 1422 bp, synthetic construct
  misc_feature 1..1422: note = Description of Artificial Sequence: Synthetic coding sequence
  source 1..1422: mol_type = other DNA
atgaccgccctgagactgctgcagagaatgaagagagactggatgcacaccggcagaagacccagcggcctgtgcggcgccgccctgctggtggccgccagaatgcacgacttcagaagaaccgtgaaggaggtgatcagcgtggtgaaggtgtgcgagagcaccctgagaaagagactgaccgagttcgaggacacccccaccagccagctgaccatcgacgagttcatgaagatcgacctggaggaggagtgcgacccccccagctacaccgccggccagagaaagctgagaatgaagcagctggagcaggtgctgagcaagaagctggaggaggtggagggcgagatcagcagctaccaggacgccatcgagatcgagctggagaacagcagacccaaggccaagggcggcctggccagcctggccaaggacggcagcaccgaggacaccgccagcagcctgtgcggcgaggaggacaccgaggacgaggagctggaggccgccgccagccacctgaacaaggacctgtacagagagctgctgggcggcgcccccggcagcagcgaggccgccggcagccccgagtggggcggcagaccccccgccctgggcagcctgctggaccccctgcccaccgccgccagcctgggcatcagcgacagcatcagagagtgcatcagcagccagagcagcgaccccaaggacgccagcggcgacggcgagctggacctgagcggcatcgacgacctggagatcgacagatacatcctgaacgagagcgaggccagagtgaaggccgagctgtggatgagagagaacgccgagtacctgagagagcagagagagaaggaggccagaatcgccaaggagaaggagctgggcatctacaaggagcacaagcccaagaagagctgcaagagaagagagcccatccaggccagcaccgccagagaggccatcgagaagatgctggagcagaagaagatcagcagcaagatcaactacagcgtgctgagaggcctgagcagcgccggcggcggcagcccccacagagaggacgcccagcccgagcacagcgccagcgccagaaagctgagcagaagaagaacccccgccagcagaagcggcgccgaccccgtgaccagcgtgggcaagagactgagacccctggtgagcacccagcccgccaagaaggtggccaccggcgaggccctgctgcccagcagccccaccctgggcgccgagcccgccagaccccaggccgtgctggtggagagcggccccgtgagctaccacgccgacgaggaggccgacgaggaggagcccgacgaggaggacggcgagccctgcgtgagcgccctgcagatgatgggcagcaacgactacggctgcgacggcgacgaggacgacggctactag

SEQ ID NO: 74558 - DNA, 1755 bp, synthetic construct
  misc_feature 1..1755: note = Description of Artificial Sequence: Synthetic coding sequence
  source 1..1755: mol_type = other DNA
atggccgtgagcagacacctgaccagaggcagaaagatggcccacgtgatcgccgcctgcctgtacctggtgtgcagaaccgagggcaccccccacatgctgctggacctgagcgacctgctgcaggtgaacgtgtacgtgctgggcaagaccttcctgctgctggccagagagctgtgcatcaacgcccccgccatcgacccctgcctgtacatccccagattcgcccacctgctggagttcggcgagaagaaccacgaggtgagcatgaccgccctgagactgctgcagagaatgaagagagactggatgcacaccggcagaagacccagcggcctgtgcggcgccgccctgctggtggccgccagaatgcacgacttcagaagaaccgtgaaggaggtgatcagcgtggtgaaggtgtgcgagagcaccctgagaaagagactgaccgagttcgaggacacccccaccagccagctgaccatcgacgagttcatgaagatcgacctggaggaggagtgcgacccccccagctacaccgccggccagagaaagctgagaatgaagcagctggagcaggtgctgagcaagaagctggaggaggtggagggcgagatcagcagctaccaggacgccatcgagatcgagctggagaacagcagacccaaggccaagggcggcctggccagcctggccaaggacggcagcaccgaggacaccgccagcagcctgtgcggcgaggaggacaccgaggacgaggagctggaggccgccgccagccacctgaacaaggacctgtacagagagctgctgggcggcgcccccggcagcagcgaggccgccggcagccccgagtggggcggcagaccccccgccctgggcagcctgctggaccccctgcccaccgccgccagcctgggcatcagcgacagcatcagagagtgcatcagcagccagagcagcgaccccaaggacgccagcggcgacggcgagctggacctgagcggcatcgacgacctggagatcgacagaagagacctgagcatgcccagatgcgccaaggccaagagccagccccacttccccgtgctggcccagtacatcctgaacgagagcgaggccagagtgaaggccgagctgtggatgagagagaacgccgagtacctgagagagcagagagagaaggaggccagaatcgccaaggagaaggagctgggcatctacaaggagcacaagcccaagaagagctgcaagagaagagagcccatccaggccagcaccgccagagaggccatcgagaagatgctggagcagaagaagatcagcagcaagatcaactacagcgtgctgagaggcctgagcagcgccggcggcggcagcccccacagagaggacgcccagcccgagcacagcgccagcgccagaaagctgagcagaagaagaacccccgccagcagaagcggcgccgaccccgtgaccagcgtgggcaagagactgagacccctggtgagcacccagcccgccaagaaggtggccaccggcgaggccctgctgcccagcagccccaccctgggcgccgagcccgccagaccccaggccgtgctggtggagagcggccccgtgagctaccacgccgacgaggaggccgacgaggaggagcccgacgaggaggacggcgagccctgcgtgagcgccctgcagatgatgggcagcaacgactacggctgcgacggcgacgaggacgacggctactag

SEQ ID NO: 74559 - DNA, 1320 bp, synthetic construct
  misc_feature 1..1320: note = Description of Artificial Sequence: Synthetic coding sequence
  source 1..1320: mol_type = other DNA
atgcacgacttcagaagaaccgtgaaggaggtgatcagcgtggtgaaggtgtgcgagagcaccctgagaaagagactgaccgagttcgaggacacccccaccagccagctgaccatcgacgagttcatgaagatcgacctggaggaggagtgcgacccccccagctacaccgccggccagagaaagctgagaatgaagcagctggagcaggtgctgagcaagaagctggaggaggtggagggcgagatcagcagctaccaggacgccatcgagatcgagctggagaacagcagacccaaggccaagggcggcctggccagcctggccaaggacggcagcaccgaggacaccgccagcagcctgtgcggcgaggaggacaccgaggacgaggagctggaggccgccgccagccacctgaacaaggacctgtacagagagctgctgggcggcgcccccggcagcagcgaggccgccggcagccccgagtggggcggcagaccccccgccctgggcagcctgctggaccccctgcccaccgccgccagcctgggcatcagcgacagcatcagagagtgcatcagcagccagagcagcgaccccaaggacgccagcggcgacggcgagctggacctgagcggcatcgacgacctggagatcgacagatacatcctgaacgagagcgaggccagagtgaaggccgagctgtggatgagagagaacgccgagtacctgagagagcagagagagaaggaggccagaatcgccaaggagaaggagctgggcatctacaaggagcacaagcccaagaagagctgcaagagaagagagcccatccaggccagcaccgccagagaggccatcgagaagatgctggagcagaagaagatcagcagcaagatcaactacagcgtgctgagaggcctgagcagcgccggcggcggcagcccccacagagaggacgcccagcccgagcacagcgccagcgccagaaagctgagcagaagaagaacccccgccagcagaagcggcgccgaccccgtgaccagcgtgggcaagagactgagacccctggtgagcacccagcccgccaagaaggtggccaccggcgaggccctgctgcccagcagccccaccctgggcgccgagcccgccagaccccaggccgtgctggtggagagcggccccgtgagctaccacgccgacgaggaggccgacgaggaggagcccgacgaggaggacggcgagccctgcgtgagcgccctgcagatgatgggcagcaacgactacggctgcgacggcgacgaggacgacggctactag

SEQ ID NO: 74560 - DNA, 2034 bp, synthetic construct
  misc_feature 1..2034: note = Description of Artificial Sequence: Synthetic coding sequence
  source 1..2034: mol_type = other DNA
atgaccggcagagtgtgcagaggctgcggcggcaccgacatcgagctggacgccgccagaggcgacgccgtgtgcaccgcctgcggcagcgtgctggaggacaacatcatcgtgagcgaggtgcagttcgtggagagcagcggcggcggcagcagcgccgtgggccagttcgtgagcctggacggcgccggcaagacccccaccctgggcggcggcttccacgtgaacctgggcaaggagagcagagcccagaccctgcagaacggcagaagacacatccaccacctgggcaaccagctgcagctgaaccagcactgcctggacaccgccttcaacttcttcaagatggccgtgagcagacacctgaccagaggcagaaagatggcccacgtgatcgccgcctgcctgtacctggtgtgcagaaccgagggcaccccccacatgctgctggacctgagcgacctgctgcaggtgaacgtgtacgtgctgggcaagaccttcctgctgctggccagagagctgtgcatcaacgcccccgccatcgacccctgcctgtacatccccagattcgcccacctgctggagttcggcgagaagaaccacgaggtgagcatgaccgccctgagactgctgcagagaatgaagagagactggatgcacaccggcagaagacccagcggcctgtgcggcgccgccctgctggtggccgccagaatgcacgacttcagaagaaccgtgaaggaggtgatcagcgtggtgaaggtgtgcgagagcaccctgagaaagagactgaccgagttcgaggacacccccaccagccagctgaccatcgacgagttcatgaagatcgacctggaggaggagtgcgacccccccagctacaccgccggccagagaaagctgagaatgaagcagctggagcaggtgctgagcaagaagctggaggaggtggagggcgagatcagcagctaccaggacgccatcgagatcgagctggagaacagcagacccaaggccaagggcggcctggccagcctggccaaggacggcagcaccgaggacaccgccagcagcctgtgcggcgaggaggacaccgaggacgaggagctggaggccgccgccagccacctgaacaaggacctgtacagagagctgctgggcggcgcccccggcagcagcgaggccgccggcagccccgagtggggcggcagaccccccgccctgggcagcctgctggaccccctgcccaccgccgccagcctgggcatcagcgacagcatcagagagtgcatcagcagccagagcagcgaccccaaggacgccagcggcgacggcgagctggacctgagcggcatcgacgacctggagatcgacagatacatcctgaacgagagcgaggccagagtgaaggccgagctgtggatgagagagaacgccgagtacctgagagagcagagagagaaggaggccagaatcgccaaggagaaggagctgggcatctacaaggagcacaagcccaagaagagctgcaagagaagagagcccatccaggccagcaccgccagagaggccatcgagaagatgctggagcagaagaagatcagcagcaagatcaactacagcgtgctgagaggcctgagcagcgccggcggcggcagcccccacagagaggacgcccagcccgagcacagcgccagcgccagaaagctgagcagaagaagaacccccgccagcagaagcggcgccgaccccgtgaccagcgtgggcaagagactgagacccctggtgagcacccagcccgccaagaaggtggccaccggcgaggccctgctgcccagcagccccaccctgggcgccgagcccgccagaccccaggccgtgctggtggagagcggccccgtgagctaccacgccgacgaggaggccgacgaggaggagcccgacgaggaggacggcgagccctgcgtgagcgccctgcagatgatgggcagcaacgactacggctgcgacggcgacgaggacgacggctactag

SEQ ID NO: 74561 - DNA, 612 bp, synthetic construct
  misc_feature 1..612: note = Description of Artificial Sequence: Synthetic coding sequence
  source 1..612: mol_type = other DNA
atgagagagaacgccgagtacctgagagagcagagagagaaggaggccagaatcgccaaggagaaggagctgggcatctacaaggagcacaagcccaagaagagctgcaagagaagagagcccatccaggccagcaccgccagagaggccatcgagaagatgctggagcagaagaagatcagcagcaagatcaactacagcgtgctgagaggcctgagcagcgccggcggcggcagcccccacagagaggacgcccagcccgagcacagcgccagcgccagaaagctgagcagaagaagaacccccgccagcagaagcggcgccgaccccgtgaccagcgtgggcaagagactgagacccctggtgagcacccagcccgccaagaaggtggccaccggcgaggccctgctgcccagcagccccaccctgggcgccgagcccgccagaccccaggccgtgctggtggagagcggccccgtgagctaccacgccgacgaggaggccgacgaggaggagcccgacgaggaggacggcgagccctgcgtgagcgccctgcagatgatgggcagcaacgactacggctgcgacggcgacgaggacgacggctactag

SEQ ID NO: 74562 - DNA, 714 bp, synthetic construct
  misc_feature 1..714: note = Description of Artificial Sequence: Synthetic coding sequence
  source 1..714: mol_type = other DNA
atgaccgccctgagactgctgcagagaatgaagagagactggatgcacaccggcagaagacccagcggcctgtgcggcgccgccctgctggtggccgccagaatgcacgacttcagaagaaccgtgaaggaggtgatcagcgtggtgaaggtgtgcgagagcaccctgagaaagagactgaccgagttcgaggacacccccaccagccagctgaccatcgacgagttcatgaagatcgacctggaggaggagtgcgacccccccagctacaccgccggccagagaaagctgagaatgaagcagctggagcaggtgctgagcaagaagctggaggaggtggagggcgagatcagcagctaccaggacgccatcgagatcgagctggagaacagcagacccaaggccaagggcggcctggccagcctggccaaggacggcagcaccgaggacaccgccagcagcctgtgcggcgaggaggacaccgaggacgaggagctggaggccgccgccagccacctgaacaaggacctgtacagagagctgctgggcggcgcccccggcagcagcgaggccgccggcagccccgagtggggcggcagaccccccgccctgggcagcctgctggaccccctgcccaccgccgccagcctgggcatcagcgacagcatcagagagtgcatcagcagccagagcagcgaccccagcgagttctag

SEQ ID NO: 74563 - DNA, 138 bp, synthetic construct
  misc_feature 1..138: note = Description of Artificial Sequence: Synthetic coding sequence
  source 1..138: mol_type = other DNA
atgaccgccctgagactgctgcagagaatgaagagagactggatgcacaccggcagaagacccagcggcctgtgcggcgccgccctgctggtggccgccagaatgcacgacttcagaagaaccgtgaaggaggtgtag

SEQ ID NO: 74564 - DNA, 45 bp, synthetic construct
  misc_feature 1..45: note = Description of Artificial Sequence: Synthetic coding sequence
  source 1..45: mol_type = other DNA
atgaccgccctgagactgctgcagagaatgaagagagactggtag

SEQ ID NO: 74565 - DNA, 468 bp, synthetic construct
  misc_feature 1..468: note = Description of Artificial Sequence: Synthetic coding sequence
  source 1..468: mol_type = other DNA
atgaccgccctgagactgctgcagagaatgaagagagactggatgcacaccggcagaagacccagcggcctgtgcggcgccgccctgctggtggccgccagaatgcacgacttcagaagaaccgtgaaggaggtgatcagcgtggtgaaggtgtgcgagagcaccctgagaaagagactgaccgagttcgaggacacccccaccagccagctgaccatcgacgagttcatgaagatcgacctggaggaggagtgcgacccccccagctacaccgccggccagagaaagctgagaatgaagcagctggagcaggtgctgagcaagaagctggaggaggtggagggcgagatcagcagctaccaggacgccatcgagatcgagctggagaacagcagacccaaggccaagggcggcctggccagcctggccaaggacggcagcaccgaggacaccgccagcagcctgtag

SEQ ID NO: 74566 - DNA, 8307 bp, synthetic construct
  misc_feature 1..8307: note = Description of Artificial Sequence: Synthetic coding sequence
  source 1..8307: mol_type = other DNA
atggccctggtgctggagatcttcaccctgctggccagcatctgctgggtgagcgccaacatcttcgagtaccaggtggacgcccagcccctgagaccctgcgagctgcagagagagaccgccttcctgaagcaggccgactacgtgccccagtgcgccgaggacggcagcttccagaccgtgcagtgccagaacgacggcagaagctgctggtgcgtgggcgccaacggcagcgaggtgctgggcagcagacagcccggcagacccgtggcctgcctgagcttctgccagctgcagaagcagcagatcctgctgagcggctacatcaacagcaccgacaccagctacctgccccagtgccaggacagcggcgactacgcccccgtgcagtgcgacgtgcagcaggtgcagtgctggtgcgtggacgccgagggcatggaggtgtacggcaccagacagctgggcagacccaagagatgccccagaagctgcgagatcagaaacagaagactgctgcacggcgtgggcgacaagagccccccccagtgcagcgccgagggcgagttcatgcccgtgcagtgcaagttcgtgaacaccaccgacatgatgatcttcgacctggtgcacagctacaacagattccccgacgccttcgtgaccttcagcagcttccagagaagattccccgaggtgagcggctactgccactgcgccgacagccagggcagagagctggccgagaccggcctggagctgctgctggacgagatctacgacaccatcttcgccggcctggacctgcccagcaccttcaccgagaccaccctgtacagaatcctgcagagaagattcctggccgtgcagagcgtgatcagcggcagattcagatgccccaccaagtgcgaggtggagagattcaccgccaccagcttcggccacccctacgtgcccagctgcagaagaaacggcgactaccaggccgtgcagtgccagaccgagggcccctgctggtgcgtggacgcccagggcaaggagatgcacggcaccagacagcagggcgagccccccagctgcgccgagggccagagctgcgccagcgagagacagcaggccctgagcagactgtacttcggcaccagcggctacttcagccagcacgacctgttcagcagccccgagaagagatgggccagccccagagtggccagattcgccaccagctgcccccccaccatcaaggagctgttcgtggacagcggcctgctgagacccatggtggagggccagagccagcagttcagcgtgagcgagaacctgctgaaggaggccatcagagccatcttccccagcagaggcctggccagactggccctgcagttcaccaccaaccccaagagactgcagcagaacctgttcggcggcaagttcctggtgaacgtgggccagttcaacctgagcggcgccctgggcaccagaggcaccttcaacttcagccagttcttccagcagctgggcctggccagcttcctgaacggcggcagacaggaggacctggccaagcccctgagcgtgggcctggacagcaacagcagcaccggcacccccgaggccgccaagaaggacggcaccatgaacaagcccaccgtgggcagcttcggcttcgagatcaacctgcaggagaaccagaacgccctgaagttcctggccagcctgctggagctgcccgagttcctgctgttcctgcagcacgccatcagcgtgcccgaggacgtggccagagacctgggcgacgtgatggagaccgtgctgagcagccagacctgcgagcagacccccgagagactgttcgtgcccagctgcaccaccgagggcagctacgaggacgtgcagtgcttcagcggcgagtgctggtgcgtgaacagctggggcaaggagctgcccggcagcagagtgagaggcggccagcccagatgccccaccgactgcgagaagcagagagccagaatgcagagcctgatgggcagccagcccgccggcagcaccctgttcgtgcccgcctgcaccagcgagggccacttcctgcccgtgcagtgcttcaacagcgagtgctactgcgtggacgccgagggccaggccatccccggcaccagaagcgccatcggcaagcccaagaagtgccccaccccctgccagctgcagagcgagcaggccttcctgagaaccgtgcaggccctgctgagcaacagcagcatgctgcccaccctgagcgacacctacatcccccagtgcagcaccgacggccagtggagacaggtgcagtgcaacggcccccccgagcaggtgttcgagctgtaccagagatgggaggcccagaacaagggccaggacctgacccccgccaagctgctggtgaagatcatgagctacagagaggccgccagcggcaacttcagcctgttcatccagagcctgtacgaggccggccagcaggacgtgttccccgtgctgagccagtaccccagcctgcaggacgtgcccctggccgccctggagggcaagagaccccagcccagagagaacatcctgctggagccctacctgttctggcagatcctgaacggccagctgagccagtaccccggcagctacagcgacttcagcacccccctggcccacttcgacctgagaaactgctggtgcgtggacgaggccggccaggagctggagggcatgagaagcgagcccagcaagctgcccacctgccccggcagctgcgaggaggccaagctgagagtgctgcagttcatcagagagaccgaggagatcgtgagcgccagcaacagcagcagattccccctgggcgagagcttcctggtggccaagggcatcagactgagaaacgaggacctgggcctgccccccctgttcccccccagagaggccttcgccgagcagttcctgagaggcagcgactacgccatcagactggccgcccagagcaccctgagcttctaccagagaagaagattcagccccgacgacagcgccggcgccagcgccctgctgagaagcggcccctacatgccccagtgcgacgccttcggcagctgggagcccgtgcagtgccacgccggcaccggccactgctggtgcgtggacgagaagggcggcttcatccccggcagcctgaccgccagaagcctgcagatcccccagtgccccaccacctgcgagaagagcagaaccagcggcctgctgagcagctggaagcaggccagaagccaggagaaccccagccccaaggacctgttcgtgcccgcctgcctggagaccggcgagtacgccagactgcaggccagcggcgccggcacctggtgcgtggaccccgccagcggcgaggagctgagacccggcagcagcagcagcgcccagtgccccagcctgtgcaacgtgctgaagagcggcgtgctgagcagaagagtgagccccggctacgtgcccgcctgcagagccgaggacggcggcttcagccccgtgcagtgcgaccaggcccagggcagctgctggtgcgtgatggacagcggcgaggaggtgcccggcaccagagtgaccggcggccagcccgcctgcgagagccccagatgccccctgcccttcaacgccagcgaggtggtgggcggcaccatcctgtgcgagaccatcagcggccccaccggcagcgccatgcagcagtgccagctgctgtgcagacagggcagctggagcgtgttcccccccggccccctgatctgcagcctggagagcggcagatgggagagccagctgccccagcccagagcctgccagagaccccagctgtggcagaccatccagacccagggccacttccagctgcagctgccccccggcaagatgtgcagcgccgactacgccgacctgctgcagaccttccaggtgttcatcctggacgagctgaccgccagaggcttctgccagatccaggtgaagaccttcggcaccctggtgagcatccccgtgtgcaacaacagcagcgtgcaggtgggctgcctgaccagagagagactgggcgtgaacgtgacctggaagagcagactggaggacatccccgtggccagcctgcccgacctgcacgacatcgagagagccctggtgggcaaggacctgctgggcagattcaccgacctgatccagagcggcagcttccagctgcacctggacagcaagaccttccccgccgagaccatcagattcctgcagggcgaccacttcggcaccagccccagaacctggttcggctgcagcgagggcttctaccaggtgctgaccagcgaggccagccaggacggcctgggctgcgtgaagtgccccgagggcagctacagccaggacgaggagtgcatcccctgccccgtgggcttctaccaggagcaggccggcagcctggcctgcgtgccctgccccgtgggcagaaccaccatcagcgccggcgccttcagccagacccactgcgtgaccgactgccagagaaacgaggccggcctgcagtgcgaccagaacggccagtacagagccagccagaaggacagaggcagcggcaaggccttctgcgtggacggcgagggcagaagactgccctggtgggagaccgaggcccccctggaggacagccagtgcctgatgatgcagaagttcgagaaggtgcccgagagcaaggtgatcttcgacgccaacgcccccgtggccgtgagaagcaaggtgcccgacagcgagttccccgtgatgcagtgcctgaccgactgcaccgaggacgaggcctgcagcttcttcaccgtgagcaccaccgagcccgagatcagctgcgacttctacgcctggaccagcgacaacgtggcctgcatgaccagcgaccagaagagagacgccctgggcaacagcaaggccaccagcttcggcagcctgagatgccaggtgaaggtgagaagccacggccaggacagccccgccgtgtacctgaagaagggccagggcagcaccaccaccctgcagaagagattcgagcccaccggcttccagaacatgctgagcggcctgtacaaccccatcgtgttcagcgccagcggcgccaacctgaccgacgcccacctgttctgcctgctggcctgcgacagagacctgtgctgcgacggcttcgtgctgacccaggtgcagggcggcgccatcatctgcggcctgctgagcagccccagcgtgctgctgtgcaacgtgaaggactggatggaccccagcgaggcctgggccaacgccacctgccccggcgtgacctacgaccaggagagccaccaggtgatcctgagactgggcgaccaggagttcatcaagagcctgacccccctggagggcacccaggacaccttcaccaacttccagcaggtgtacctgtggaaggacagcgacatgggcagcagacccgagagcatgggctgcagaaaggacaccgtgcccagacccgccagccccaccgaggccggcctgaccaccgagctgttcagccccgtggacctgaaccaggtgatcgtgaacggcaaccagagcctgagcagccagaagcactggctgttcaagcacctgttcagcgcccagcaggccaacctgtggtgcctgagcagatgcgtgcaggagcacagcttctgccagctggccgagatcaccgagagcgccagcctgtacttcacctgcaccctgtaccccgaggcccaggtgtgcgacgacatcatggagagcaacgcccagggctgcagactgatcctgccccagatgcccaaggccctgttcagaaagaaggtgatcctggaggacaaggtgaagaacttctacaccagactgcccttccagaagctgatgggcatcagcatcagaaacaaggtgcccatgagcgagaagagcatcagcaacggcttcttcgagtgcgagagaagatgcgacgccgacccctgctgcaccggcttcggcttcctgaacgtgagccagctgaagggcggcgaggtgacctgcctgaccctgaacagcctgggcatccagatgtgcagcgaggagaacggcggcgcctggagaatcctggactgcggcagccccgacatcgaggtgcacacctaccccttcggctggtaccagaagcccatcgcccagaacaacgcccccagcttctgccccctggtggtgctgcccagcctgaccgagaaggtgagcctggacagctggcagagcctggccctgagcagcgtggtggtggaccccagcatcagacacttcgacgtggcccacgtgagcaccgccgccaccagcaacttcagcgccgtgagagacctgtgcctgagcgagtgcagccagcacgaggcctgcctgatcaccaccctgcagacccagcccggcgccgtgagatgcatgttctacgccgacacccagagctgcacccacagcctgcagggccagaactgcagactgctgctgagagaggaggccacccacatctacagaaagcccggcatcagcctgctgagctacgaggccagcgtgcccagcgtgcccatcagcacccacggcagactgctgggcagaagccaggccatccaggtgggcaccagctggaagcaggtggaccagttcctgggcgtgccctacgccgccccccccctggccgagagaagattccaggcccccgagcccctgaactggaccggcagctgggacgccagcaagcccagagccagctgctggcagcccggcaccagaaccagcaccagccccggcgtgagcgaggactgcctgtacctgaacgtgttcatcccccagaacgtggcccccaacgccagcgtgctggtgttcttccacaacaccatggacagagaggagagcgagggctggcccgccatcgacggcagcttcctggccgccgtgggcaacctgatcgtggtgaccgccagctacagagtgggcgtgttcggcttcctgagcagcggcagcggcgaggtgagcggcaactggggcctgctggaccaggtggccgccctgacctgggtgcagacccacatcagaggcttcggcggcgaccccagaagagtgagcctggccgccgacagaggcggcgccgacgtggccagcatccacctgctgaccgccagagccaccaacagccagctgttcagaagagccgtgctgatgggcggcagcgccctgagccccgccgccgtgatcagccacgagagagcccagcagcaggccatcgccctggccaaggaggtgagctgccccatgagcagcagccaggaggtggtgagctgcctgagacagaagcccgccaacgtgctgaacgacgcccagaccaagctgctggccgtgagcggccccttccactactggggccccgtgatcgacggccacttcctgagagagccccccgccagagccctgaagagaagcctgtgggtggaggtggacctgctgatcggcagcagccaggacgacggcctgatcaacagagccaaggccgtgaagcagttcgaggagagcagaggcagaaccagcagcaagaccgccttctaccaggccctgcagaacagcctgggcggcgaggacagcgacgccagagtggaggccgccgccacctggtactacagcctggagcacagcaccgacgactacgccagcttcagcagagccctggagaacgccaccagagactacttcatcatctgccccatcatcgacatggccagcgcctgggccaagagagccagaggcaacgtgttcatgtaccacgcccccgagaactacggccacggcagcctggagctgctggccgacgtgcagttcgccctgggcctgcccttctaccccgcctacgagggccagttcagcctggaggagaagagcctgagcctgaagatcatgcagtacttcagccacttcatcagaagcggcaaccccaactacccctacgagttcagcagaaaggtgcccaccttcgccaccccctggcccgacttcgtgcccagagccggcggcgagaactacaaggagttcagcgagctgctgcccaacagacagggcctgaagaaggccgactgcagcttctggagcaagtacatcagcagcctgaagaccagcgccgacggcgccaagggcggccagagcgccgagagcgaggaggaggagctgaccgccggcagcggcctgagagaggacctgctgagcctgcaggagcccggcagcaagacctacagcaagtag

SEQ ID NO: 74567 - DNA, 1191 bp, synthetic construct
  misc_feature 1..1191: note = Description of Artificial Sequence: Synthetic coding sequence
  source 1..1191: mol_type = other DNA
atgcccggcagaggcagatgccccgactgcgtggtgaccgagggcgtgctgaccaccaccttcagcgacgagggcaacctgagagaggtgacctacagcagaagcaccggcgagaacgagcaggtgagcagaagccagcagagaggcctgagaagagtgagagacctgtgcagagtgctgcagctgccccccaccttcgaggacaccgccgtggcctactaccagcaggcctacagacacagcggcatcagagccgccagactgcagaagaaggaggtgctggtgggctgctgcgtgctgatcacctgcagacagcacaactggcccctgaccatgggcgccatctgcaccctgctgtacgccgacctggacgtgttcagcagcacctacatgcagatcgtgaagctgctgggcctggacgtgcccagcctgtgcctggccgagctggtgaagacctactgcagcagcttcaagctgttccaggccagccccagcgtgcccgccaagtacgtggaggacaaggagaagatgctgagcagaaccatgcagctggtggagctggccaacgagacctggctggtgaccggcagacaccccctgcccgtgatcaccgccgccaccttcctggcctggcagagcctgcagcccgccgacagactgagctgcagcctggccagattctgcaagctggccaacgtggacctgccctaccccgccagcagcagactgcaggagctgctggccgtgctgctgagaatggccgagcagctggcctggctgagagtgctgagactggacaagagaagcgtggtgaagcacatcggcgacctgctgcagcacagacagagcctggtgagaagcgccttcagagacggcaccgccgaggtggagaccagagagaaggagccccccggctggggccagggccagggcgagggcgaggtgggcaacaacagcctgggcctgccccagggcaagagacccgccagccccgccctgctgctgcccccctgcatgctgaagagccccaagagaatctgccccgtgccccccgtgagcaccgtgaccggcgacgagaacatcagcgacagcgagatcgagcagtacctgagaaccccccaggaggtgagagacttccagagagcccaggccgccagacaggccgccaccagcgtgcccaaccccccctag

SEQ ID NO: 74568 - DNA, 1698 bp, synthetic construct
  misc_feature 1..1698: note = Description of Artificial Sequence: Synthetic coding sequence
  source 1..1698: mol_type = other DNA
atggccgagggcaaggccggcggcgccgccggcctgttcgccaagcaggtgcagaagaagttcagcagagcccaggagaaggtgctgcagaagctgggcaaggccgtggagaccaaggacgagagattcgagcagagcgccagcaacttctaccagcagcaggccgagggccacaagctgtacaaggacctgaagaacttcctgagcgccgtgaaggtgatgcacgagagcagcaagagagtgagcgagaccctgcaggagatctacagcagcgagtgggacggccacgaggagctgaaggccatcgtgtggaacaacgacctgctgtgggaggactacgaggagaagctggccgaccaggccgtgagaaccatggagatctacgtggcccagttcagcgagatcaaggagagaatcgccaagagaggcagaaagctggtggactacgacagcgccagacaccacctggaggccgtgcagaacgccaagaagaaggacgaggccaagaccgccaaggccgaggaggagttcaacaaggcccagaccgtgttcgaggacctgaaccaggagctgctggaggagctgcccatcctgtacaacagcagaatcggctgctacgtgaccatcttccagaacatcagcaacctgagagacgtgttctacagagagatgagcaagctgaaccacaacctgtacgaggtgatgagcaagctggagaagcagcacagcaacaaggtgttcgtggtgaagggcctgagcagcagcagcagaagaagcctggtgatcagcccccccgtgagaaccgccaccgtgagcagccccctgaccagccccaccagccccagcaccctgagcctgaagagcgagagcgagagcgtgagcgccaccgaggacctggcccccgacgccgcccagggcgaggacaacagcgagatcaaggagctgctggaggaggaggagatcgagaaggagggcagcgaggccagcagcagcgaggaggacgagcccctgcccgcctgcaacggccccgcccaggcccagcccagccccaccaccgagagagccaagagccaggaggaggtgctgcccagcagcaccacccccagccccggcggcgccctgagccccagcggccagcccagcagcagcgccaccgaggtggtgctgagaaccagaaccgccagcgagggcagcgagcagcccaagaagagagccagcatccagagaaccagcgccccccccagcagaccccccccccccagagccaccgccagccccagacccagcagcggcaacatccccagcagccccaccgccagcggcggcggcagccccaccagccccagagccagcctgggcaccggcaccgccagccccagaaccagcctggaggtgagccccaaccccgagccccccgagaagcccgtgagaacccccgaggccaaggagaacgagaacatccacaaccagaaccccgaggagctgtgcaccagccccaccctgatgaccagccaggtggccagcgagcccggcgaggccaagaagatggaggacaaggagaaggacaacaagctgatcagcgccaacagcagcgagggccaggaccagctgcaggtgagcatggtgcccgagaacaacaacctgaccgcccccgagccccaggaggaggtgagcaccagcgagaacccccagctgtag

SEQ ID NO: 74569 - DNA, 1602 bp, synthetic construct
  misc_feature 1..1602: note = Description of Artificial Sequence: Synthetic coding sequence
  source 1..1602: mol_type = other DNA
atggccgagggcaaggccggcggcgccgccggcctgttcgccaagcaggtgcagaagaagttcagcagagcccaggagaaggtgctgcagaagctgggcaaggccgtggagaccaaggacgagagattcgagcagagcgccagcaacttctaccagcagcaggccgagggccacaagctgtacaaggacctgaagaacttcctgagcgccgtgaaggtgatgcacgagagcagcaagagagtgagcgagaccctgcaggagatctacagcagcgagtgggacggccacgaggagctgaaggccatcgtgtgggagagaatcgccaagagaggcagaaagctggtggactacgacagcgccagacaccacctggaggccgtgcagaacgccaagaagaaggacgaggccaagaccgccaaggccgaggaggagttcaacaaggcccagaccgtgttcgaggacctgaaccaggagctgctggaggagctgcccatcctgtacaacagcagaatcggctgctacgtgaccatcttccagaacatcagcaacctgagagacgtgttctacagagagatgagcaagctgaaccacaacctgtacgaggtgatgagcaagctggagaagcagcacagcaacaaggtgttcgtggtgaagggcctgagcagcagcagcagaagaagcctggtgatcagcccccccgtgagaaccgccaccgtgagcagccccctgaccagccccaccagccccagcaccctgagcctgaagagcgagagcgagagcgtgagcgccaccgaggacctggcccccgacgccgcccagggcgaggacaacagcgagatcaaggagctgctggaggaggaggagatcgagaaggagggcagcgaggccagcagcagcgaggaggacgagcccctgcccgcctgcaacggccccgcccaggcccagcccagccccaccaccgagagagccaagagccaggaggaggtgctgcccagcagcaccacccccagccccggcggcgccctgagccccagcggccagcccagcagcagcgccaccgaggtggtgctgagaaccagaaccgccagcgagggcagcgagcagcccaagaagagagccagcatccagagaaccagcgccccccccagcagaccccccccccccagagccaccgccagccccagacccagcagcggcaacatccccagcagccccaccgccagcggcggcggcagccccaccagccccagagccagcctgggcaccggcaccgccagccccagaaccagcctggaggtgagccccaaccccgagccccccgagaagcccgtgagaacccccgaggccaaggagaacgagaacatccacaaccagaaccccgaggagctgtgcaccagccccaccctgatgaccagccaggtggccagcgagcccggcgaggccaagaagatggaggacaaggagaaggacaacaagctgatcagcgccaacagcagcgagggccaggaccagctgcaggtgagcatggtgcccgagaacaacaacctgaccgcccccgagccccaggaggaggtgagcaccagcgagaacccccagctgtag

SEQ ID NO: 74570 - DNA, 1620 bp, synthetic construct
  misc_feature 1..1620: note = Description of Artificial Sequence: Synthetic coding sequence
  source 1..1620: mol_type = other DNA
atggtgctgcagaagctgggcaaggccgtggagaccaaggacgagagattcgagcagagcgccagcaacttctaccagcagcaggccgagggccacaagctgtacaaggacctgaagaacttcctgagcgccgtgaaggtgatgcacgagagcagcaagagagtgagcgagaccctgcaggagatctacagcagcgagtgggacggccacgaggagctgaaggccatcgtgtggaacaacgacctgctgtgggaggactacgaggagaagctggccgaccaggccgtgagaaccatggagatctacgtggcccagttcagcgagatcaaggagagaatcgccaagagaggcagaaagctggtggactacgacagcgccagacaccacctggaggccgtgcagaacgccaagaagaaggacgaggccaagaccgccaaggccgaggaggagttcaacaaggcccagaccgtgttcgaggacctgaaccaggagctgctggaggagctgcccatcctgtacaacagcagaatcggctgctacgtgaccatcttccagaacatcagcaacctgagagacgtgttctacagagagatgagcaagctgaaccacaacctgtacgaggtgatgagcaagctggagaagcagcacagcaacaaggtgttcgtggtgaagggcctgagcagcagcagcagaagaagcctggtgatcagcccccccgtgagaaccgccaccgtgagcagccccctgaccagccccaccagccccagcaccctgagcctgaagagcgagagcgagagcgtgagcgccaccgaggacctggcccccgacgccgcccagggcgaggacaacagcgagatcaaggagctgctggaggaggaggagatcgagaaggagggcagcgaggccagcagcagcgaggaggacgagcccctgcccgcctgcaacggccccgcccaggcccagcccagccccaccaccgagagagccaagagccaggaggaggtgctgcccagcagcaccacccccagccccggcggcgccctgagccccagcggccagcccagcagcagcgccaccgaggtggtgctgagaaccagaaccgccagcgagggcagcgagcagcccaagaagagagccagcatccagagaaccagcgccccccccagcagaccccccccccccagagccaccgccagccccagacccagcagcggcaacatccccagcagccccaccgccagcggcggcggcagccccaccagccccagagccagcctgggcaccggcaccgccagccccagaaccagcctggaggtgagccccaaccccgagccccccgagaagcccgtgagaacccccgaggccaaggagaacgagaacatccacaaccagaaccccgaggagctgtgcaccagccccaccctgatgaccagccaggtggccagcgagcccggcgaggccaagaagatggaggacaaggagaaggacaacaagctgatcagcgccaacagcagcgagggccaggaccagctgcaggtgagcatggtgcccgagaacaacaacctgaccgcccccgagccccaggaggaggtgagcaccagcgagaacccccagctgtag

SEQ ID NO: 74571 - DNA, 762 bp, synthetic construct
  misc_feature 1..762: note = Description of Artificial Sequence: Synthetic coding sequence
  source 1..762: mol_type = other DNA
atgagctggatccccttcaagatcggccagcccaagaagcagatcgtgcccaagaccgtggagagagacttcgagagagagtacggcaagctgcagcagctggaggagcagaccagaagactgcagaaggacatgaagaagagcaccgacgccgacctggccatgagcaagagcgccgtgaagatcagcctggacctgctgagcaaccccctgtgcgagcaggaccaggacctgctgaacatggtgaccgccctggacaccgccatgaagagaatggacgccttcaaccaggagaaggtgaaccagatccagaagaccgtgatcgagcccctgaagaagttcggcagcgtgttccccagcctgaacatggccgtgaagagaagagagcaggccctgcaggactacagaagactgcaggccaaggtggagaagtacgaggagaaggagaagaccggccccgtgctggccaagctgcaccaggccagagaggagctgagacccgtgagagaggacttcgaggccaagaacagacagctgctggaggagatgcccagattctacggcagcagactggactacttccagcccagcttcgagagcctgatcagagcccaggtggtgtactacagcgagatgcacaagatcttcggcgacctgagccaccagctggaccagcccggccacagcgacgagcagagagagagagagaacgaggccaagctgagcgagctgagagccctgagcatcgtggccgacgactag

SEQ ID NO: 74572 - DNA, 600 bp, synthetic construct
  misc_feature 1..600: note = Description of Artificial Sequence: Synthetic coding sequence
  source 1..600: mol_type = other DNA
atgagcaagagcgccgtgaagatcagcctggacctgctgagcaaccccctgtgcgagcaggaccaggacctgctgaacatggtgaccgccctggacaccgccatgaagagaatggacgccttcaaccaggagaaggtgaaccagatccagaagaccgtgatcgagcccctgaagaagttcggcagcgtgttccccagcctgaacatggccgtgaagagaagagagcaggccctgcaggactacagaagactgcaggccaaggtggagaagtacgaggagaaggagaagaccggccccgtgctggccaagctgcaccaggccagagaggagctgagacccgtgagagaggacttcgaggccaagaacagacagctgctggaggagatgcccagattctacggcagcagactggactacttccagcccagcttcgagagcctgatcagagcccaggtggtgtactacagcgagatgcacaagatcttcggcgacctgagccaccagctggaccagcccggccacagcgacgagcagagagagagagagaacgaggccaagctgagcgagctgagagccctgagcatcgtggccgacgactag

SEQ ID NO: 74573 - DNA, 2343 bp, synthetic construct
  misc_feature 1..2343: note = Description of Artificial Sequence: Synthetic coding sequence
  source 1..2343: mol_type = other DNA
atgacccacaccagaagaaagagcctgcccatgctgagcagcggcctgaccggcagaagagagcccctgcagatggaggacagcaacatggagcagggcgtggagggcgtggagcccggcatgcccgagagccccggccacctgaccggcagaagaaagaactaccccctgagaaagagacccctggtgcccgagaagcccaaggcctgcaaggtgctgctgaccagactggagaacgtggccggccccagaagcgccgacgaggccgacgagctgccccccgacctgcccaagccccccagccccgcccccagcagcgaggaccccggcctggcccagcccagaaagagaagactggccagcctgaacgccgaggccctgaacaacctgctgctggagagagaggacaccagcagcctggccggcaccagaagaagcagagccggcgacccccacagaagcagagacagagacagagccaccggcggctggagcagcagcaagaagagacccagactgggcgacctgggcggcggcagcagagacctgagccccgagcccgcccccgacgagggccccagaagagacggcgaccccgcccccaagagactggccagcctgaacgccgccgccttcctgaagctgagccaggagagagagctgcccctgagactgcccagagcccacgccgaggtggacggcagaagcaccgagccccccgcccccaaggcccccagacccaagtggcccaaggtgaacggcaagaactaccccaaggcctggcagggcgccagcagcggcgaggccgccggcccccccggctggcagggctgccccgacgagccctggcccagcgccaccccctgcggccccagcgtgcagcccagccaccagcccctgagcaaggccctggagagccccctgggcctgagaccccacctgcccctgctgatgggcggccaggccgccctgaagcccgagcccggcagacccggcgaggagagccccgcccccaagcaggagctgcaccagcccagcttccccaccccccagctgagccccctgcccatgcccggcaaccccgccgactacaacggcctgtgcgtgggccccgagctgaccgccctgggcagcttctacctgtactgcggccaggagggcctgcagtgcggcggctacagcccctgccccatgctgcccgagggcaagctgagccccgtggccgccccccacgaggagggcctgctgctggcccccagcagcgtgcccagcggcacccccttccagcaccccccctggggcagcagcagatactgcagcagcgaggacaccggcgtgaacggctacagcatctgcggcgtgctgcccctgagcgtgacccacgccggcaccacctgcggcggctgcccctacaagatgcccttcgccgccgagggctgcagaagcctgggccagctggagttccccctgcccgaggccggccaccccgccagccccgcccaccccctgctgggctgccccgtgcccagcgtgccccccgccgccgagcccgtgccccacctgcagacccccaccagcgagccccagaccgtggccagagcctgcccccagagcgccaagccccccagcggcagcaagagcggcctgagaaccggcagcagctgcagacacaccgccagaagcaaggccgccagaagacccagccaccccaagcagcccagagtgcagagacccagacccagaagaagaagaagaagaagaaccaacggctgggtgcccgtgggcgccgcctgcgagaaggccgtgtacgtgctggacgagcccgagcccgccatcagaaagagctaccaggccgtggagagacacggcgagaccatcagagtgagagacaccgtgctgctgaagagcggccccagaaagaccagcaccccctacgtggccaagatcagcgccctgtgggagaaccccgagagcggcgagctgatgatgagcctgctgtggtactacagacccgagcacctgcagggcggcagaagccccagcatgcacgagcccctgcagaacgaggtgttcgccagcagacaccaggaccagaacagcgtggcctgcatcgaggagaagtgctacgtgctgaccttcgccgagtactgcagattctgcgccatggccaagagaagaggcgagggcctgcccagcagaaagaccgccctggtgccccccagcgccgactacagcacccccccccacagaaccgtgcccgaggacaccgaccccgagctggtgttcctgtgcagacacgtgtacgacttcagacacggcagaatcctgaagaacccccagtag

SEQ ID NO: 74574 - DNA, 2340 bp, synthetic construct
  misc_feature 1..2340: note = Description of Artificial Sequence: Synthetic coding sequence
  source 1..2340: mol_type = other DNA
atgacccacaccagaagaaagagcctgcccatgctgagcagcggcctgaccggcagaagagagcccctgcagatggaggacagcaacatggagcagggcgtggagggcgtggagcccggcatgcccgagagccccggccacctgaccggcagaagaaagaactaccccctgagaaagagacccctggtgcccgagaagcccaaggcctgcaaggtgctgctgaccagactggagaacgtggccggccccagaagcgccgacgaggccgacgagctgccccccgacctgcccaagccccccagccccgcccccagcagcgaggaccccggcctggcccagcccagaaagagaagactggccagcctgaacgccgaggccctgaacaacctgctgctggagagagaggacaccagcagcctggccggcaccagaagaagcagagccggcgacccccacagaagcagagacagagacagagccaccggcggctggagcagcagcaagaagagacccagactgggcgacctgggcggcggcagcagagacctgagccccgagcccgcccccgacgagggccccagaagagacggcgaccccgcccccaagagactggccagcctgaacgccgccgccttcctgaagctgagccaggagagagagctgcccctgagactgcccagagcccacgccgaggtggacggcagaagcaccgagccccccgcccccaaggcccccagacccaagtggcccaaggtgaacggcaagaactaccccaaggcctggcagggcgccagcagcggcgaggccgccggcccccccggctggcagggctgccccgacgagccctggcccagcgccaccccctgcggccccagcgtgcagcccagccaccagcccctgagcaaggccctggagagccccctgggcctgagaccccacctgcccctgctgatgggcggccaggccgccctgaagcccgagcccggcagacccggcgaggagagccccgcccccaagcaggagctgcaccagcccagcttccccaccccccagctgagccccctgcccatgcccggcaaccccgccgactacaacggcctgtgcgtgggccccgagctgaccgccctgggcagcttctacctgtactgcggccaggagggcctgcagtgcggcggctacagcccctgccccatgctgcccgagggcaagctgagccccgtggccgccccccacgaggagggcctgctgctggcccccagcagcgtgcccagcggcacccccttccagcaccccccctggggcagcagcagatactgcagcagcgaggacaccggcgtgaacggctacagcatctgcggcgtgctgcccctgagcgtgacccacgccggcaccacctgcggcggctgcccctacaagatgcccttcgccgccggctgcagaagcctgggccagctggagttccccctgcccgaggccggccaccccgccagccccgcccaccccctgctgggctgccccgtgcccagcgtgccccccgccgccgagcccgtgccccacctgcagacccccaccagcgagccccagaccgtggccagagcctgcccccagagcgccaagccccccagcggcagcaagagcggcctgagaaccggcagcagctgcagacacaccgccagaagcaaggccgccagaagacccagccaccccaagcagcccagagtgcagagacccagacccagaagaagaagaagaagaagaaccaacggctgggtgcccgtgggcgccgcctgcgagaaggccgtgtacgtgctggacgagcccgagcccgccatcagaaagagctaccaggccgtggagagacacggcgagaccatcagagtgagagacaccgtgctgctgaagagcggccccagaaagaccagcaccccctacgtggccaagatcagcgccctgtgggagaaccccgagagcggcgagctgatgatgagcctgctgtggtactacagacccgagcacctgcagggcggcagaagccccagcatgcacgagcccctgcagaacgaggtgttcgccagcagacaccaggaccagaacagcgtggcctgcatcgaggagaagtgctacgtgctgaccttcgccgagtactgcagattctgcgccatggccaagagaagaggcgagggcctgcccagcagaaagaccgccctggtgccccccagcgccgactacagcacccccccccacagaaccgtgcccgaggacaccgaccccgagctggtgttcctgtgcagacacgtgtacgacttcagacacggcagaatcctgaagaacccccagtag

SEQ ID NO: 74575 - DNA, 4575 bp, synthetic construct
  misc_feature 1..4575: note = Description of Artificial Sequence: Synthetic coding sequence
  source 1..4575: mol_type = other DNA
atgcccctgctgcacagaaagcccttcgtgagacagaagccccccgccgacctgagacccgacgaggaggtgttctactgcaaggtgaccaacgagatcttcagacactacgacgacttcttcgagagaaccatcctgtgcaacagcctggtgtggagctgcgccgtgaccggcagacccggcctgacctaccaggaggccctggagagcgagaagaaggccagacagaacctgcagagcttccccgagcccctgatcatccccgtgctgtacctgaccagcctgacccacagaagcagactgcacgagatctgcgacgacatcttcgcctacgtgaaggacagatacttcgtggaggagaccgtggaggtgatcagaaacaacggcgccagactgcagtgcagaatcctggaggtgctgccccccagccaccagaacggcttcgccaacggccacgtgaacagcgtggacggcgagaccatcatcatcagcgacagcgacgacagcgagacccagagctgcagcttccagaacggcaagaagaaggacgccatcgaccccctgctgttcaagtacaaggtgcagcccaccaagaaggagctgcacgagagcgccatcgtgaaggccacccagatcagcagaagaaagcacctgttcagcagagacaagctgaagctgttcctgaagcagcactgcgagccccaggacggcgtgatcaagatcaaggccagcagcctgagcacctacaagatcgccgagcaggacttcagctacttcttccccgacgacccccccaccttcatcttcagccccgccaacagaagaagaggcagaccccccaagagaatccacatcagccaggaggacaacgtggccaacaagcagaccctggccagctacagaagcaaggccaccaaggagagagacaagctgctgaagcaggaggagatgaagagcctggccttcgagaaggccaagctgaagagagagaaggccgacgccctggaggccaagaagaaggagaaggaggacaaggagaagaagagagaggagctgaagaagatcgtggaggaggagagactgaagaagaaggaggagaaggagagactgaaggtggagagagagaaggagagagagaagctgagagaggagaagagaaagtacgtggagtacctgaagcagtggagcaagcccagagaggacatggagtgcgacgacctgaaggagctgcccgagcccacccccgtgaagaccagactgccccccgagatcttcggcgacgccctgatggtgctggagttcctgaacgccttcggcgagctgttcgacctgcaggacgagttccccgacggcgtgaccctggaggtgctggaggaggccctggtgggcaacgacagcgagggccccctgtgcgagctgctgttcttcttcctgaccgccatcttccaggccatcgccgaggaggaggaggaggtggccaaggagcagctgaccgacgccgacaccaagggctgcagcctgaagagcctggacctggacagctgcaccctgagcgagatcctgagactgcacatcctggccagcggcgccgacgtgaccagcgccaacgccaagtacagataccagaagagaggcggcttcgacgccaccgacgacgcctgcatggagctgagactgagcaaccccagcctggtgaagaagctgagcagcaccagcgtgtacgacctgacccccggcgagaagatgaagatcctgcacgccctgtgcggcaagctgctgaccctggtgagcaccagagacttcatcgaggactacgtggacatcctgagacaggccaagcaggagttcagagagctgaaggccgagcagcacagaaaggagagagaggaggccgccgccagaatcagaaagagaaaggaggagaagctgaaggagcaggagcagaagatgaaggagaagcaggagaagctgaaggaggacgagcagagaaacagcaccgccgacatcagcatcggcgaggaggagagagaggacttcgacaccagcatcgagagcaaggacaccgagcagaaggagctggaccaggacatggtgaccgaggacgaggacgaccccggcagccacaagagaggcagaagaggcaagagaggccagaacggcttcaaggagttcaccagacaggagcagatcaactgcgtgaccagagagcccctgaccgccgacgaggaggaggccctgaagcaggagcaccagagaaaggagaaggagctgctggagaagatccagagcgccatcgcctgcaccaacatcttccccctgggcagagacagaatgtacagaagatactggatcttccccagcatccccggcctgttcatcgaggaggactacagcggcctgaccgaggacatgctgctgcccagacccagcagcttccagaacaacgtgcagagccaggacccccaggtgagcaccaagaccggcgagcccctgatgagcgagagcaccagcaacatcgaccagggccccagagaccacagcgtgcagctgcccaagcccgtgcacaagcccaacagatggtgcttctacagcagctgcgagcagctggaccagctgatcgaggccctgaacagcagaggccacagagagagcgccctgaaggagaccctgctgcaggagaagagcagaatctgcgcccagctggccagattcagcgaggagaagttccacttcagcgacaagccccagcccgacagcaagcccacctacagcagaggcagaagcagcaacgcctacgaccccagccagatgtgcgccgagaagcagctggagctgagactgagagacttcctgctggacatcgaggacagaatctaccagggcaccctgggcgccatcaaggtgaccgacagacacatctggagaagcgccctggagagcggcagatacgagctgctgagcgaggagaacaaggagaacggcatcatcaagaccgtgaacgaggacgtggaggagatggagatcgacgagcagaccaaggtgatcgtgaaggacagactgctgggcatcaagaccgagacccccagcaccgtgagcaccaacgccagcaccccccagagcgtgagcagcgtggtgcactacctggccatggccctgttccagatcgagcagggcatcgagagaagattcctgaaggcccccctggacgccagcgacagcggcagaagctacaagaccgtgctggacagatggagagagagcctgctgagcagcgccagcctgagccaggtgttcctgcacctgagcaccctggacagaagcgtgatctggagcaagagcatcctgaacgccagatgcaagatctgcagaaagaagggcgacgccgagaacatggtgctgtgcgacggctgcgacagaggccaccacacctactgcgtgagacccaagctgaagaccgtgcccgagggcgactggttctgccccgagtgcagacccaagcagagaagcagaagactgagcagcagacagagacccagcctggagagcgacgaggacgtggaggacagcatgggcggcgaggacgacgaggtggacggcgacgaggaggagggccagagcgaggaggaggagtacgaggtggagcaggacgaggacgacagccaggaggaggaggaggtgagcctgcccaagagaggcagaccccaggtgagactgcccgtgaagaccagaggcaagctgagcagcagcttcagcagcagaggccagcagcaggagcccggcagataccccagcagaagccagcagagcacccccaagaccaccgtgagcagcaagaccggcagaagcctgagaaagatcaacagcgccccccccaccgagaccaagagcctgagaatcgccagcagaagcaccagacacagccacggccccctgcaggccgacgtgttcgtggagctgctgagccccagaagaaagagaagaggcagaaagagcgccaacaacacccccgagaacagccccaacttccccaacttcagagtgatcgccaccaagagcagcgagcagagcagaagcgtgaacatcgccagcaagctgagcctgcaggagagcgagagcaagagaagatgcagaaagagacagagccccgagcccagccccgtgaccctgggcagaagaagcagcggcagacagggcggcgtgcacgagctgagcgccttcgagcagctggtggtggagctggtgagacacgacgacagctggcccttcctgaagctggtgagcaagatccaggtgcccgactactacgacatcatcaagaagcccatcgccctgaacatcatcagagagaaggtgaacaagtgcgagtacaagctggccagcgagttcatcgacgacatcgagctgatgttcagcaactgcttcgagtacaaccccagaaacaccagcgaggccaaggccggcaccagactgcaggccttcttccacatccaggcccagaagctgggcctgcacgtgacccccagcaacgtggaccaggtgagcaccccccccgccgccaagaagagcagaatctag

SEQ ID NO: 74576 - DNA, 4671 bp, synthetic construct
  misc_feature 1..4671: note = Description of Artificial Sequence: Synthetic coding sequence
  source 1..4671: mol_type = other DNA
atgcccctgctgcacagaaagcccttcgtgagacagaagccccccgccgacctgagacccgacgaggaggtgttctactgcaaggtgaccaacgagatcttcagacactacgacgacttcttcgagagaaccatcctgtgcaacagcctggtgtggagctgcgccgtgaccggcagacccggcctgacctaccaggaggccctggagagcgagaagaaggccagacagaacctgcagagcttccccgagcccctgatcatccccgtgctgtacctgaccagcctgacccacagaagcagactgcacgagatctgcgacgacatcttcgcctacgtgaaggacagatacttcgtggaggagaccgtggaggtgatcagaaacaacggcgccagactgcagtgcagaatcctggaggtgctgccccccagccaccagaacggcttcgccaacggccacgtgaacagcgtggacggcgagaccatcatcatcagcgacagcgacgacagcgagacccagagctgcagcttccagaacggcaagaagaaggacgccatcgaccccctgctgttcaagtacaaggtgcagcccaccaagaaggagctgcacgagagcgccatcgtgaaggccacccagatcagcagaagaaagcacctgttcagcagagacaagctgaagctgttcctgaagcagcactgcgagccccaggacggcgtgatcaagatcaaggccagcagcctgagcacctacaagatcgccgagcaggacttcagctacttcttccccgacgacccccccaccttcatcttcagccccgccaacagaagaagaggcagaccccccaagagaatccacatcagccaggaggacaacgtggccaacaagcagaccctggccagctacagaagcaaggccaccaaggagagagacaagctgctgaagcaggaggagatgaagagcctggccttcgagaaggccaagctgaagagagagaaggccgacgccctggaggccaagaagaaggagaaggaggacaaggagaagaagagagaggagctgaagaagatcgtggaggaggagagactgaagaagaaggaggagaaggagagactgaaggtggagagagagaaggagagagagaagctgagagaggagaagagaaagtacgtggagtacctgaagcagtggagcaagcccagagaggacatggagtgcgacgacctgaaggagctgcccgagcccacccccgtgaagaccagactgccccccgagatcttcggcgacgccctgatggtgctggagttcctgaacgccttcggcgagctgttcgacctgcaggacgagttccccgacggcgtgaccctggaggtgctggaggaggccctggtgggcaacgacagcgagggccccctgtgcgagctgctgttcttcttcctgaccgccatcttccaggccatcgccgaggaggaggaggaggtggccaaggagcagctgaccgacgccgacaccaaggacctgaccgaggccctggacgaggacgccgaccccaccaagagcgccctgagcgccgtggccagcctggccgccgcctggccccagctgcaccagggctgcagcctgaagagcctggacctggacagctgcaccctgagcgagatcctgagactgcacatcctggccagcggcgccgacgtgaccagcgccaacgccaagtacagataccagaagagaggcggcttcgacgccaccgacgacgcctgcatggagctgagactgagcaaccccagcctggtgaagaagctgagcagcaccagcgtgtacgacctgacccccggcgagaagatgaagatcctgcacgccctgtgcggcaagctgctgaccctggtgagcaccagagacttcatcgaggactacgtggacatcctgagacaggccaagcaggagttcagagagctgaaggccgagcagcacagaaaggagagagaggaggccgccgccagaatcagaaagagaaaggaggagaagctgaaggagcaggagcagaagatgaaggagaagcaggagaagctgaaggaggacgagcagagaaacagcaccgccgacatcagcatcggcgaggaggagagagaggacttcgacaccagcatcgagagcaaggacaccgagcagaaggagctggaccaggacatggtgaccgaggacgaggacgaccccggcagccacaagagaggcagaagaggcaagagaggccagaacggcttcaaggagttcaccagacaggagcagatcaactgcgtgaccagagagcccctgaccgccgacgaggaggaggccctgaagcaggagcaccagagaaaggagaaggagctgctggagaagatccagagcgccatcgcctgcaccaacatcttccccctgggcagagacagaatgtacagaagatactggatcttccccagcatccccggcctgttcatcgaggaggactacagcggcctgaccgaggacatgctgctgcccagacccagcagcttccagaacaacgtgcagagccaggacccccaggtgagcaccaagaccggcgagcccctgatgagcgagagcaccagcaacatcgaccagggccccagagaccacagcgtgcagctgcccaagcccgtgcacaagcccaacagatggtgcttctacagcagctgcgagcagctggaccagctgatcgaggccctgaacagcagaggccacagagagagcgccctgaaggagaccctgctgcaggagaagagcagaatctgcgcccagctggccagattcagcgaggagaagttccacttcagcgacaagccccagcccgacagcaagcccacctacagcagaggcagaagcagcaacgcctacgaccccagccagatgtgcgccgagaagcagctggagctgagactgagagacttcctgctggacatcgaggacagaatctaccagggcaccctgggcgccatcaaggtgaccgacagacacatctggagaagcgccctggagagcggcagatacgagctgctgagcgaggagaacaaggagaacggcatcatcaagaccgtgaacgaggacgtggaggagatggagatcgacgagcagaccaaggtgatcgtgaaggacagactgctgggcatcaagaccgagacccccagcaccgtgagcaccaacgccagcaccccccagagcgtgagcagcgtggtgcactacctggccatggccctgttccagatcgagcagggcatcgagagaagattcctgaaggcccccctggacgccagcgacagcggcagaagctacaagaccgtgctggacagatggagagagagcctgctgagcagcgccagcctgagccaggtgttcctgcacctgagcaccctggacagaagcgtgatctggagcaagagcatcctgaacgccagatgcaagatctgcagaaagaagggcgacgccgagaacatggtgctgtgcgacggctgcgacagaggccaccacacctactgcgtgagacccaagctgaagaccgtgcccgagggcgactggttctgccccgagtgcagacccaagcagagaagcagaagactgagcagcagacagagacccagcctggagagcgacgaggacgtggaggacagcatgggcggcgaggacgacgaggtggacggcgacgaggaggagggccagagcgaggaggaggagtacgaggtggagcaggacgaggacgacagccaggaggaggaggaggtgagcctgcccaagagaggcagaccccaggtgagactgcccgtgaagaccagaggcaagctgagcagcagcttcagcagcagaggccagcagcaggagcccggcagataccccagcagaagccagcagagcacccccaagaccaccgtgagcagcaagaccggcagaagcctgagaaagatcaacagcgccccccccaccgagaccaagagcctgagaatcgccagcagaagcaccagacacagccacggccccctgcaggccgacgtgttcgtggagctgctgagccccagaagaaagagaagaggcagaaagagcgccaacaacacccccgagaacagccccaacttccccaacttcagagtgatcgccaccaagagcagcgagcagagcagaagcgtgaacatcgccagcaagctgagcctgcaggagagcgagagcaagagaagatgcagaaagagacagagccccgagcccagccccgtgaccctgggcagaagaagcagcggcagacagggcggcgtgcacgagctgagcgccttcgagcagctggtggtggagctggtgagacacgacgacagctggcccttcctgaagctggtgagcaagatccaggtgcccgactactacgacatcatcaagaagcccatcgccctgaacatcatcagagagaaggtgaacaagtgcgagtacaagctggccagcgagttcatcgacgacatcgagctgatgttcagcaactgcttcgagtacaaccccagaaacaccagcgaggccaaggccggcaccagactgcaggccttcttccacatccaggcccagaagctgggcctgcacgtgacccccagcaacgtggaccaggtgagcaccccccccgccgccaagaagagcagaatctag

SEQ ID NO: 74577 - DNA, 4671 bp, synthetic construct; identical to SEQ ID NO: 74576
  misc_feature 1..4671: note = Description of Artificial Sequence: Synthetic coding sequence
  source 1..4671: mol_type = other DNA

SEQ ID NO: 74578 - DNA, 3702 bp, synthetic construct
  misc_feature 1..3702: note = Description of Artificial Sequence: Synthetic coding sequence
  source 1..3702: mol_type = other DNA
atgaagagcctggccttcgagaaggccaagctgaagagagagaaggccgacgccctggaggccaagaagaaggagaaggaggacaaggagaagaagagagaggagctgaagaagatcgtggaggaggagagactgaagaagaaggaggagaaggagagactgaaggtggagagagagaaggagagagagaagctgagagaggagaagagaaagtacgtggagtacctgaagcagtggagcaagcccagagaggacatggagtgcgacgacctgaaggagctgcccgagcccacccccgtgaagaccagactgccccccgagatcttcggcgacgccctgatggtgctggagttcctgaacgccttcggcgagctgttcgacctgcaggacgagttccccgacggcgtgaccctggaggtgctggaggaggccctggtgggcaacgacagcgagggccccctgtgcgagctgctgttcttcttcctgaccgccatcttccaggccatcgccgaggaggaggaggaggtggccaaggagcagctgaccgacgccgacaccaagggctgcagcctgaagagcctggacctggacagctgcaccctgagcgagatcctgagactgcacatcctggccagcggcgccgacgtgaccagcgccaacgccaagtacagataccagaagagaggcggcttcgacgccaccgacgacgcctgcatggagctgagactgagcaaccccagcctggtgaagaagctgagcagcaccagcgtgtacgacctgacccccggcgagaagatgaagatcctgcacgccctgtgcggcaagctgctgaccctggtgagcaccagagacttcatcgaggactacgtggacatcctgagacaggccaagcaggagttcagagagctgaaggccgagcagcacagaaaggagagagaggaggccgccgccagaatcagaaagagaaaggaggagaagctgaaggagcaggagcagaagatgaaggagaagcaggagaagctgaaggaggacgagcagagaaacagcaccgccgacatcagcatcggcgaggaggagagagaggacttcgacaccagcatcgagagcaaggacaccgagcagaaggagctggaccaggacatggtgaccgaggacgaggacgaccccggcagccacaagagaggcagaagaggcaagagaggccagaacggcttcaaggagttcaccagacaggagcagatcaactgcgtgaccagagagcccctgaccgccgacgaggaggaggccctgaagcaggagcaccagagaaaggagaaggagctgctggagaagatccagagcgccatcgcctgcaccaacatcttccccctgggcagagacagaatgtacagaagatactggatcttccccagcatccccggcctgttcatcgaggaggactacagcggcctgaccgaggacatgctgctgcccagacccagcagcttccagaacaacgtgcagagccaggacccccaggtgagcaccaagaccggcgagcccctgatgagcgagagcaccagcaacatcgaccagggccccagagaccacagcgtgcagctgcccaagcccgtgcacaagcccaacagatggtgcttctacagcagctgcgagcagctggaccagctgatcgaggccctgaacagcagaggccacagagagagcgccctgaaggagaccctgctgcaggagaagagcagaatctgcgcccagctggccagattcagcgaggagaagttccacttcagcgacaagccccagcccgacagcaagcccacctacagcagaggcagaagcagcaacgcctacgaccccagccagatgtgcgccgagaagcagctggagctgagactgagagacttcctgctggacatcgaggacagaatctaccagggcaccctgggcgccatcaaggtgaccgacagacacatctggagaagcgccctggagagcggcagatacgagctgctgagcgaggagaacaaggagaacggcatcatcaagaccgtgaacgaggacgtggaggagatggagatcgacgagcagaccaaggtgatcgtgaaggacagactgctgggcatcaagaccgagacccccagcaccgtgagcaccaacgccagcaccccccagagcgtgagcagcgtggtgcactacctggccatggccctgttccagatcgagcagggcatcgagagaagattcctgaaggcccccctggacgccagcgacagcggcagaagctacaagaccgtgctggacagatggagagagagcctgctgagcagcgccagcctgagccaggtgttcctgcacctgagcaccctggacagaagcgtgatctggagcaagagcatcctgaacgccagatgcaagatctgcagaaagaagggcgacgccgagaacatggtgctgtgcgacggctgcgacagaggccaccacacctactgcgtgagacccaagctgaagaccgtgcccgagggcgactggttctgccccgagtgcagacccaagcagagaagcagaagactgagcagcagacagagacccagcctggagagcgacgaggacgtggaggacagcatgggcggcgaggacgacgaggtggacggcgacgaggaggagggccagagcgaggaggaggagtacgaggtggagcaggacgaggacgacagccaggaggaggaggaggtgagcctgcccaagagaggcagaccccaggtgagactgcccgtgaagaccagaggcaagctgagcagcagcttcagcagcagaggccagcagcaggagcccggcagataccccagcagaagccagcagagcacccccaagaccaccgtgagcagcaagaccggcagaagcctgagaaagatcaacagcgccccccccaccgagaccaagagcctgagaatcgccagcagaagcaccagacacagccacggccccctgcaggccgacgtgttcgtggagctgctgagccccagaagaaagagaagaggcagaaagagcgccaacaacacccccgagaacagccccaacttccccaacttcagagtgatcgccaccaagagcagcgagcagagcagaagcgtgaacatcgccagcaagctgagcctgcaggagagcgagagcaagagaagatgcagaaagagacagagccccgagcccagccccgtgaccctgggcagaagaagcagcggcagacagggcggcgtgcacgagctgagcgccttcgagcagctggtggtggagctggtgagacacgacgacagctggcccttcctgaagctggtgagcaagatccaggtgcccgactactacgacatcatcaagaagcccatcgccctgaacatcatcagagagaaggtgaacaagtgcgagtacaagctggccagcgagttcatcgacgacatcgagctgatgttcagcaactgcttcgagtacaaccccagaaacaccagcgaggccaaggccggcaccagactgcaggccttcttcatcttcagactgaagagcctggacagcaccagccaccccgtgatgtggaccaagctggcccaccacagactgagaaagagccacgagagcgacttcgtgctgctgaaggacatcttcgaggagaagcagatcgtgcacgagaacggcaccctgaaccacgccgtgtag

SEQ ID NO: 74579 - DNA, 4452 bp, synthetic construct
  misc_feature 1..4452: note = Description of Artificial Sequence: Synthetic coding sequence
  source 1..4452: mol_type = other DNA
atggcccccctgctgggcagaaagcccttccccctggtgaagcccctgcccggcgaggagcccctgttcaccatcccccacacccaggaggccttcagaaccagagaggagtacgaggccagactggagagatacagcgagagaatctggacctgcaagagcaccggcagcagccagctgacccacaaggaggcctgggaggaggagcaggaggtggccgagctgctgaaggaggagttccccgcctggtacgagaagctggtgctggagatggtgcaccacaacaccgccagcctggagaagctggtggacaccgcctggctggagatcatgaccaagtacgccgtgggcgaggagtgcgacttcgaggtgggcaaggagaagatgctgaaggtgaagatcgtgaagatccaccccctggagaaggtggacgaggaggccaccgagaagaagagcgacggcgcctgcgacagccccagcagcgacaaggagaacagcagccagatcgcccaggaccaccagaagaaggagaccgtggtgaaggaggacgagggcagaagagagagcatcaacgacagagccagaagaagccccagaaagctgcccaccagcctgaagaagggcgagagaaagtgggccccccccaagttcctgccccacaagtacgacgtgaagctgcagaacgaggacaagatcatcagcaacgtgcccgccgacagcctgatcagaaccgagagaccccccaacaaggagatcgtgagatacttcatcagacacaacgccctgagagccggcaccggcgagaacgccccctgggtggtggaggacgagctggtgaagaagtacagcctgcccagcaagttcagcgacttcctgctggacccctacaagtacatgaccctgaaccccagcaccaagagaaagaacaccggcagccccgacagaaagcccagcaagaagagcaagaccgacaacagcagcctgagcagccccctgaaccccaagctgtggtgccacgtgcacctgaagaagagcctgagcggcagccccctgaaggtgaagaacagcaagaacagcaagagccccgaggagcacctggaggagatgatgaagatgatgagccccaacaagctgcacaccaacttccacatccccaagaagggcccccccgccaagaagcccggcaagcacagcgacaagcccctgaaggccaagggcagaagcaagggcatcctgaacggccagaagagcaccggcaacagcaagagccccaagaagggcctgaagacccccaagaccaagatgaagcagatgaccctgctggacatggccaagggcacccagaagatgaccagagcccccagaaacagcggcggcacccccagaaccagcagcaagccccacaagcacctgccccccgccgccctgcacctgatcgcctactacaaggagaacaaggacagagaggacaagagaagcgccctgagctgcgtgatcagcaagaccgccagactgctgagcagcgaggacagagccagactgcccgaggagctgagaagcctggtgcagaagagatacgagctgctggagcacaagaagagatgggccagcatgagcgaggagcagagaaaggagtacctgaagaagaagagagaggagctgaagaagaagctgaaggagaaggccaaggagagaagagagaaggagatgctggagagactggagaagcagaagagatacgaggaccaggagctgaccggcaagaacctgcccgccttcagactggtggacacccccgagggcctgcccaacaccctgttcggcgacgtggccatggtggtggagttcctgagctgctacagcggcctgctgctgcccgacgcccagtaccccatcaccgccgtgagcctgatggaggccctgagcgccgacaagggcggcttcctgtacctgaacagagtgctggtgatcctgctgcagaccctgctgcaggacgagatcgccgaggactacggcgagctgggcatgaagctgagcgagatccccctgaccctgcacagcgtgagcgagctggtgagactgtgcctgagaagaagcgacgtgcaggaggagagcgagggcagcgacaccgacgacaacaaggacagcgccgccttcgaggacaacgaggtgcaggacgagttcctggagaagctggagaccagcgagttcttcgagctgaccagcgaggagaagctgcagatcctgaccgccctgtgccacagaatcctgatgacctacagcgtgcaggaccacatggagaccagacagcagatgagcgccgagctgtggaaggagagactggccgtgctgaaggaggagaacgacaagaagagagccgagaagcagaagagaaaggagatggaggccaagaacaaggagaacggcaaggtggagaacggcctgggcaagaccgacagaaagaaggagatcgtgaagttcgagccccaggtggacaccgaggccgaggacatgatcagcgccgtgaagagcagaagactgctggccatccaggccaagaaggagagagagatccaggagagagagatgaaggtgaagctggagagacaggccgaggaggagagaatcagaaagcacaaggccgccgccgagaaggccttccaggagggcatcgccaaggccaagctggtgatgagaagaacccccatcggcaccgacagaaaccacaacagatactggctgttcagcgacgaggtgcccggcctgttcatcgagaagggctgggtgcacgacagcatcgactacagattcaaccaccactgcaaggaccacaccgtgagcggcgacgaggactactgccccagaagcaagaaggccaacctgggcaagaacgccagcatgaacacccagcacggcaccgccaccgaggtggccgtggagaccaccacccccaagcagggccagaacctgtggttcctgtgcgacagccagaaggagctggacgagctgctgaactgcctgcacccccagggcatcagagagagccagctgaaggagagactggagaagagataccaggacatcatccacagcatccacctggccagaaagcccaacctgggcctgaagagctgcgacggcaaccaggagctgctgaacttcctgagaagcgacctgatcgaggtggccaccagactgcagaagggcggcctgggctacgtggaggagaccagcgagttcgaggccagagtgatcagcctggagaagctgaaggacttcggcgagtgcgtgatcgccctgcaggccagcgtgatcaagaagttcctgcagggcttcatggcccccaagcagaagagaagaaagctgcagagcgaggacagcgccaagaccgaggaggtggacgaggagaagaagatggtggaggaggccaaggtggccagcgccctggagaagtggaagaccgccatcagagaggcccagaccttcagcagaatgcacgtgctgctgggcatgctggacgcctgcatcaagtgggacatgagcgccgagaacgccagatgcaaggtgtgcagaaagaagggcgaggacgacaagctgatcctgtgcgacgagtgcaacaaggccttccacctgttctgcctgagacccgccctgtacgaggtgcccgacggcgagtggcagtgccccgcctgccagcccgccaccgccagaagaaacagcagaggcagaaactacaccgaggagagcgccagcgaggacagcgaggacgacgagagcgacgaggaggaggaggaggaggaggaggaggaggaggaggaggactacgaggtggccggcctgagactgagacccagaaagaccatcagaggcaagcacagcgtgatcccccccgccgccagaagcggcagaagacccggcaagaagccccacagcaccagaagaagccagcccaaggccccccccgtggacgacgccgaggtggacgagctggtgctgcagaccaagagaagcagcagaagacagagcctggagctgcagaagtgcgaggagatcctgcacaagatcgtgaagtacagattcagctggcccttcagagagcccgtgaccagagacgaggccgaggactactacgacgtgatcacccaccccatggacttccagaccgtgcagaacaagtgcagctgcggcagctacagaagcgtgcaggagttcctgaccgacatgaagcaggtgttcaccaacgccgaggtgtacaactgcagaggcagccacgtgctgagctgcatggtgaagaccgagcagtgcctggtggccctgctgcacaagcacctgcccggccacccctacgtgagaagaaagagaaagaagttccccgacagactggccgaggacgagggcgacagcgagcccgaggccgtgggccagagcagaggcagaagacagaagaagtag

SEQ ID NO: 74580 - DNA, 4452 bp, synthetic construct; identical to SEQ ID NO: 74579
  misc_feature 1..4452: note = Description of Artificial Sequence: Synthetic coding sequence
  source 1..4452: mol_type = other DNA

SEQ ID NO: 74581 - DNA, 5622 bp, synthetic construct
  misc_feature 1..5622: note = Description of Artificial Sequence: Synthetic coding sequence
  source 1..5622: mol_type = other DNA
atggaggccaacgaccacttcaacttcaccggcctgccccccgcccccgccgccagcggcctgaagcccagccccagcagcggcgagggcctgtacaccaacggcagccccatgaacttcccccagcagggcaagagcctgaacggcgacgtgaacgtgaacggcctgagcaccgtgagccacaccaccaccagcggcatcctgaacagcgccccccacagcagcagcaccagccacctgcaccaccccagcgtggcctacgactgcctgtggaactacagccagtaccccagcgccaaccccggcagcaacctgaaggacccccccctgctgagccagttcagcggcggccagtaccccctgaacggcatcctgggcggcagcagacagcccagcagccccagccacaacaccaacctgagagccggcagccaggagttctgggccaacggcacccagagccccatgggcctgaacttcgacagccaggagctgtacgacagcttccccgaccagaacttcgaggaggtgggcagcggcatccaccccgacgaggccgccgagaaggagatgaccagcgtggtggccgagaacggcaccggcctggtgggcagcctggagctggaggaggagcagcccgagctgaagatgtgcggctacaacggcagcgtgcccagcgtggagagcctgcaccaggaggtgagcgtgctggtgcccgaccccaccgtgagctgcctggacgaccccagccacctgcccgaccagctggaggacacccccatcctgagcgaggacagcctggagcccttcaacagcctggcccccgagcccgtgagcggcggcctgtacggcatcgacgacaccgagctgatgggcgccgaggacaagctgcccctggaggacagccccgtgatcagcgccctggactgccccagcctgaacaacgccaccgccttcagcctgctggccgacgacagccagaccagcaccagcatcttcgccagccccaccagcccccccgtgctgggcgagagcgtgctgcaggacaacagcttcgacctgaacaacggcagcgacgccgagcaggaggagatggagacccagagcagcgacttcccccccagcctgacccagcccgcccccgaccagagcagcaccatccagctgcaccccgccaccagccccgccgtgagccccaccaccagccccgccgtgagcctggtggtgagccccgccgccagccccgagatcagccccgaggtgtgccccgccgccagcaccgtggtgagccccgccgtgttcagcgtggtgagccccgccagcagcgccgtgctgcccgccgtgagcctggaggtgcccctgaccgccagcgtgaccagccccaaggccagccccgtgaccagccccgccgccgccttccccaccgccagccccgccaacaaggacgtgagcagcttcctggagaccaccgccgacgtggaggagatcaccggcgagggcctgaccgccagcggcagcggcgacgtgatgagaagaagaatcgccacccccgaggaggtgagactgcccctgcagcacggctggagaagagaggtgagaatcaagaagggcagccacagatggcagggcgagacctggtactacggcccctgcggcaagagaatgaagcagttccccgaggtgatcaagtacctgagcagaaacgtggtgcacagcgtgagaagagagcacttcagcttcagccccagaatgcccgtgggcgacttcttcgaggagagagacacccccgagggcctgcagtgggtgcagctgagcgccgaggagatccccagcagaatccaggccatcaccggcaagagaggcagacccagaaacaccgagaaggccaagaccaaggaggtgcccaaggtgaagagaggcagaggcagaccccccaaggtgaagatcaccgagctgctgaacaagaccgacaacagacccctgaagaagctggaggcccaggagaccctgaacgaggaggacaaggccaagatcgccaagagcaagaagaagatgagacagaaggtgcagagaggcgagtgccagaccaccatccagggccaggccagaaacaagagaaagcaggagaccaagagcctgaagcagaaggaggccaagaagaagagcaaggccgagaaggagaagggcaagaccaagcaggagaagctgaaggagaaggtgaagagagagaagaaggagaaggtgaagatgaaggagaaggaggaggtgaccaaggccaagcccgcctgcaaggccgacaagaccctggccacccagagaagactggaggagagacagagacagcagatgatcctggaggagatgaagaagcccaccgaggacatgtgcctgaccgaccaccagcccctgcccgacttcagcagagtgcccggcctgaccctgcccagcggcgccttcagcgactgcctgaccatcgtggagttcctgcacagcttcggcaaggtgctgggcttcgaccccgccaaggacgtgcccagcctgggcgtgctgcaggagggcctgctgtgccagggcgacagcctgggcgaggtgcaggacctgctggtgagactgctgaaggccgccctgcacgaccccggcttccccagctactgccagagcctgaagatcctgggcgagaaggtgagcgagatccccctgaccagagacaacgtgagcgagatcctgagatgcttcctgatggcctacggcgtggagcccgccctgtgcgacagactgagaacccagcccttccaggcccagcccccccagcagaaggccgccgtgctggccttcctggtgcacgagctgaacggcagcaccctgatcatcaacgagatcgacaagaccctggagagcatgagcagctacagaaagaacaagtggatcgtggagggcagactgagaagactgaagaccgtgctggccaagagaaccggcagaagcgaggtggagatggagggccccgaggagtgcctgggcagaagaagaagcagcagaatcatggaggagaccagcggcatggaggaggaggaggaggaggagagcatcgccgccgtgcccggcagaagaggcagaagagacggcgaggtggacgccaccgccagcagcatccccgagctggagagacagatcgagaagctgagcaagagacagctgttcttcagaaagaagctgctgcacagcagccagatgctgagagccgtgagcctgggccaggacagatacagaagaagatactgggtgctgccctacctggccggcatcttcgtggagggcaccgagggcaacctggtgcccgaggaggtgatcaagaaggagaccgacagcctgaaggtggccgcccacgccagcctgaaccccgccctgttcagcatgaagatggagctggccggcagcaacaccaccgccagcagccccgccagagccagaggcagacccagaaagaccaagcccggcagcatgcagcccagacacctgaagagccccgtgagaggccaggacagcgagcagccccaggcccagctgcagcccgaggcccagctgcacgcccccgcccagccccagccccagctgcagctgcagctgcagagccacaagggcttcctggagcaggagggcagccccctgagcctgggccagagccagcacgacctgagccagagcgccttcctgagctggctgagccagacccagagccacagcagcctgctgagcagcagcgtgctgacccccgacagcagccccggcaagctggaccccgcccccagccagccccccgaggagcccgagcccgacgaggccgagagcagccccgacccccaggccctgtggttcaacatcagcgcccagatgccctgcaacgccgcccccacccccccccccgccgtgagcgaggaccagcccacccccagcccccagcagctggccagcagcaagcccatgaacagacccagcgccgccaacccctgcagccccgtgcagttcagcagcacccccctggccggcctggcccccaagagaagagccggcgaccccggcgagatgccccagagccccaccggcctgggccagcccaagagaagaggcagaccccccagcaagttcttcaagcagatggagcagagatacctgacccagctgaccgcccagcccgtgccccccgagatgtgcagcggctggtggtggatcagagaccccgagatgctggacgccatgctgaaggccctgcaccccagaggcatcagagagaaggccctgcacaagcacctgaacaagcacagagacttcctgcaggaggtgtgcctgagacccagcgccgaccccatcttcgagcccagacagctgcccgccttccaggagggcatcatgagctggagccccaaggagaagacctacgagaccgacctggccgtgctgcagtgggtggaggagctggagcagagagtgatcatgagcgacctgcagatcagaggctggacctgccccagccccgacagcaccagagaggacctggcctactgcgagcacctgagcgacagccaggaggacatcacctggagaggcagaggcagagagggcctggccccccagagaaagaccaccaaccccctggacctggccgtgatgagactggccgccctggagcagaacgtggagagaagatacctgagagagcccctgtggcccacccacgaggtggtgctggagaaggccctgctgagcacccccaacggcgcccccgagggcaccaccaccgagatcagctacgagatcacccccagaatcagagtgtggagacagaccctggagagatgcagaagcgccgcccaggtgtgcctgtgcctgggccagctggagagaagcatcgcctgggagaagagcgtgaacaaggtgacctgcctggtgtgcagaaagggcgacaacgacgagttcctgctgctgtgcgacggctgcgacagaggctgccacatctactgccacagacccaagatggaggccgtgcccgagggcgactggttctgcaccgtgtgcctggcccagcaggtggagggcgagttcacccagaagcccggcttccccaagagaggccagaagagaaagagcggctacagcctgaacttcagcgagggcgacggcagaagaagaagagtgctgctgagaggcagagagagccccgccgccggccccagatacagcgaggagggcctgagccccagcaagagaagaagactgagcatgagaaaccaccacagcgacctgaccttctgcgagatcatcctgatggagatggagagccacgacgccgcctggcccttcctggagcccgtgaaccccagactggtgagcggctacagaagaatcatcaagaaccccatggacttcagcaccatgagagagagactgctgagaggcggctacaccagcagcgaggagttcgccgccgacgccctgctggtgttcgacaactgccagaccttcaacgaggacgacagcgaggtgggcaaggccggccacatcatgagaagattcttcgagagcagatgggaggagttctaccagggcaagcaggccaacctgtag

SEQ ID NO: 74582 - DNA, 2514 bp, synthetic construct
  misc_feature 1..2514: note = Description of Artificial Sequence: Synthetic coding sequence
  source 1..2514: mol_type = other DNA
gtgcccggcagaagaggcagaagagacggcgaggtggacgccaccgccagcagcatccccgagctggagagacagatcgagaagctgagcaagagacagctgttcttcagaaagaagctgctgcacagcagccagatgctgagagccgtgagcctgggccaggacagatacagaagaagatactgggtgctgccctacctggccggcatcttcgtggagggcaccgagggcaacctggtgcccgaggaggtgatcaagaaggagaccgacagcctgaaggtggccgcccacgccagcctgaaccccgccctgttcagcatgaagatggagctggccggcagcaacaccaccgccagcagccccgccagagccagaggcagacccagaaagaccaagcccggcagcatgcagcccagacacctgaagagccccgtgagaggccaggacagcgagcagccccaggcccagctgcagcccgaggcccagctgcacgcccccgcccagccccagccccagctgcagctgcagctgcagagccacaagggcttcctggagcaggagggcagccccctgagcctgggccagagccagcacgacctgagccagagcgccttcctgagctggctgagccagacccagagccacagcagcctgctgagcagcagcgtgctgacccccgacagcagccccggcaagctggaccccgcccccagccagccccccgaggagcccgagcccgacgaggccgagagcagccccgacccccaggccctgtggttcaacatcagcgcccagatgccctgcaacgccgcccccacccccccccccgccgtgagcgaggaccagcccacccccagcccccagcagctggccagcagcaagcccatgaacagacccagcgccgccaacccctgcagccccgtgcagttcagcagcacccccctggccggcctggcccccaagagaagagccggcgaccccggcgagatgccccagagccccaccggcctgggccagcccaagagaagaggcagaccccccagcaagttcttcaagcagatggagcagagatacctgacccagctgaccgcccagcccgtgccccccggctggtggtggatcagagaccccgagatgctggacgccatgctgaaggccctgcaccccagaggcatcagagagaaggccctgcacaagcacctgaacaagcacagagacttcctgcaggaggtgtgcctgagacccagcgccgaccccatcttcgagcccagacagctgcccgccttccaggagggcatcatgagctggagccccaaggagaagacctacgagaccgacctggccgtgctgcagtgggtggaggagctggagcagagagtgatcatgagcgacctgcagatcagaggctggacctgccccagccccgacagcaccagagaggacctggcctactgcgagcacctgagcgacagccaggaggacatcacctggagaggcagaggcagagagggcctggccccccagagaaagaccaccaaccccctggacctggccgtgatgagactggccgccctggagcagaacgtggagagaagatacctgagagagcccctgtggcccacccacgaggtggtgctggagaaggccctgctgagcacccccaacggcgcccccgagggcaccaccaccgagatcagctacgagatcacccccagaatcagagtgtggagacagaccctggagagatgcagaagcgccgcccaggtgtgcctgtgcctgggccagctggagagaagcatcgcctgggagaagagcgtgaacaaggtgacctgcctggtgtgcagaaagggcgacaacgacgagttcctgctgctgtgcgacggctgcgacagaggctgccacatctactgccacagacccaagatggaggccgtgcccgagggcgactggttctgcaccgtgtgcctggcccagcaggtggagggcgagttcacccagaagcccggcttccccaagagaggccagaagagaaagagcggctacagcctgaacttcagcgagggcgacggcagaagaagaagagtgctgctgagaggcagagagagccccgccgccggccccagatacagcgaggagggcctgagccccagcaagagaagaagactgagcatgagaaaccaccacagcgacctgaccttctgcgagatcatcctgatggagatggagagccacgacgccgcctggcccttcctggagcccgtgaaccccagactggtgagcggctacagaagaatcatcaagaaccccatggacttcagcaccatgagagagagactgctgagaggcggctacaccagcagcgaggagttcgccgccgacgccctgctggtgttcgacaactgccagaccttcaacgaggacgacagcgaggtgggcaaggccggccacatcatgagaagattcttcgagagcagatgggaggagttctaccagggcaagcaggccaacctgtag

SEQ ID NO: 74583 - DNA, 5718 bp, synthetic construct
  misc_feature 1..5718: note = Description of Artificial Sequence: Synthetic coding sequence
  source 1..5718: mol_type = other DNA
atggagatggaggccaacgaccacttcaacttcaccggcctgccccccgcccccgccgccagcggcctgaagcccagccccagcagcggcgagggcctgtacaccaacggcagccccatgaacttcccccagcagggcaagagcctgaacggcgacgtgaacgtgaacggcctgagcaccgtgagccacaccaccaccagcggcatcctgaacagcgccccccacagcagcagcaccagccacctgcaccaccccagcgtggcctacgactgcctgtggaactacagccagtaccccagcgccaaccccggcagcaacctgaaggacccccccctgctgagccagttcagcggcggccagtaccccctgaacggcatcctgggcggcagcagacagcccagcagccccagccacaacaccaacctgagagccggcagccaggagttctgggccaacggcacccagagccccatgggcctgaacttcgacagccaggagctgtacgacagcttccccgaccagaacttcgaggtgatgcccaacggcccccccagcttcttcaccagcccccagaccagccccatgctgggcagcagcatccagaccttcgcccccagccaggaggtgggcagcggcatccaccccgacgaggccgccgagaaggagatgaccagcgtggtggccgagaacggcaccggcctggtgggcagcctggagctggaggaggagcagcccgagctgaagatgtgcggctacaacggcagcgtgcccagcgtggagagcctgcaccaggaggtgagcgtgctggtgcccgaccccaccgtgagctgcctggacgaccccagccacctgcccgaccagctggaggacacccccatcctgagcgaggacagcctggagcccttcaacagcctggcccccgagcccgtgagcggcggcctgtacggcatcgacgacaccgagctgatgggcgccgaggacaagctgcccctggaggacagccccgtgatcagcgccctggactgccccagcctgaacaacgccaccgccttcagcctgctggccgacgacagccagaccagcaccagcatcttcgccagccccaccagcccccccgtgctgggcgagagcgtgctgcaggacaacagcttcgacctgaacaacggcagcgacgccgagcaggaggagatggagacccagagcagcgacttcccccccagcctgacccagcccgcccccgaccagagcagcaccatccagctgcaccccgccaccagccccgccgtgagccccaccaccagccccgccgtgagcctggtggtgagccccgccgccagccccgagatcagccccgaggtgtgccccgccgccagcaccgtggtgagccccgccgtgttcagcgtggtgagccccgccagcagcgccgtgctgcccgccgtgagcctggaggtgcccctgaccgccagcgtgaccagccccaaggccagccccgtgaccagccccgccgccgccttccccaccgccagccccgccaacaaggacgtgagcagcttcctggagaccaccgccgacgtggaggagatcaccggcgagggcctgaccgccagcggcagcggcgacgtgatgagaagaagaatcgccacccccgaggaggtgagactgcccctgcagcacggctggagaagagaggtgagaatcaagaagggcagccacagatggcagggcgagacctggtactacggcccctgcggcaagagaatgaagcagttccccgaggtgatcaagtacctgagcagaaacgtggtgcacagcgtgagaagagagcacttcagcttcagccccagaatgcccgtgggcgacttcttcgaggagagagacacccccgagggcctgcagtgggtgcagctgagcgccgaggagatccccagcagaatccaggccatcaccggcaagagaggcagacccagaaacaccgagaaggccaagaccaaggaggtgcccaaggtgaagagaggcagaggcagaccccccaaggtgaagatcaccgagctgctgaacaagaccgacaacagacccctgaagaagctggaggcccaggagaccctgaacgaggaggacaaggccaagatcgccaagagcaagaagaagatgagacagaaggtgcagagaggcgagtgccagaccaccatccagggccaggccagaaacaagagaaagcaggagaccaagagcctgaagcagaaggaggccaagaagaagagcaaggccgagaaggagaagggcaagaccaagcaggagaagctgaaggagaaggtgaagagagagaagaaggagaaggtgaagatgaaggagaaggaggaggtgaccaaggccaagcccgcctgcaaggccgacaagaccctggccacccagagaagactggaggagagacagagacagcagatgatcctggaggagatgaagaagcccaccgaggacatgtgcctgaccgaccaccagcccctgcccgacttcagcagagtgcccggcctgaccctgcccagcggcgccttcagcgactgcctgaccatcgtggagttcctgcacagcttcggcaaggtgctgggcttcgaccccgccaaggacgtgcccagcctgggcgtgctgcaggagggcctgctgtgccagggcgacagcctgggcgaggtgcaggacctgctggtgagactgctgaaggccgccctgcacgaccccggcttccccagctactgccagagcctgaagatcctgggcgagaaggtgagcgagatccccctgaccagagacaacgtgagcgagatcctgagatgcttcctgatggcctacggcgtggagcccgccctgtgcgacagactgagaacccagcccttccaggcccagcccccccagcagaaggccgccgtgctggccttcctggtgcacgagctgaacggcagcaccctgatcatcaacgagatcgacaagaccctggagagcatgagcagctacagaaagaacaagtggatcgtggagggcagactgagaagactgaagaccgtgctggccaagagaaccggcagaagcgaggtggagatggagggccccgaggagtgcctgggcagaagaagaagcagcagaatcatggaggagaccagcggcatggaggaggaggaggaggaggagagcatcgccgccgtgcccggcagaagaggcagaagagacggcgaggtggacgccaccgccagcagcatccccgagctggagagacagatcgagaagctgagcaagagacagctgttcttcagaaagaagctgctgcacagcagccagatgctgagagccgtgagcctgggccaggacagatacagaagaagatactgggtgctgccctacctggccggcatcttcgtggagggcaccgagggcaacctggtgcccgaggaggtgatcaagaaggagaccgacagcctgaaggtggccgcccacgccagcctgaaccccgccctgttcagcatgaagatggagctggccggcagcaacaccaccgccagcagccccgccagagccagaggcagacccagaaagaccaagcccggcagcatgcagcccagacacctgaagagccccgtgagaggccaggacagcgagcagccccaggcccagctgcagcccgaggcccagctgcacgcccccgcccagccccagccccagctgcagctgcagctgcagagccacaagggcttcctggagcaggagggcagccccctgagcctgggccagagccagcacgacctgagccagagcgccttcctgagctggctgagccagacccagagccacagcagcctgctgagcagcagcgtgctgacccccgacagcagccccggcaagctggaccccgcccccagccagccccccgaggagcccgagcccgacgaggccgagagcagccccgacccccaggccctgtggttcaacatcagcgcccagatgccctgcaacgccgcccccacccccccccccgccgtgagcgaggaccagcccacccccagcccccagcagctggccagcagcaagcccatgaacagacccagcgccgccaacccctgcagccccgtgcagttcagcagcacccccctggccggcctggcccccaagagaagagccggcgaccccggcgagatgccccagagccccaccggcctgggccagcccaagagaagaggcagaccccccagcaagttcttcaagcagatggagcagagatacctgacccagctgaccgcccagcccgtgccccccgagatgtgcagcggctggtggtggatcagagaccccgagatgctggacgccatgctgaaggccctgcaccccagaggcatcagagagaaggccctgcacaagcacctgaacaagcacagagacttcctgcaggaggtgtgcctgagacccagcgccgaccccatcttcgagcccagacagctgcccgccttccaggagggcatcatgagctggagccccaaggagaagacctacgagaccgacctggccgtgctgcagtgggtggaggagctggagcagagagtgatcatgagcgacctgcagatcagaggctggacctgccccagccccgacagcaccagagaggacctggcctactgcgagcacctgagcgacagccaggaggacatcacctggagaggcagaggcagagagggcctggccccccagagaaagaccaccaaccccctggacctggccgtgatgagactggccgccctggagcagaacgtggagagaagatacctgagagagcccctgtggcccacccacgaggtggtgctggagaaggccctgctgagcacccccaacggcgcccccgagggcaccaccaccgagatcagctacgagatcacccccagaatcagagtgtggagacagaccctggagagatgcagaagcgccgcccaggtgtgcctgtgcctgggccagctggagagaagcatcgcctgggagaagagcgtgaacaaggtgacctgcctggtgtgcagaaagggcgacaacgacgagttcctgctgctgtgcgacggctgcgacagaggctgccacatctactgccacagacccaagatggaggccgtgcccgagggcgactggttctgcaccgtgtgcctggcccagcaggtggagggcgagttcacccagaagcccggcttccccaagagaggccagaagagaaagagcggctacagcctgaacttcagcgagggcgacggcagaagaagaagagtgctgctgagaggcagagagagccccgccgccggccccagatacagcgaggagggcctgagccccagcaagagaagaagactgagcatgagaaaccaccacagcgacctgaccttctgcgagatcatcctgatggagatggagagccacgacgccgcctggcccttcctggagcccgtgaaccccagactggtgagcggctacagaagaatcatcaagaaccccatggacttcagcaccatgagagagagactgctgagaggcggctacaccagcagcgaggagttcgccgccgacgccctgctggtgttcgacaactgccagaccttcaacgaggacgacagcgaggtgggcaaggccggccacatcatgagaagattcttcgagagcagatgggaggagttctaccagggcaagcaggccaacctgtag

SEQ ID NO: 74584 - DNA, 6207 bp, synthetic construct
  misc_feature 1..6207: note = Description of Artificial Sequence: Synthetic coding sequence
  source 1..6207: mol_type = other DNA
atggagagcggcgagagactgcccagcagcgccgccagcagcaccacccccaccagcagcagcacccccagcgtggccagcgtggtgagcaagggcggcctgagcaccggcgtggccagcctgagcagcaccatcaacccctgcggccacctgttcagaaccgccggcgaccagcccttcaacctgagcaccgtgagcagcgccttccccatggtgagccaccccgtgttcggcctgcacagcgccagcagcggccacagcgagttcggcggcctgggcaccctgggcacccccaccgccctggccgcccacccccagctggccagcttccccgagtggtggagaaccaccgacgcccacaccagaaccggcgccaccttcttcccccccctgctgggcatcccccccctgttcgccccccccgcccagaaccacgacagcagcagcttccacagcagaaccagcggcaagagcaacagaaacggccccgagaagggcgtgaacggcagcatcaacggcagcaacaccagcagcgtgatcggcatcaacaccagcgtgctgagcaccaccgccagcagcagcatgggccagaccaagagcaccagcagcggcggcggcaacagaaagtgcaaccaggagcagagcaagaaccagcccctggacgccagagtggacaagatcaaggacaagaagcccagaaagaaggccatggagagcagcagcaacagcgacagcgacagcggcaccagcagcgacaccagcagcgagggcatcagcagcagcgacagcgacgacctggaggaggacgaggaggaggaggaccagagcatcgaggagagcgaggacgacgacagcgacagcgagagcgaggcccagcacaagagcaacaaccaggtgctgctgcacggcatcagcgaccccaaggccgacggccagaaggccaccgagaaggcccaggagaagagaatccaccagcccctgcccctggccagcgagagccagacccacagcttccagagccagcagaagcagccccaggtgctgagccagcagctgcccttcatcttccagagcagccaggccaaggaggagagcgtgaacaagcacaccagcgtgatccagagcaccggcctggtgagcaacgtgaagcccctgagcctggtgaaccaggccaagaaggagacctacatgaagctgatcgtgcccagccccgacgtgctgaaggccggcaacaagaacaccagcgaggagagcagcctgctgaccagcgagctgagaagcaagagagagcagtacaagcaggccttccccagccagctgaagaagcaggagagcagcaagagcctgaagaaggtgatcgccgccctgagcaaccccaaggccaccagcagcagccccgcccaccccaagcagaccctggagaacaaccaccccaaccccttcctgaccaacgccctgctgggcaaccaccagcccaacggcgtgatccagagcgtgatccaggaggcccccctggccctgaccaccaagaccaagatgcagagcaagatcaacgagaacatcgccgccgccagcagcacccccttcagcagccccgtgaacctgagcaccagcggcagaagaacccccggcaaccagacccccgtgatgcccagcgccagccccatcctgcacagccagggcaaggagaaggccgtgagcaacaacgtgaaccccgtgaagacccagcaccacagccaccccgccaagagcctggtggagcagttcagaggcaccgacagcgacatccccagcagcaaggacagcgaggacagcaacgaggacgaggaggaggacgacgaggaggaggacgaggaggacgacgaggacgacgagagcgacgacagccagagcggcaccagcaagagaagaagagtgaccgacgagagagagctgagaatccccctggagtacggctggcagagagagaccagaatcagaaacttcggcggcagactgcagggcgaggtggcctactacgccccctgcggcaagaagctgagacagtaccccgaggtgatcaagtacctgagcagaaacggcatcatggacatcagcagagacaacttcagcttcagcgccaagatcagagtgggcgacttctacgaggccagagacggcccccagggcatgcagtggtgcctgctgaaggaggaggacgtgatccccagaatcagagccatggagggcagaagaggcagaccccccaaccccgacagacagagagccagagaggagagcagaatgagaagaagaaagggcagaccccccaacgtgggcaacgccgagttcctggacaacgccgacgccaagctgctgagaaagctgcaggcccaggagatcgccagacaggccgcccagatcaagctgctgagaaagctgcagaagcaggagcaggccagagtggccaaggaggccaagaagcagcaggccatcatggccgccgaggagaagagaaagcagaaggagcagatcaagatcatgaagcagcaggagaagatcaagagaatccagcagatcagaatggagaaggagctgagagcccagcagatcctggaggccaagaagaagaagaaggaggaggccgccaacgccaagctgctggaggccgagaagagaatcaaggagaaggagatgagaagacagcaggccgtgctgctgaagcaccaggagagagagagaagaagacagcacatgatgctgatgaaggccatggaggccagaaagaaggccgaggagaaggagagactgaagcaggagaagagagacgagaagagactgaacaaggagagaaagctggagcagagaagactggagctggagatggccaaggagctgaagaagcccaacgaggacatgtgcctggccgaccagaagcccctgcccgagctgcccagaatccccggcctggtgctgagcggcagcaccttcagcgactgcctgatggtggtgcagttcctgagaaacttcggcaaggtgctgggcttcgacgtgaacatcgacgtgcccaacctgagcgtgctgcaggagggcctgctgaacatcggcgacagcatgggcgaggtgcaggacctgctggtgagactgctgagcgccgccgtgtgcgaccccggcctgatcaccggctacaaggccaagaccgccctgggcgagcacctgctgaacgtgggcgtgaacagagacaacgtgagcgagatcctgcagatcttcatggaggcccactgcggccagaccgagctgaccgagagcctgaagaccaaggccttccaggcccacacccccgcccagaaggccagcgtgctggccttcctgatcaacgagctggcctgcagcaagagcgtggtgagcgagatcgacaagaacatcgactacatgagcaacctgagaagagacaagtgggtggtggagggcaagctgagaaagctgagaatcatccacgccaagaagaccggcaagagagacaccagcggcggcatcgacctgggcgaggagcagcaccccctgggcacccccacccccggcagaaagagaagaagaaagggcggcgacagcgactacgacgacgacgacgacgacgacagcgacgaccagggcgacgaggacgacgaggacgaggaggacaaggaggacaagaagggcaagaagaccgacatctgcgaggacgaggacgagggcgaccaggccgccagcgtggaggagctggagaagcagatcgagaagctgagcaagcagcagagccagtacagaagaaagctgttcgacgccagccacagcctgagaagcgtgatgttcggccaggacagatacagaagaagatactggatcctgccccagtgcggcggcatcttcgtggagggcatggagagcggcgagggcctggaggagatcgccaaggagagagagaagctgaagaaggccgagagcgtgcagatcaaggaggagatgttcgagaccagcggcgacagcctgaactgcagcaacaccgaccactgcgagcagaaggaggacctgaaggagaaggacaacaccaacctgttcctgcagaagcccggcagcttcagcaagctgagcaagctgctggaggtggccaagatgccccccgagagcgaggtgatgacccccaagcccaacgccggcgccaacggctgcaccctgagctaccagaacagcggcaagcacagcctgggcagcgtgcagagcaccgccacccagagcaacgtggagaaggccgacagcaacaacctgttcaacaccggcagcagcggccccggcaagttctacagccccctgcccaacgaccagctgctgaagaccctgaccgagaagaacagacagtggttcagcctgctgcccagaaccccctgcgacgacaccagcctgacccacgccgacatgagcaccgccagcctggtgaccccccagagccagccccccagcaagagccccagccccacccccgcccccctgggcagcagcgcccagaaccccgtgggcctgaaccccttcgccctgagccccctgcaggtgaagggcggcgtgagcatgatgggcctgcagttctgcggctggcccaccggcgtggtgaccagcaacatccccttcaccagcagcgtgcccagcctgggcagcggcctgggcctgagcgagggcaacggcaacagcttcctgaccagcaacgtggccagcagcaagagcgagagccccgtgccccagaacgagaaggccaccagcgcccagcccgccgccgtggaggtggccaagcccgtggacttccccagccccaagcccatccccgaggagatgcagttcggctggtggagaatcatcgaccccgaggacctgaaggccctgctgaaggtgctgcacctgagaggcatcagagagaaggccctgcagaagcagatccagaagcacctggactacatcacccaggcctgcctgaagaacaaggacgtggccatcatcgagctgaacgagaacgaggagaaccaggtgaccagagacatcgtggagaactggagcgtggaggagcaggccatggagatggacctgagcgtgctgcagcaggtggaggacctggagagaagagtggccagcgccagcctgcaggtgaagggctggatgtgccccgagcccgccagcgagagagaggacctggtgtacttcgagcacaagagcttcaccaagctgtgcaaggagcacgacggcgagttcaccggcgaggacgagagcagcgcccacgccctggagagaaagagcgacaaccccctggacatcgccgtgaccagactggccgacctggagagaaacatcgagagaagaatcgaggaggacatcgcccccggcctgagagtgtggagaagagccctgagcgaggccagaagcgccgcccaggtggccctgtgcatccagcagctgcagaagagcatcgcctgggagaagagcatcatgaaggtgtactgccagatctgcagaaagggcgacaacgaggagctgctgctgctgtgcgacggctgcgacaagggctgccacacctactgccacagacccaagatcaccaccatccccgacggcgactggttctgccccgcctgcatcgccaaggccagcggccagaccctgaagatcaagaagctgcacgtgaagggcaagaagaccaacgagagcaagaagggcaagaaggtgaccctgaccggcgacaccgaggacgaggacagcgccagcaccagcagcagcctgaagagaggcaacaaggacctgaagaagagaaagatggaggagaacaccagcatcaacctgagcaagcaggagagcttcaccagcgtgaagaagcccaagagagacgacagcaaggacctggccctgtgcagcatgatcctgaccgagatggagacccacgaggacgcctggcccttcctgctgcccgtgaacctgaagctggtgcccggctacaagaaggtgatcaagaagcccatggacttcagcaccatcagagagaagctgagcagcggccagtaccccaacctggagaccttcgccctggacgtgagactggtgttcgacaactgcgagaccttcaacgaggacgacagcgacatcggcagagccggccacaacatgagaaagtacttcgagaagaagtggaccgacaccttcaaggtgagctag

SEQ ID NO: 74585 - DNA, 6405 bp, synthetic construct
  misc_feature 1..6405: note = Description of Artificial Sequence: Synthetic coding sequence
  source 1..6405: mol_type = other DNA
atggagagcggcgagagactgcccagcagcgccgccagcagcaccacccccaccagcagcagcacccccagcgtggccagcgtggtgagcaagggcggcctgagcaccggcgtggccagcctgagcagcaccatcaacccctgcggccacctgttcagaaccgccggcgaccagcccttcaacctgagcaccgtgagcagcgccttccccatggtgagccaccccgtgttcggcctgcacagcgccagcagcggccacagcgagttcggcggcctgggcaccctgggcacccccaccgccctggccgcccacccccagctggccagcttccccggcgccgagtggtggagaaccaccgacgcccacaccagaaccggcgccaccttcttcccccccctgctgggcatcccccccctgttcgccccccccgcccagaaccacgacagcagcagcttccacagcagaaccagcggcaagagcaacagaaacggccccgagaagggcgtgaacggcagcatcaacggcagcaacaccagcagcgtgatcggcatcaacaccagcgtgctgagcaccaccgccagcagcagcatgggccagaccaagagcaccagcagcggcggcggcaacagaaagtgcaaccaggagcagagcaagaaccagcccctggacgccagagtggacaagatcaaggacaagaagcccagaaagaaggccatggagagcagcagcaacagcgacagcgacagcggcaccagcagcgacaccagcagcgagggcatcagcagcagcgacagcgacgacctggaggaggacgaggaggaggaggaccagagcatcgaggagagcgaggacgacgacagcgacagcgagagcgaggcccagcacaagagcaacaaccaggtgctgctgcacggcatcagcgaccccaaggccgacggccagaaggccaccgagaaggcccaggagaagagaatccaccagcccctgcccctggccagcgagagccagacccacagcttccagagccagcagaagcagccccaggtgctgagccagcagctgcccttcatcttccagagcagccaggccaaggaggagagcgtgaacaagcacaccagcgtgatccagagcaccggcctggtgagcaacgtgaagcccctgagcctggtgaaccaggccaagaaggagacctacatgaagctgatcgtgcccagccccgacgtgctgaaggccggcaacaagaacaccagcgaggagagcagcctgctgaccagcgagctgagaagcaagagagagcagtacaagcaggccttccccagccagctgaagaagcaggagagcagcaagagcctgaagaaggtgatcgccgccctgagcaaccccaaggccaccagcagcagccccgcccaccccaagcagaccctggagaacaaccaccccaaccccttcctgaccaacgccctgctgggcaaccaccagcccaacggcgtgatccagagcgtgatccaggaggcccccctggccctgaccaccaagaccaagatgcagagcaagatcaacgagaacatcgccgccgccagcagcacccccttcagcagccccgtgaacctgagcaccagcggcagaagaacccccggcaaccagacccccgtgatgcccagcgccagccccatcctgcacagccagggcaaggagaaggccgtgagcaacaacgtgaaccccgtgaagacccagcaccacagccaccccgccaagagcctggtggagcagttcagaggcaccgacagcgacatccccagcagcaaggacagcgaggacagcaacgaggacgaggaggaggacgacgaggaggaggacgaggaggacgacgaggacgacgagagcgacgacagccagagcgagagcgacagcaacagcgagagcgacaccgagggcagcgaggaggaggacgacgacgacaaggaccaggacgagagcgacagcgacaccgagggcgagaagaccagcatgaagctgaacaagaccaccagcagcgtgaagagccccagcatgagcctgaccggccacagcacccccagaaacctgcacatcgccaaggcccccggcagcgcccccgccgccctgtgcagcgagagccagagccccgccttcctgggcaccagcagcagcaccctgaccagcagcccccacagcggcaccagcaagagaagaagagtgaccgacgagagagagctgagaatccccctggagtacggctggcagagagagaccagaatcagaaacttcggcggcagactgcagggcgaggtggcctactacgccccctgcggcaagaagctgagacagtaccccgaggtgatcaagggcatgcagtggtgcctgctgaaggaggaggacgtgatccccagaatcagagccatggagggcagaagaggcagaccccccaaccccgacagacagagagccagagaggagagcagaatgagaagaagaaagggcagaccccccaacgtgggcaacgccgagttcctggacaacgccgacgccaagctgctgagaaagctgcaggcccaggagatcgccagacaggccgcccagatcaagctgctgagaaagctgcagaagcaggagcaggccagagtggccaaggaggccaagaagcagcaggccatcatggccgccgaggagaagagaaagcagaaggagcagatcaagatcatgaagcagcaggagaagatcaagagaatccagcagatcagaatggagaaggagctgagagcccagcagatcctggaggccaagaagaagaagaaggaggaggccgccaacgccaagctgctggaggccgagaagagaatcaaggagaaggagatgagaagacagcaggccgtgctgctgaagcaccaggagagagagagaagaagacagcacatgatgctgatgaaggccatggaggccagaaagaaggccgaggagaaggagagactgaagcaggagaagagagacgagaagagactgaacaaggagagaaagctggagcagagaagactggagctggagatggccaaggagctgaagaagcccaacgaggacatgtgcctggccgaccagaagcccctgcccgagctgcccagaatccccggcctggtgctgagcggcagcaccttcagcgactgcctgatggtggtgcagttcctgagaaacttcggcaaggtgctgggcttcgacgtgaacatcgacgtgcccaacctgagcgtgctgcaggagggcctgctgaacatcggcgacagcatgggcgaggtgcaggacctgctggtgagactgctgagcgccgccgtgtgcgaccccggcctgatcaccggctacaaggccaagaccgccctgggcgagcacctgctgaacgtgggcgtgaacagagacaacgtgagcgagatcctgcagatcttcatggaggcccactgcggccagaccgagctgaccgagagcctgaagaccaaggccttccaggcccacacccccgcccagaaggccagcgtgctggccttcctgatcaacgagctggcctgcagcaagagcgtggtgagcgagatcgacaagaacatcgactacatgagcaacctgagaagagacaagtgggtggtggagggcaagctgagaaagctgagaatcatccacgccaagaagaccggcaagagagacaccagcggcggcatcgacctgggcgaggagcagcaccccctgggcacccccacccccggcagaaagagaagaagaaagggcggcgacagcgactacgacgacgacgacgacgacgacagcgacgaccagggcgacgaggacgacgaggacgaggaggacaaggaggacaagaagggcaagaagaccgacatctgcgaggacgaggacgagggcgaccaggccgccagcgtggaggagctggagaagcagatcgagaagctgagcaagcagcagagccagtacagaagaaagctgttcgacgccagccacagcctgagaagcgtgatgttcggccaggacagatacagaagaagatactggatcctgccccagtgcggcggcatcttcgtggagggcatggagagcggcgagggcctggaggagatcgccaaggagagagagaagctgaagaaggccgagagcgtgcagatcaaggaggagatgttcgagaccagcggcgacagcctgaactgcagcaacaccgaccactgcgagcagaaggaggacctgaaggagaaggacaacaccaacctgttcctgcagaagcccggcagcttcagcaagctgagcaagctgctggaggtggccaagatgccccccgagagcgaggtgatgacccccaagcccaacgccggcgccaacggctgcaccctgagctaccagaacagcggcaagcacagcctgggcagcgtgcagagcaccgccacccagagcaacgtggagaaggccgacagcaacaacctgttcaacaccggcagcagcggccccggcaagttctacagccccctgcccaacgaccagctgctgaagaccctgaccgagaagaacagacagtggttcagcctgctgcccagaaccccctgcgacgacaccagcctgacccacgccgacatgagcaccgccagcctggtgaccccccagagccagccccccagcaagagccccagccccacccccgcccccctgggcagcagcgcccagaaccccgtgggcctgaaccccttcgccctgagccccctgcaggtgaagggcggcgtgagcatgatgggcctgcagttctgcggctggcccaccggcgtggtgaccagcaacatccccttcaccagcagcgtgcccagcctgggcagcggcctgggcctgagcgagggcaacggcaacagcttcctgaccagcaacgtggccagcagcaagagcgagagccccgtgccccagaacgagaaggccaccagcgcccagcccgccgccgtggaggtggccaagcccgtggacttccccagccccaagcccatccccgaggagatgcagttcggctggtggagaatcatcgaccccgaggacctgaaggccctgctgaaggtgctgcacctgagaggcatcagagagaaggccctgcagaagcagatccagaagcacctggactacatcacccaggcctgcctgaagaacaaggacgtggccatcatcgagctgaacgagaacgaggagaaccaggtgaccagagacatcgtggagaactggagcgtggaggagcaggccatggagatggacctgagcgtgctgcagcaggtggaggacctggagagaagagtggccagcgccagcctgcaggtgaagggctggatgtgccccgagcccgccagcgagagagaggacctggtgtacttcgagcacaagagcttcaccaagctgtgcaaggagcacgacggcgagttcaccggcgaggacgagagcagcgcccacgccctggagagaaagagcgacaaccccctggacatcgccgtgaccagactggccgacctggagagaaacatcgagagaagaatcgaggaggacatcgcccccggcctgagagtgtggagaagagccctgagcgaggccagaagcgccgcccaggtggccctgtgcatccagcagctgcagaagagcatcgcctgggagaagagcatcatgaaggtgtactgccagatctgcagaaagggcgacaacgaggagctgctgctgctgtgcgacggctgcgacaagggctgccacacctactgccacagacccaagatcaccaccatccccgacggcgactggttctgccccgcctgcatcgccaaggccagcggccagaccctgaagatcaagaagctgcacgtgaagggcaagaagaccaacgagagcaagaagggcaagaaggtgaccctgaccggcgacaccgaggacgaggacagcgccagcaccagcagcagcctgaagagaggcaacaaggacctgaagaagagaaagatggaggagaacaccagcatcaacctgagcaagcaggagagcttcaccagcgtgaagaagcccaagagagacgacagcaaggacctggccctgtgcagcatgatcctgaccgagatggagacccacgaggacgcctggcccttcctgctgcccgtgaacctgaagctggtgcccggctacaagaaggtgatcaagaagcccatggacttcagcaccatcagagagaagctgagcagcggccagtaccccaacctggagaccttcgccctggacgtgagactggtgttcgacaactgcgagaccttcaacgaggacgacagcgacatcggcagagccggccacaacatgagaaagtacttcgagaagaagtggaccgacaccttcaaggtgagctag

SEQ ID NO: 74586 - DNA, 6399 bp, synthetic construct
  misc_feature 1..6399: note = Description of Artificial Sequence: Synthetic coding sequence
  source 1..6399: mol_type = other DNA
atggagagcggcgagagactgcccagcagcgccgccagcagcaccacccccaccagcagcagcacccccagcgtggccagcgtggtgagcaagggcggcctgagcaccggcgtggccagcctgagcagcaccatcaacccctgcggccacctgttcagaaccgccggcgaccagcccttcaacctgagcaccgtgagcagcgccttccccatggtgagccaccccgtgttcggcctgcacagcgccagcagcggccacagcgagttcggcggcctgggcaccctgggcacccccaccgccctggccgcccacccccagctggccagcttccccgagtggtggagaaccaccgacgcccacaccagaaccggcgccaccttcttcccccccctgctgggcatcccccccctgttcgccccccccgcccagaaccacgacagcagcagcttccacagcagaaccagcggcaagagcaacagaaacggccccgagaagggcgtgaacggcagcatcaacggcagcaacaccagcagcgtgatcggcatcaacaccagcgtgctgagcaccaccgccagcagcagcatgggccagaccaagagcaccagcagcggcggcggcaacagaaagtgcaaccaggagcagagcaagaaccagcccctggacgccagagtggacaagatcaaggacaagaagcccagaaagaaggccatggagagcagcagcaacagcgacagcgacagcggcaccagcagcgacaccagcagcgagggcatcagcagcagcgacagcgacgacctggaggaggacgaggaggaggaggaccagagcatcgaggagagcgaggacgacgacagcgacagcgagagcgaggcccagcacaagagcaacaaccaggtgctgctgcacggcatcagcgaccccaaggccgacggccagaaggccaccgagaaggcccaggagaagagaatccaccagcccctgcccctggccagcgagagccagacccacagcttccagagccagcagaagcagccccaggtgctgagccagcagctgcccttcatcttccagagcagccaggccaaggaggagagcgtgaacaagcacaccagcgtgatccagagcaccggcctggtgagcaacgtgaagcccctgagcctggtgaaccaggccaagaaggagacctacatgaagctgatcgtgcccagccccgacgtgctgaaggccggcaacaagaacaccagcgaggagagcagcctgctgaccagcgagctgagaagcaagagagagcagtacaagcaggccttccccagccagctgaagaagcaggagagcagcaagagcctgaagaaggtgatcgccgccctgagcaaccccaaggccaccagcagcagccccgcccaccccaagcagaccctggagaacaaccaccccaaccccttcctgaccaacgccctgctgggcaaccaccagcccaacggcgtgatccagagcgtgatccaggaggcccccctggccctgaccaccaagaccaagatgcagagcaagatcaacgagaacatcgccgccgccagcagcacccccttcagcagccccgtgaacctgagcaccagcggcagaagaacccccggcaaccagacccccgtgatgcccagcgccagccccatcctgcacagccagggcaaggagaaggccgtgagcaacaacgtgaaccccgtgaagacccagcaccacagccaccccgccaagagcctggtggagcagttcagaggcaccgacagcgacatccccagcagcaaggacagcgaggacagcaacgaggacgaggaggaggacgacgaggaggaggacgaggaggacgacgaggacgacgagagcgacgacagccagagcgagagcgacagcaacagcgagagcgacaccgagggcagcgaggaggaggacgacgacgacaaggaccaggacgagagcgacagcgacaccgagggcgagaagaccagcatgaagctgaacaagaccaccagcagcgtgaagagccccagcatgagcctgaccggccacagcacccccagaaacctgcacatcgccaaggcccccggcagcgcccccgccgccctgtgcagcgagagccagagccccgccttcctgggcaccagcagcagcaccctgaccagcagcccccacagcggcaccagcaagagaagaagagtgaccgacgagagagagctgagaatccccctggagtacggctggcagagagagaccagaatcagaaacttcggcggcagactgcagggcgaggtggcctactacgccccctgcggcaagaagctgagacagtaccccgaggtgatcaagggcatgcagtggtgcctgctgaaggaggaggacgtgatccccagaatcagagccatggagggcagaagaggcagaccccccaaccccgacagacagagagccagagaggagagcagaatgagaagaagaaagggcagaccccccaacgtgggcaacgccgagttcctggacaacgccgacgccaagctgctgagaaagctgcaggcccaggagatcgccagacaggccgcccagatcaagctgctgagaaagctgcagaagcaggagcaggccagagtggccaaggaggccaagaagcagcaggccatcatggccgccgaggagaagagaaagcagaaggagcagatcaagatcatgaagcagcaggagaagatcaagagaatccagcagatcagaatggagaaggagctgagagcccagcagatcctggaggccaagaagaagaagaaggaggaggccgccaacgccaagctgctggaggccgagaagagaatcaaggagaaggagatgagaagacagcaggccgtgctgctgaagcaccaggagagagagagaagaagacagcacatgatgctgatgaaggccatggaggccagaaagaaggccgaggagaaggagagactgaagcaggagaagagagacgagaagagactgaacaaggagagaaagctggagcagagaagactggagctggagatggccaaggagctgaagaagcccaacgaggacatgtgcctggccgaccagaagcccctgcccgagctgcccagaatccccggcctggtgctgagcggcagcaccttcagcgactgcctgatggtggtgcagttcctgagaaacttcggcaaggtgctgggcttcgacgtgaacatcgacgtgcccaacctgagcgtgctgcaggagggcctgctgaacatcggcgacagcatgggcgaggtgcaggacctgctggtgagactgctgagcgccgccgtgtgcgaccccggcctgatcaccggctacaaggccaagaccgccctgggcgagcacctgctgaacgtgggcgtgaacagagacaacgtgagcgagatcctgcagatcttcatggaggcccactgcggccagaccgagctgaccgagagcctgaagaccaaggccttccaggcccacacccccgcccagaaggccagcgtgctggccttcctgatcaacgagctggcctgcagcaagagcgtggtgagcgagatcgacaagaacatcgactacatgagcaacctgagaagagacaagtgggtggtggagggcaagctgagaaagctgagaatcatccacgccaagaagaccggcaagagagacaccagcggcggcatcgacctgggcgaggagcagcaccccctgggcacccccacccccggcagaaagagaagaagaaagggcggcgacagcgactacgacgacgacgacgacgacgacagcgacgaccagggcgacgaggacgacgaggacgaggaggacaaggaggacaagaagggcaagaagaccgacatctgcgaggacgaggacgagggcgaccaggccgccagcgtggaggagctggagaagcagatcgagaagctgagcaagcagcagagccagtacagaagaaagctgttcgacgccagccacagcctgagaagcgtgatgttcggccaggacagatacagaagaagatactggatcctgccccagtgcggcggcatcttcgtggagggcatggagagcggcgagggcctggaggagatcgccaaggagagagagaagctgaagaaggccgagagcgtgcagatcaaggaggagatgttcgagaccagcggcgacagcctgaactgcagcaacaccgaccactgcgagcagaaggaggacctgaaggagaaggacaacaccaacctgttcctgcagaagcccggcagcttcagcaagctgagcaagctgctggaggtggccaagatgccccccgagagcgaggtgatgacccccaagcccaacgccggcgccaacggctgcaccctgagctaccagaacagcggcaagcacagcctgggcagcgtgcagagcaccgccacccagagcaacgtggagaaggccgacagcaacaacctgttcaacaccggcagcagcggccccggcaagttctacagccccctgcccaacgaccagctgctgaagaccctgaccgagaagaacagacagtggttcagcctgctgcccagaaccccctgcgacgacaccagcctgacccacgccgacatgagcaccgccagcctggtgaccccccagagccagccccccagcaagagccccagccccacccccgcccccctgggcagcagcgcccagaaccccgtgggcctgaaccccttcgccctgagccccctgcaggtgaagggcggcgtgagcatgatgggcctgcagttctgcggctggcccaccggcgtggtgaccagcaacatccccttcaccagcagcgtgcccagcctgggcagcggcctgggcctgagcgagggcaacggcaacagcttcctgaccagcaacgtggccagcagcaagagcgagagccccgtgccccagaacgagaaggccaccagcgcccagcccgccgccgtggaggtggccaagcccgtggacttccccagccccaagcccatccccgaggagatgcagttcggctggtggagaatcatcgaccccgaggacctgaaggccctgctgaaggtgctgcacctgagaggcatcagagagaaggccctgcagaagcagatccagaagcacctggactacatcacccaggcctgcctgaagaacaaggacgtggccatcatcgagctgaacgagaacgaggagaaccaggtgaccagagacatcgtggagaactggagcgtggaggagcaggccatggagatggacctgagcgtgctgcagcaggtggaggacctggagagaagagtggccagcgccagcctgcaggtgaagggctggatgtgccccgagcccgccagcgagagagaggacctggtgtacttcgagcacaagagcttcaccaagctgtgcaaggagcacgacggcgagttcaccggcgaggacgagagcagcgcccacgccctggagagaaagagcgacaaccccctggacatcgccgtgaccagactggccgacctggagagaaacatcgagagaagaatcgaggaggacatcgcccccggcctgagagtgtggagaagagccctgagcgaggccagaagcgccgcccaggtggccctgtgcatccagcagctgcagaagagcatcgcctgggagaagagcatcatgaaggtgtactgccagatctgcagaaagggcgacaacgaggagctgctgctgctgtgcgacggctgcgacaagggctgccacacctactgccacagacccaagatcaccaccatccccgacggcgactggttctgccccgcctgcatcgccaaggccagcggccagaccctgaagatcaagaagctgcacgtgaagggcaagaagaccaacgagagcaagaagggcaagaaggtgaccctgaccggcgacaccgaggacgaggacagcgccagcaccagcagcagcctgaagagaggcaacaaggacctgaagaagagaaagatggaggagaacaccagcatcaacctgagcaagcaggagagcttcaccagcgtgaagaagcccaagagagacgacagcaaggacctggccctgtgcagcatgatcctgaccgagatggagacccacgaggacgcctggcccttcctgctgcccgtgaacctgaagctggtgcccggctacaagaaggtgatcaagaagcccatggacttcagcaccatcagagagaagctgagcagcggccagtaccccaacctggagaccttcgccctggacgtgagactggtgttcgacaactgcgagaccttcaacgaggacgacagcgacatcggcagagccggccacaacatgagaaagtacttcgagaagaagtggaccgacaccttcaaggtgagctag

SEQ ID NO: 74587 - DNA, 6507 bp, synthetic construct
  misc_feature 1..6507: note = Description of Artificial Sequence: Synthetic coding sequence
  source 1..6507: mol_type = other DNA
atggagagcggcgagagactgcccagcagcgccgccagcagcaccacccccaccagcagcagcacccccagcgtggccagcgtggtgagcaagggcggcctgagcaccggcgtggccagcctgagcagcaccatcaacccctgcggccacctgttcagaaccgccggcgaccagcccttcaacctgagcaccgtgagcagcgccttccccatggtgagccaccccgtgttcggcctgcacagcgccagcagcggccacagcgagttcggcggcctgggcaccctgggcacccccaccgccctggccgcccacccccagctggccagcttccccggcgccgagtggtggagaaccaccgacgcccacaccagaaccggcgccaccttcttcccccccctgctgggcatcccccccctgttcgccccccccgcccagaaccacgacagcagcagcttccacagcagaaccagcggcaagagcaacagaaacggccccgagaagggcgtgaacggcagcatcaacggcagcaacaccagcagcgtgatcggcatcaacaccagcgtgctgagcaccaccgccagcagcagcatgggccagaccaagagcaccagcagcggcggcggcaacagaaagtgcaaccaggagcagagcaagaaccagcccctggacgccagagtggacaagatcaaggacaagaagcccagaaagaaggccatggagagcagcagcaacagcgacagcgacagcggcaccagcagcgacaccagcagcgagggcatcagcagcagcgacagcgacgacctggaggaggacgaggaggaggaggaccagagcatcgaggagagcgaggacgacgacagcgacagcgagagcgaggcccagcacaagagcaacaaccaggtgctgctgcacggcatcagcgaccccaaggccgacggccagaaggccaccgagaaggcccaggagaagagaatccaccagcccctgcccctggccagcgagagccagacccacagcttccagagccagcagaagcagccccaggtgctgagccagcagctgcccttcatcttccagagcagccaggccaaggaggagagcgtgaacaagcacaccagcgtgatccagagcaccggcctggtgagcaacgtgaagcccctgagcctggtgaaccaggccaagaaggagacctacatgaagctgatcgtgcccagccccgacgtgctgaaggccggcaacaagaacaccagcgaggagagcagcctgctgaccagcgagctgagaagcaagagagagcagtacaagcaggccttccccagccagctgaagaagcaggagagcagcaagagcctgaagaaggtgatcgccgccctgagcaaccccaaggccaccagcagcagccccgcccaccccaagcagaccctggagaacaaccaccccaaccccttcctgaccaacgccctgctgggcaaccaccagcccaacggcgtgatccagagcgtgatccaggaggcccccctggccctgaccaccaagaccaagatgcagagcaagatcaacgagaacatcgccgccgccagcagcacccccttcagcagccccgtgaacctgagcaccagcggcagaagaacccccggcaaccagacccccgtgatgcccagcgccagccccatcctgcacagccagggcaaggagaaggccgtgagcaacaacgtgaaccccgtgaagacccagcaccacagccaccccgccaagagcctggtggagcagttcagaggcaccgacagcgacatccccagcagcaaggacagcgaggacagcaacgaggacgaggaggaggacgacgaggaggaggacgaggaggacgacgaggacgacgagagcgacgacagccagagcgagagcgacagcaacagcgagagcgacaccgagggcagcgaggaggaggacgacgacgacaaggaccaggacgagagcgacagcgacaccgagggcgagaagaccagcatgaagctgaacaagaccaccagcagcgtgaagagccccagcatgagcctgaccggccacagcacccccagaaacctgcacatcgccaaggcccccggcagcgcccccgccgccctgtgcagcgagagccagagccccgccttcctgggcaccagcagcagcaccctgaccagcagcccccacagcggcaccagcaagagaagaagagtgaccgacgagagagagctgagaatccccctggagtacggctggcagagagagaccagaatcagaaacttcggcggcagactgcagggcgaggtggcctactacgccccctgcggcaagaagctgagacagtaccccgaggtgatcaagtacctgagcagaaacggcatcatggacatcagcagagacaacttcagcttcagcgccaagatcagagtgggcgacttctacgaggccagagacggcccccagggcatgcagtggtgcctgctgaaggaggaggacgtgatccccagaatcagagccatggagggcagaagaggcagaccccccaaccccgacagacagagagccagagaggagagcagaatgagaagaagaaagggcagaccccccaacgtgggcaacgccgagttcctggacaacgccgacgccaagctgctgagaaagctgcaggcccaggagatcgccagacaggccgcccagatcaagctgctgagaaagctgcagaagcaggagcaggccagagtggccaaggaggccaagaagcagcaggccatcatggccgccgaggagaagagaaagcagaaggagcagatcaagatcatgaagcagcaggagaagatcaagagaatccagcagatcagaatggagaaggagctgagagcccagcagatcctggaggccaagaagaagaagaaggaggaggccgccaacgccaagctgctggaggccgagaagagaatcaaggagaaggagatgagaagacagcaggccgtgctgctgaagcaccaggagagagagagaagaagacagcacatgatgctgatgaaggccatggaggccagaaagaaggccgaggagaaggagagactgaagcaggagaagagagacgagaagagactgaacaaggagagaaagctggagcagagaagactggagctggagatggccaaggagctgaagaagcccaacgaggacatgtgcctggccgaccagaagcccctgcccgagctgcccagaatccccggcctggtgctgagcggcagcaccttcagcgactgcctgatggtggtgcagttcctgagaaacttcggcaaggtgctgggcttcgacgtgaacatcgacgtgcccaacctgagcgtgctgcaggagggcctgctgaacatcggcgacagcatgggcgaggtgcaggacctgctggtgagactgctgagcgccgccgtgtgcgaccccggcctgatcaccggctacaaggccaagaccgccctgggcgagcacctgctgaacgtgggcgtgaacagagacaacgtgagcgagatcctgcagatcttcatggaggcccactgcggccagaccgagctgaccgagagcctgaagaccaaggccttccaggcccacacccccgcccagaaggccagcgtgctggccttcctgatcaacgagctggcctgcagcaagagcgtggtgagcgagatcgacaagaacatcgactacatgagcaacctgagaagagacaagtgggtggtggagggcaagctgagaaagctgagaatcatccacgccaagaagaccggcaagagagacaccagcggcggcatcgacctgggcgaggagcagcaccccctgggcacccccacccccggcagaaagagaagaagaaagggcggcgacagcgactacgacgacgacgacgacgacgacagcgacgaccagggcgacgaggacgacgaggacgaggaggacaaggaggacaagaagggcaagaagaccgacatctgcgaggacgaggacgagggcgaccaggccgccagcgtggaggagctggagaagcagatcgagaagctgagcaagcagcagagccagtacagaagaaagctgttcgacgccagccacagcctgagaagcgtgatgttcggccaggacagatacagaagaagatactggatcctgccccagtgcggcggcatcttcgtggagggcatggagagcggcgagggcctggaggagatcgccaaggagagagagaagctgaagaaggccgagagcgtgcagatcaaggaggagatgttcgagaccagcggcgacagcctgaactgcagcaacaccgaccactgcgagcagaaggaggacctgaaggagaaggacaacaccaacctgttcctgcagaagcccggcagcttcagcaagctgagcaagctgctggaggtggccaagatgccccccgagagcgaggtgatgacccccaagcccaacgccggcgccaacggctgcaccctgagctaccagaacagcggcaagcacagcctgggcagcgtgcagagcaccgccacccagagcaacgtggagaaggccgacagcaacaacctgttcaacaccggcagcagcggccccggcaagttctacagccccctgcccaacgaccagctgctgaagaccctgaccgagaagaacagacagtggttcagcctgctgcccagaaccccctgcgacgacaccagcctgacccacgccgacatgagcaccgccagcctggtgaccccccagagccagccccccagcaagagccccagccccacccccgcccccctgggcagcagcgcccagaaccccgtgggcctgaaccccttcgccctgagccccctgcaggtgaagggcggcgtgagcatgatgggcctgcagttctgcggctggcccaccggcgtggtgaccagcaacatccccttcaccagcagcgtgcccagcctgggcagcggcctgggcctgagcgagggcaacggcaacagcttcctgaccagcaacgtggccagcagcaagagcgagagccccgtgccccagaacgagaaggccaccagcgcccagcccgccgccgtggaggtggccaagcccgtggacttccccagccccaagcccatccccgaggagatgcagttcggctggtggagaatcatcgaccccgaggacctgaaggccctgctgaaggtgctgcacctgagaggcatcagagagaaggccctgcagaagcagatccagaagcacctggactacatcacccaggcctgcctgaagaacaaggacgtggccatcatcgagctgaacgagaacgaggagaaccaggtgaccagagacatcgtggagaactggagcgtggaggagcaggccatggagatggacctgagcgtgctgcagcaggtggaggacctggagagaagagtggccagcgccagcctgcaggtgaagggctggatgtgccccgagcccgccagcgagagagaggacctggtgtacttcgagcacaagagcttcaccaagctgtgcaaggagcacgacggcgagttcaccggcgaggacgagagcagcgcccacgccctggagagaaagagcgacaaccccctggacatcgccgtgaccagactggccgacctggagagaaacatcgagagaagaatcgaggaggacatcgcccccggcctgagagtgtggagaagagccctgagcgaggccagaagcgccgcccaggtggccctgtgcatccagcagctgcagaagagcatcgcctgggagaagagcatcatgaaggtgtactgccagatctgcagaaagggcgacaacgaggagctgctgctgctgtgcgacggctgcgacaagggctgccacacctactgccacagacccaagatcaccaccatccccgacggcgactggttctgccccgcctgcatcgccaaggccagcggccagaccctgaagatcaagaagctgcacgtgaagggcaagaagaccaacgagagcaagaagggcaagaaggtgaccctgaccggcgacaccgaggacgaggacagcgccagcaccagcagcagcctgaagagaggcaacaaggacctgaagaagagaaagatggaggagaacaccagcatcaacctgagcaagcaggagagcttcaccagcgtgaagaagcccaagagagacgacagcaaggacctggccctgtgcagcatgatcctgaccgagatggagacccacgaggacgcctggcccttcctgctgcccgtgaacctgaagctggtgcccggctacaagaaggtgatcaagaagcccatggacttcagcaccatcagagagaagctgagcagcggccagtaccccaacctggagaccttcgccctggacgtgagactggtgttcgacaactgcgagaccttcaacgaggacgacagcgacatcggcagagccggccacaacatgagaaagtacttcgagaagaagtggaccgacaccttcaaggtgagctag

SEQ ID NO: 74588 - DNA, 432 bp, synthetic construct
  misc_feature 1..432: note = Description of Artificial Sequence: Synthetic coding sequence
  source 1..432: mol_type = other DNA
atggagagcggcgagagactgcccagcagcgccgccagcagcaccacccccaccagcagcagcacccccagcgtggccagcgtggtgagcaagggcggcctgagcaccggcgtggccagcctgagcagcaccatcaacccctgcggccacctgttcagaaccgccggcgaccagcccttcaacctgagcaccgtgagcagcgccttccccatggtgagccaccccgtgttcggcctgcacagcgccagcagcggccacagcgagttcggcggcctgggcaccctgggcacccccaccgccctggccgcccacccccagctggccagcttccccggcgccgagtggtggagaaccaccgacgcccacaccagaaccggcgccaccttcttcccccccctgctgggcatcccccccctgttcgcccccccctag

SEQ ID NO: 74589 - DNA, 1563 bp, synthetic construct
  misc_feature 1..1563: note = Description of Artificial Sequence: Synthetic coding sequence
  source 1..1563: mol_type = other DNA
atggagagcggcgagagactgcccagcagcgccgccagcagcaccacccccaccagcagcagcacccccagcgtggccagcgtggtgagcaagggcggcctgagcaccggcgtggccagcctgagcagcaccatcaacccctgcggcgccgagtggtggagaaccaccgacgcccacaccagaaccggcgccaccttcttcccccccctgctgggcatcccccccctgttcgccccccccgcccagaaccacgacagcagcagcttccacagcagaaccagcggcaagagcaacagaaacggccccgagaagggcgtgaacggcagcatcaacggcagcaacaccagcagcgtgatcggcatcaacaccagcgtgctgagcaccaccgccagcagcagcatgggccagaccaagagcaccagcagcggcggcggcaacagaaagtgcaaccaggagcagagcaagaaccagcccctggacgccagagtggacaagatcaaggacaagaagcccagaaagaaggccatggagagcagcagcaacagcgacagcgacagcggcaccagcagcgacaccagcagcgagggcatcagcagcagcgacagcgacgacctggaggaggacgaggaggaggaggaccagagcatcgaggagagcgaggacgacgacagcgacagcgagagcgaggcccagcacaagagcaacaaccaggtgctgctgcacggcatcagcgaccccaaggccgacggccagaaggccaccgagaaggcccaggagaagagaatccaccagcccctgcccctggccagcgagagccagacccacagcttccagagccagcagaagcagccccaggtgctgagccagcagctgcccttcatcttccagagcagccaggccaaggaggagagcgtgaacaagcacaccagcgtgatccagagcaccggcctggtgagcaacgtgaagcccctgagcctggtgaaccaggccaagaaggagacctacatgaagctgatcgtgcccagccccgacgtgctgaaggccggcaacaagaacaccagcgaggagagcagcctgctgaccagcgagctgagaagcaagagagagcagtacaagcaggccttccccagccagctgaagaagcaggagagcagcaagagcctgaagaaggtgatcgccgccctgagcaaccccaaggccaccagcagcagccccgcccaccccaagcagaccctggagaacaaccaccccaaccccttcctgaccaacgccctgctgggcaaccaccagcccaacggcgtgatccagagcgtgatccaggaggcccccctggccctgaccaccaagaccaagatgcagagcaagatcaacgagaacatcgccgccgccagcagcacccccttcagcagccccgtgaacctgagcaccagcggcagaagaacccccggcaaccagacccccgtgatgcccagcgccagccccatcctgcacagccagggcaaggagaaggccgtgagcaacaacgtgaaccccagaaagatgatgaagaagaagatgagatag

SEQ ID NO: 74590 - DNA, 3645 bp, synthetic construct
  misc_feature 1..3645: note = Description of Artificial Sequence: Synthetic coding sequence
  source 1..3645: mol_type = other DNA
atgggcgtggacttcgacgtgaagaccttctgccacaacctgagagccaccaagcccccctacgagtgccccgtggagacctgcagaaaggtgtacaagagctacagcggcatcgagtaccacctgtaccactacgaccacgacaaccccccccccccccagcagacccccctgagaaagcacaagaagaagggcagacagagcagacccgccaacaagcagagccccagccccagcgaggtgagccagagccccggcagagaggtgatgagctacgcccaggcccagagaatggtggaggtggacctgcacggcagagtgcacagaatcagcatcttcgacaacctggacgtggtgagcgaggacgaggaggcccccgaggaggcccccgagaacggcagcaacaaggagaacaccgagacccccgccgccacccccaagagcggcaagcacaagaacaaggagaagagaaaggacagcaaccaccaccaccaccacaacgtgagcgccagcaccacccccaagctgcccgaggtggtgtacagagagctggagcaggacacccccgacgccccccccagacccaccagctactacagatacatcgagaagagcgccgaggagctggacgaggaggtggagtacgacatggacgaggaggactacatctggctggacatcatgaacgagagaagaaagaccgagggcgtgagccccatcccccaggagatcttcgagtacctgatggacagactggagaaggagagctacttcgagagccacaacaagggcgaccccaacgccctggtggacgaggacgccgtgtgctgcatctgcaacgacggcgagtgccagaacagcaacgtgatcctgttctgcgacatgtgcaacctggccgtgcaccaggagtgctacggcgtgccctacatccccgagggccagtggctgtgcagaagatgcctgcagagccccagcagagccgtggactgcgccctgtgccccaacaagggcggcgccttcaagcagaccgacgacggcagatgggcccacgtggtgtgcgccctgtggatccccgaggtgtgcttcgccaacaccgtgttcctggagcccatcgacagcatcgagcacatcccccccgccagatggaagctgacctgctacatctgcaagcagagaggcagcggcgcctgcatccagtgccacaaggccaactgctacaccgccttccacgtgacctgcgcccagcaggccggcctgtacatgaagatggagcccgtgagagagaccggcgccaacggcaccagcttcagcgtgagaaagaccgcctactgcgacatccacaccccccccggcagcgccagaagactgcccgccctgagccacagcgagggcgaggaggacgaggacgaggaggaggacgagggcaagggctggagcagcgagaaggtgaagaaggccaaggccaagagcagaatcaagatgaagaaggccagaaagatcctggccgagaagagagccgccgcccccgtggtgagcgtgccctgcatccccccccacagactgagcaagatcaccaacagactgaccatccagagaaagagccagttcatgcagagactgcacagctactggaccctgaagagacagagcagaaacggcgtgcccctgctgagaagactgcagacccacctgcagagccagagaaactgcgaccaggtgggcagagacagcgaggacaagaactgggccctgaaggagcagctgaagagctggcagagactgagacacgacctggagagagccagactgctggtggagctgatcagaaagagagagaagctgaagagagagaccatcaaggtgcagcagatcgccatggagatgcagctgacccccttcctgatcctgctgagaaagaccctggagcagctgcaggagaaggacaccggcaacatcttcagcgagcccgtgcccctgagcgaggtgcccgactacctggaccacatcaagaagcccatggacttcttcaccatgaagcagaacctggaggcctacagatacctgaacttcgacgacttcgaggaggacttcaacctgatcgtgagcaactgcctgaagtacaacgccaaggacaccatcttctacagagccgccgtgagactgagagagcagggcggcgccgtgctgagacaggccagaagacaggccgagaagatgggcatcgacttcgagaccggcatgcacatcccccacagcctggccggcgacgaggccacccaccacaccgaggacgccgccgaggaggagagactggtgctgctggagaaccagaagcacctgcccgtggaggagcagctgaagctgctgctggagagactggacgaggtgaacgccagcaagcagagcgtgggcagaagcagaagagccaagatgatcaagaaggagatgaccgccctgagaagaaagctggcccaccagagagagaccggcagagacggccccgagagacacggccccagcagcagaggcagcctgaccccccaccccgccgcctgcgacaaggacggccagaccgacagcgccgccgaggagagcagcagccaggagaccagcaagggcctgggccccaacatgagcagcacccccgcccacgaggtgggcagaagaaccagcgtgctgttcagcaagaagaaccccaagaccgccggcccccccaagagacccggcagaccccccaagaacagagagagccagatgacccccagccacggcggcagccccgtgggccccccccagctgcccatcatgagcagcctgagacagagaaagagaggcagaagccccagacccagcagcagcagcgacagcgacagcgacaagagcaccgaggacccccccatggacctgcccgccaacggcttcagcggcggcaaccagcccgtgaagaagagcttcctggtgtacagaaacgactgcagcctgcccagaagcagcagcgacagcgagagcagcagcagcagcagcagcagcgccgccagcgacagaaccagcaccacccccagcaagcagggcagaggcaagcccagcttcagcagaggcaccttccccgaggacagcagcgaggacaccagcggcaccgagaacgaggcctacagcgtgggcaccggcagaggcgtgggccacagcatggtgagaaagagcctgggcagaggcgccggctggctgagcgaggacgaggacagccccctggacgccctggacctggtgtgggccaagtgcagaggctaccccagctaccccgccctgatcatcgaccccaagatgcccagagagggcatgttccaccacggcgtgcccatccccgtgccccccctggaggtgctgaagctgggcgagcagatgacccaggaggccagagagcacctgtacctggtgctgttcttcgacaacaagagaacctggcagtggctgcccagaaccaagctggtgcccctgggcgtgaaccaggacctggacaaggagaagatgctggagggcagaaagagcaacatcagaaagagcgtgcagatcgcctaccacagagccctgcagcacagaagcaaggtgcagggcgagcagagcagcgagaccagcgacagcgactag

SEQ ID NO: 74591 - DNA, 3663 bp, synthetic construct
  misc_feature 1..3663: note = Description of Artificial Sequence: Synthetic coding sequence
  source 1..3663: mol_type = other DNA
atgggcgtggacttcgacgtgaagaccttctgccacaacctgagagccaccaagcccccctacgagtgccccgtggagacctgcagaaaggtgtacaagagctacagcggcatcgagtaccacctgtaccactacgaccacgacaaccccccccccccccagcagacccccctgagaaagcacaagaagaagggcagacagagcagacccgccaacaagcagagccccagccccagcgaggtgagccagagccccggcagagaggtgatgagctacgcccaggcccagagaatggtggaggtggacctgcacggcagagtgcacagaatcagcatcttcgacaacctggacgtggtgagcgaggacgaggaggcccccgaggaggcccccgagaacggcagcaacaaggagaacaccgagacccccgccgccacccccaagagcggcaagcacaagaacaaggagaagagaaaggacagcaaccaccaccaccaccacaacgtgagcgccagcaccacccccaagctgcccgaggtggtgtacagagagctggagcaggacacccccgacgccccccccagacccaccagctactacagatacatcgagaagagcgccgaggagctggacgaggaggtggagtacgacatggacgaggaggactacatctggctggacatcatgaacgagagaagaaagaccgagggcgtgagccccatcccccaggagatcttcgagtacctgatggacagactggagaaggagagctacttcgagagccacaacaagggcgaccccaacgccctggtggacgaggacgccgtgtgctgcatctgcaacgacggcgagtgccagaacagcaacgtgatcctgttctgcgacatgtgcaacctggccgtgcaccaggagtgctacggcgtgccctacatccccgagggccagtggctgtgcagaagatgcctgcagagccccagcagagccgtggactgcgccctgtgccccaacaagggcggcgccttcaagcagaccgacgacggcagatgggcccacgtggtgtgcgccctgtggatccccgaggtgtgcttcgccaacaccgtgttcctggagcccatcgacagcatcgagcacatcccccccgccagatggaagctgacctgctacatctgcaagcagagaggcagcggcgcctgcatccagtgccacaaggccaactgctacaccgccttccacgtgacctgcgcccagcaggccggcctgtacatgaagatggagcccgtgagagagaccggcgccaacggcaccagcttcagcgtgagaaagaccgcctactgcgacatccacaccccccccggcagcgccagaagactgcccgccctgagccacagcgagggcgaggaggacgaggacgaggaggaggacgagggcaagggctggagcagcgagaaggtgaagaaggccaaggccaagagcagaatcaagatgaagaaggccagaaagatcctggccgagaagagagccgccgcccccgtggtgagcgtgccctgcatccccccccacagactgagcaagatcaccaacagactgaccatccagagaaagagccagttcatgcagagactgcacagctactggaccctgaagagacagagcagaaacggcgtgcccctgctgagaagactgcagacccacctgcagagccagagaaactgcgaccaggtgggcagagacagcgaggacaagaactgggccctgaaggagcagctgaagagctggcagagactgagacacgacctggagagagccagactgctggtggagctgatcagaaagagagagaagctgaagagagagaccatcaaggtgcagcagatcgccatggagatgcagctgacccccttcctgatcctgctgagaaagaccctggagcagctgcaggagaaggacaccggcaacatcttcagcgagcccgtgcccctgagcgaggtgaccgagctggacgaggtgcccgactacctggaccacatcaagaagcccatggacttcttcaccatgaagcagaacctggaggcctacagatacctgaacttcgacgacttcgaggaggacttcaacctgatcgtgagcaactgcctgaagtacaacgccaaggacaccatcttctacagagccgccgtgagactgagagagcagggcggcgccgtgctgagacaggccagaagacaggccgagaagatgggcatcgacttcgagaccggcatgcacatcccccacagcctggccggcgacgaggccacccaccacaccgaggacgccgccgaggaggagagactggtgctgctggagaaccagaagcacctgcccgtggaggagcagctgaagctgctgctggagagactggacgaggtgaacgccagcaagcagagcgtgggcagaagcagaagagccaagatgatcaagaaggagatgaccgccctgagaagaaagctggcccaccagagagagaccggcagagacggccccgagagacacggccccagcagcagaggcagcctgaccccccaccccgccgcctgcgacaaggacggccagaccgacagcgccgccgaggagagcagcagccaggagaccagcaagggcctgggccccaacatgagcagcacccccgcccacgaggtgggcagaagaaccagcgtgctgttcagcaagaagaaccccaagaccgccggcccccccaagagacccggcagaccccccaagaacagagagagccagatgacccccagccacggcggcagccccgtgggccccccccagctgcccatcatgagcagcctgagacagagaaagagaggcagaagccccagacccagcagcagcagcgacagcgacagcgacaagagcaccgaggacccccccatggacctgcccgccaacggcttcagcggcggcaaccagcccgtgaagaagagcttcctggtgtacagaaacgactgcagcctgcccagaagcagcagcgacagcgagagcagcagcagcagcagcagcagcgccgccagcgacagaaccagcaccacccccagcaagcagggcagaggcaagcccagcttcagcagaggcaccttccccgaggacagcagcgaggacaccagcggcaccgagaacgaggcctacagcgtgggcaccggcagaggcgtgggccacagcatggtgagaaagagcctgggcagaggcgccggctggctgagcgaggacgaggacagccccctggacgccctggacctggtgtgggccaagtgcagaggctaccccagctaccccgccctgatcatcgaccccaagatgcccagagagggcatgttccaccacggcgtgcccatccccgtgccccccctggaggtgctgaagctgggcgagcagatgacccaggaggccagagagcacctgtacctggtgctgttcttcgacaacaagagaacctggcagtggctgcccagaaccaagctggtgcccctgggcgtgaaccaggacctggacaaggagaagatgctggagggcagaaagagcaacatcagaaagagcgtgcagatcgcctaccacagagccctgcagcacagaagcaaggtgcagggcgagcagagcagcgagaccagcgacagcgactag

SEQ ID NO: 74592 - DNA, 303 bp, synthetic construct
  misc_feature 1..303: note = Description of Artificial Sequence: Synthetic coding sequence
  source 1..303: mol_type = other DNA
atgggcgtggacttcgacgtgaagaccttctgccacaacctgagagccaccaagcccccctacgagtgccccgtggagacctgcagaaaggtgtacaagagctacagcggcatcgagtaccacctgtaccactacgaccacgacaaccccccccccccccagcagacccccctgagaaagcacaagaagaagggcagacagagcagacccgccaacaagcagagccccagccccagcgaggtgagccagagccccggcagagaggtgatgagctacgcccaggcccagagaatggtggagtag

SEQ ID NO: 74593 - DNA, 318 bp, synthetic construct
  misc_feature 1..318: note = Description of Artificial Sequence: Synthetic coding sequence
  source 1..318: mol_type = other DNA
atgggcgtggacttcgacgtgaagaccttctgccacaacctgagagccaccaagcccccctacgagtgccccgtggagacctgcagaaaggtgtacaagagctacagcggcatcgagtaccacctgtaccactacgaccacgacaaccccccccccccccagcagacccccctgagaaagcacaagaagaagggcagacagagcagacccgccaacaagcagagccccagccccagcgaggtgagccagagccccggcagagaggtgatgagctacgcccaggcccagagaatggtggaggtggacctgcacggctag

SEQ ID NO: 74594 - DNA, 3645 bp, synthetic construct; identical to SEQ ID NO: 74590
  misc_feature 1..3645: note = Description of Artificial Sequence: Synthetic coding sequence
  source 1..3645: mol_type = other DNA

SEQ ID NO: 74595 - DNA, 5409 bp, synthetic construct
  misc_feature 1..5409: note = Description of Artificial Sequence: Synthetic coding sequence
  source 1..5409: mol_type = other DNA
atggccgccgcccccacccagatcgaggccgagctgtactacctgatcgccagattcctgcagagcggcccctgcaacaagagcgcccaggtgctggtgcaggagctggaggagcaccagctgatccccagaagactggactgggagggcaaggagcacagaagaagcttcgaggacctggtggccgccaacgcccacatcccccccgactacctgctgaagatctgcgagagaatcggccccctgctggacaaggagatcccccagagcgtgcccggcgtgcagaccctgctgggcgtgggcagacagagcctgctgagagacgccaaggactgcaagagcaccctgtggaacggcagcgccttcgccgccctgcacagaggcagaccccccgagctgcccgtgaactacgtgaagccccccaacgtggtgaacatcaccagcgccagacagctgaccggctgcagcagattcggccacatcttccccagcagcgcctaccagcacatcaagatgcacaagagaatcctgggccacctgagcagcgtgtactgcgtggccttcgacagaagcggcagaagaatcttcaccggcagcgacgactgcctggtgaagatctgggccaccgacgacggcagactgctggccaccctgagaggccacagcgccgagatcagcgacatggccgtgaactacgagaacaccctgatcgccgccggcagctgcgacaaggtggtgagagtgtggtgcctgagaacctgcgcccccgtggccgtgctgcagggccacagcgccagcatcaccagcatccagttctgccccagcaccaagggcaccaacagatacctgaccagcaccggcgccgacggcaccatctgcttctggcagtggcacgtgaagaccatgaagttcagagacagacccgtgaagttcaccgagagaagcagacccggcgtgcagatcagctgcagcagcttcagcagcggcggcatgttcatcaccaccggcagcaccgaccacgtgatcagaatctactacctgggcagcgaggtgcccgagaagatcgccgagctggagagccacaccgacaaggtggtggccgtgcagttctgcaacaacggcgacagcctgagattcgtgagcggcagcagagacggcaccgccagaatctggcagtaccagcagcaggagtggaagagcatcgtgctggacatggccaccaagatgaccggcaacaacctgcccagcggcgaggacaagatcaccaagctgaaggtgaccatggtggcctgggacagatacgacaccaccgtgatcaccgccgtgaacaacttcctgctgaaggtgtggaacagcatcaccggccagctgctgcacaccctgagcggccacgacgacgaggtgttcgtgctggaggcccaccccttcgaccagagaatcatcctgagcgccggccacgacggcaacatcttcatctgggacctggacagaggcaccaagatcagaaactacttcaacatgatcgagggccagggccacggcgccgtgttcgactgcaagttcagccccgacggcaaccacttcgcctgcaccgacagccacggccacctgctgctgttcggcttcggctgcagcaagtactacgagaagatccccgaccagatgttcttccacaccgactacagacccctgatcagagacgccaacaactacgtgctggacgagcagacccagcaggccccccacctgatgcccccccccttcctggtggacgtggacggcaacccccaccccaccaagttccagagactggtgcccggcagagagaactgcaaggacgagcagctgatcccccagctgggctacgtggccaacggcgacggcgaggtggtggagcaggtgatcggccagcagaccaacgaccaggacgagagcatcctggacggcatcatcagagagctgcagagagagcaggacctgagactgatcaacgagggcgacgtgccccacctgcccgtgaacagagcctacagcgtgaacggcgccctgagaagccccaacatggacatcagcagcagccccaacatcagactgagaagacacagcagccagatcgagggcgtgagacagatgcacaacaacgcccccagaagccagatggccaccgagagagacctgatggcctggagcagaagagtggtggtgaacgagctgaacaacggcgtgagcagagtgcaggaggagtgcagaaccgccaagggcgacatcgagatcagcctgtacaccgtggagaagaagaagaagcccagctacaccacccagagaaacgactacgagcccagctgcggcagaagcctgagaagaacccagagaaagagacagcacacctaccagaccagaagcaacatcgagcacaacagccaggccagctgccagaacagcggcgtgcaggaggacagcgacagcagcagcgaggaggacgagaccgtgggcaccagcgacgccagcgtggaggaccccgtggtggagtggcagagcgagagcagcagcagcgacagcagcagcgagtacagcgactggaccgccgacgccggcatcaacctgcagccccccaagagacagaccagacagaccaccagaaagatctgcagcagcagcgacgaggagaacctgaagagcctggaggagagacagaagaagcccaagcagaccagaaagaagaagggcggcctggtgagcatcgccggcgagcccaacgaggagtggttcgccccccagtggatcctggacaccatccccagaagaagccccttcgtgccccagatgggcgacgagctgatctacttcagacagggccacgaggcctacgtgagagccgtgagaaagagcaagatctacagcgtgaacctgcagaagcagccctggaacaagatggacctgagagagcaggagttcgtgaagatcgtgggcatcaagtacgaggtgggcccccccaccctgtgctgcctgaagctggccttcctggaccccatcagcggcaagatgaccggcgagagcttcagcatcaagtaccacgacatgcccgacgtgatcgacttcctggtgctgcaccagttctacaacgaggccaaggagagaaactggcagatcggcgacagattcagaagcatcatcgacgacgcctggtggttcggcaccgtggagagccagcagcccttccagcccgagtaccccgacagcagcttccagtgctacagcgtgcactgggacaacaacgagagagagaagatgagcccctgggacatggagcccatccccgagggcaccgccttccccgacgaggtgggcgccggcgtgcccgtgagccaggaggagctgaccgccctgctgtacaagccccaggagggcgagtggggcgcccacagcagagacgaggagtgcgagagagtgatccagggcatcaaccacctgctgagcctggacttcgccagccccttcgccgtgcccgtggacctgagcgcctaccccctgtactgcaccgtggtggcctaccccaccgacctgaacaccatcagaagaagactggagaacagattctacagaagaatcagcgccctgatgtgggaggtgagatacatcgagcacaacgccagaaccttcaacgagcccgacagccccatcgtgaaggccgccaagatcgtgaccgacgtgctgctgagattcatcggcgaccagagctgcaccgacatcctggacacctacaacaagatcaaggccgaggagagaaacagcaccgacgccgaggaggacaccgagatcgtggacctggacagcgacggccccggcaccagcagcggcagaaaggtgaagtgcagaggcagaagacagagcctgaagtgcaaccccgacgcctggaagaagcagtgcaaggagctgctgagcctgatctacgagagagaggacagcgagcccttcagacagcccgccgacctgctgagctaccccggccaccaggagcaggagggcgagagcagcgagagcgtggtgcccgagagacagcaggacagcagcctgagcgaggactaccaggacgtgatcgacacccccgtggacttcagcaccgtgaaggagaccctggaggccggcaactacggcagccccctggagttctacaaggacgtgagacagatcttcaacaacagcaaggcctacaccagcaacaagaagagcagaatctacagcatgatgctgagactgagcgccctgttcgagagccacatcaagaacatcatcagcgagtacaagagcgccatccagagccagaagagaagaagacccagatacagaaagagactgagaagcagcagcagcagcctgagcagcagcggcgcccccagccccaagggcaagcagaagcagatgaagctgcagcccaagaacgaccagaacaccagcgtgagccacgccagaaccagcagccccttcagcagccccgtgagcgacgccgccgagggcctgagcctgtacctgctggacgacgagcccgacggccccttcagcagcagcagcttcggcggctacagcagaagcggcaacagccacgaccccggcaaggccaagagcttcagaaacagagtgctgcccgtgaagcaggaccacagcctggacggccccctgaccaacggcgacggcagagagcccagaaccggcatcaagagaaagctgctgagcgccagcgaggaggacgagaacatgggcggcgaggacaaggagaagaaggagaccaaggagaagagccacctgagcaccagcgagagcggcgagctgggcagcagcctgagcagcgagagcacctgcggcagcgacagcgacagcgagagcaccagcagaaccgaccaggactacgtggacggcgaccacgactacagcaagttcatccagaccagacccaagagaaagctgagaaagcagcacggcaacggcaagagaaactggaagaccagaggcaccggcggcagaggcagatggggcagatggggcagatggagcagaggcggcagaggcagaggcggcagaggcagaggcagcagaggcagaggcggcggcggcaccagaggcagaggcagaggcagaggcggcagaggcgccagcagaggcgccaccagagccaagagagccagaatcgccgacgacgagttcgacaccatgttcagcggcagattcagcagactgcccagaatcaagaccagaaaccagggcagaagaaccgtgctgtacaacgacgacagcgacaacgacaacttcgtgagcaccgaggaccccctgaacctgggcaccagcagaagcggcagagtgagaaagatgaccgagaaggccagagtgagccacctgatgggctggaactactag

SEQ ID NO: 74596 - DNA, 2406 bp, synthetic construct
  misc_feature 1..2406: note = Description of Artificial Sequence: Synthetic coding sequence
  source 1..2406: mol_type = other DNA
atgctgcagaacgtgaccccccacaacaagctgcccggcgagggcaacgccggcctgctgggcctgggccccgaggccgccgcccccggcaagagaatcagaaagcccagcctgctgtacgagggcttcgagagccccaccatggccagcgtgcccgccctgcagctgacccccgccaacccccccccccccgaggtgagcaaccccaagaagcccggcagagtgaccaaccagctgcagtacctgcacaaggtggtgatgaaggccctgtggaagcaccagttcgcctggcccttcagacagcccgtggacgccgtgaagctgggcctgcccgactaccacaagatcatcaagcagcccatggacatgggcaccatcaagagaagactggagaacaactactactgggccgccagcgagtgcatgcaggacttcaacaccatgttcaccaactgctacatctacaacaagcccaccgacgacatcgtgctgatggcccagaccctggagaagatcttcctgcagaaggtggccagcatgccccaggaggagcaggagctggtggtgaccatccccaagaacagccacaagaagggcgccaagctggccgccctgcagggcagcgtgaccagcgcccaccaggtgcccgccgtgagcagcgtgagccacaccgccctgtacacccccccccccgagatccccaccaccgtgctgaacatcccccaccccagcgtgatcagcagccccctgctgaagagcctgcacagcgccggcccccccctgctggccgtgaccgccgccccccccgcccagcccctggccaagaagaagggcgtgaagagaaaggccgacaccaccacccccacccccaccgccatcctggcccccggcagccccgccagcccccccggcagcctggagcccaaggccgccagactgccccccatgagaagagagagcggcagacccatcaagccccccagaaaggacctgcccgacagccagcagcagcaccagagcagcaagaagggcaagctgagcgagcagctgaagcactgcaacggcatcctgaaggagctgctgagcaagaagcacgccgcctacgcctggcccttctacaagcccgtggacgccagcgccctgggcctgcacgactaccacgacatcatcaagcaccccatggacctgagcaccgtgaagagaaagatggagaacagagactacagagacgcccaggagttcgccgccgacgtgagactgatgttcagcaactgctacaagtacaacccccccgaccacgacgtggtggccatggccagaaagctgcaggacgtgttcgagttcagatacgccaagatgcccgacgagcccctggagcccggccccctgcccgtgagcaccgccatgccccccggcctggccaagagcagcagcgagagcagcagcgaggagagcagcagcgagagcagcagcgaggaggaggaggaggaggacgaggaggacgaggaggaggaggagagcgagagcagcgacagcgaggaggagagagcccacagactggccgagctgcaggagcagctgagagccgtgcacgagcagctggccgccctgagccagggccccatcagcaagcccaagagaaagagagagaagaaggagaagaagaagaagagaaaggccgagaagcacagaggcagagccggcgccgacgaggacgacaagggccccagagcccccagacccccccagcccaagaagagcaagaaggccagcggcagcggcggcggcagcgccgccctgggccccagcggcttcggccccagcggcggcagcggcaccaagctgcccaagaaggccaccaagaccgccccccccgccctgcccaccggctacgacagcgaggaggaggaggagagcagacccatgagctacgacgagaagagacagctgagcctggacatcaacaagctgcccggcgagaagctgggcagagtggtgcacatcatccaggccagagagcccagcctgagagacagcaaccccgaggagatcgagatcgacttcgagaccctgaagcccagcaccctgagagagctggagagatacgtgctgagctgcctgagaaagaagcccagaaagccctacaccatcaagaagcccgtgggcaagaccaaggaggagctggccctggagaagaagagagagctggagaagagactgcaggacgtgagcggccagctgaacagcaccaagaagccccccaagaaggccaacgagaagaccgagagcagcagcgcccagcaggtggccgtgagcagactgagcgccagcagcagcagcagcgacagcagcagcagcagcagcagcagcagcagcagcgacaccagcgacagcgacagcggctag

SEQ ID NO: 74597 - DNA, 2406 bp, synthetic construct; identical to SEQ ID NO: 74596
  misc_feature 1..2406: note = Description of Artificial Sequence: Synthetic coding sequence
  source 1..2406: mol_type = other DNA

SEQ ID NO: 74598 - DNA, 2406 bp, synthetic construct; identical to SEQ ID NO: 74596
  misc_feature 1..2406: note = Description of Artificial Sequence: Synthetic coding sequence
  source 1..2406: mol_type = other DNA

SEQ ID NO: 74599 - DNA, 2511 bp, synthetic construct
  misc_feature 1..2511: note = Description of Artificial Sequence: Synthetic coding sequence
  source 1..2511: mol_type = other DNA
atgctgcagaacgtgaccccccacaacaagctgcccggcgagggcaacgccggcctgctgggcctgggccccgaggccgccgcccccggcaagagaatcagaaagcccagcctgctgtacgagggcttcgagagccccaccatggccagcgtgcccgccctgcagctgacccccgccaacccccccccccccgaggtgagcaaccccaagaagcccggcagagtgaccaaccagctgcagtacctgcacaaggtggtgatgaaggccctgtggaagcaccagttcgcctggcccttcagacagcccgtggacgccgtgaagctgggcctgcccgactaccacaagatcatcaagcagcccatggacatgggcaccatcaagagaagactggagaacaactactactgggccgccagcgagtgcatgcaggacttcaacaccatgttcaccaactgctacatctacaacaagcccaccgacgacatcgtgctgatggcccagaccctggagaagatcttcctgcagaaggtggccagcatgccccaggaggagcaggagctggtggtgaccatccccaagaacagccacaagaagggcgccaagctggccgccctgcagggcagcgtgaccagcgcccaccaggtgcccgccgtgagcagcgtgagccacaccgccctgtacacccccccccccgagatccccaccaccgtgctgaacatcccccaccccagcgtgatcagcagccccctgctgaagagcctgcacagcgccggcccccccctgctggccgtgaccgccgccccccccgcccagcccctggccaagaagaagggcgtgaagagaaaggccgacaccaccacccccacccccaccgccatcctggcccccggcagccccgccagcccccccggcagcctggagcccaaggccgccagactgccccccatgagaagagagagcggcagacccatcaagccccccagaaaggacctgcccgacagccagcagcagcaccagagcagcaagaagggcaagctgagcgagcagctgaagcactgcaacggcatcctgaaggagctgctgagcaagaagcacgccgcctacgcctggcccttctacaagcccgtggacgccagcgccctgggcctgcacgactaccacgacatcatcaagcaccccatggacctgagcaccgtgaagagaaagatggagaacagagactacagagacgcccaggagttcgccgccgacgtgagactgatgttcagcaactgctacaagtacaacccccccgaccacgacgtggtggccatggccagaaagctgcaggacgtgttcgagttcagatacgccaagatgcccgacgagcccctggagcccggccccctgcccgtgagcaccgccatgccccccggcctggccaagagcagcagcgagagcagcagcgaggagagcagcagcgagagcagcagcgaggaggaggaggaggaggacgaggaggacgaggaggaggaggagagcgagagcagcgacagcgaggaggagagagcccacagactggccgagctgcaggagcagctgagagccgtgcacgagcagctggccgccctgagccagggccccatcagcaagcccaagagaaagagagagaagaaggagaagaagaagaagagaaaggccgagaagcacagaggcagagccggcgccgacgaggacgacaagggccccagagcccccagacccccccagcccaagaagagcaagaaggccagcggcagcggcggcggcagcgccgccctgggccccagcggcttcggccccagcggcggcagcggcaccaagctgcaggccggcgtgcagtggagagacctgggcctgctgcagccccccctgctgggcttcaagagattcagctgcctgagcctgcccagcagccaggactacagactgcccaagaaggccaccaagaccgccccccccgccctgcccaccggctacgacagcgaggaggaggaggagagcagacccatgagctacgacgagaagagacagctgagcctggacatcaacaagctgcccggcgagaagctgggcagagtggtgcacatcatccaggccagagagcccagcctgagagacagcaaccccgaggagatcgagatcgacttcgagaccctgaagcccagcaccctgagagagctggagagatacgtgctgagctgcctgagaaagaagcccagaaagccctacaccatcaagaagcccgtgggcaagaccaaggaggagctggccctggagaagaagagagagctggagaagagactgcaggacgtgagcggccagctgaacagcaccaagaagccccccaagaaggccaacgagaagaccgagagcagcagcgcccagcaggtggccgtgagcagactgagcgccagcagcagcagcagcgacagcagcagcagcagcagcagcagcagcagcagcgacaccagcgacagcgacagcggctag

SEQ ID NO: 74600 - DNA, 2511 bp, synthetic construct; identical to SEQ ID NO: 74599
  misc_feature 1..2511: note = Description of Artificial Sequence: Synthetic coding sequence
  source 1..2511: mol_type = other DNA

SEQ ID NO: 74601 - DNA, 2511 bp, synthetic construct; identical to SEQ ID NO: 74599
  misc_feature 1..2511: note = Description of Artificial Sequence: Synthetic coding sequence
  source 1..2511: mol_type = other DNA

SEQ ID NO: 74602 - DNA, 2406 bp, synthetic construct; identical to SEQ ID NO: 74596
  misc_feature 1..2406: note = Description of Artificial Sequence: Synthetic coding sequence
  source 1..2406: mol_type = other DNA

SEQ ID NO: 74603 - DNA, 2406 bp, synthetic construct; identical to SEQ ID NO: 74596
  misc_feature 1..2406: note = Description of Artificial Sequence: Synthetic coding sequence
  source 1..2406: mol_type = other DNA

SEQ ID NO: 74604 - DNA, 891 bp, synthetic construct
  misc_feature 1..891: note = Description of Artificial Sequence: Synthetic coding sequence
  source 1..891: mol_type = other DNA
tgaagacccctgggcgtgcagcagcccggcgccagactgcccggcgagggcaacgccggcctgctgggcctgggccccgaggccgccgcccccggcaagagaatcagaaagcccagcctgctgtacgagggcttcgagagccccaccatggccagcgtgcccgccctgcagctgacccccgccaacccccccccccccgaggtgagcaaccccaagaagcccggcagagtgaccaaccagctgcagtacctgcacaaggtggtgatgaaggccctgtggaagcaccagttcgcctggcccttcagacagcccgtggacgccgtgaagctgggcctgcccgactaccacaagatcatcaagcagcccatggacatgggcaccatcaagagaagactggagaacaactactactgggccgccagcgagtgcatgcaggacttcaacaccatgttcaccaactgctacatctacaacaagcccaccgacgacatcgtgctgatggcccagaccctggagaagatcttcctgcagaaggtggccagcatgccccaggaggagcaggagctggtggtgaccatccccaagaacagccacaagaagggcgccaagctggccgccctgcagggcagcgtgaccagcgcccaccaggtgcccgccgtgagcagcgtgagccacaccgccctgtacacccccccccccgagatccccaccaccgtgctgaacatcccccaccccagcgtgatcagcagccccctgctgaagagcctgcacagcgccggcccccccctgctggccgtgaccgccgccccccccgcccagcccctggccaagaagaagggcgtgaagagaaaggccgacaccaccacccccacccccaccgccatcctgtag

SEQ ID NO: 74605 - DNA, 2406 bp, synthetic construct
  misc_feature 1..2406: note = Description of Artificial Sequence: Synthetic coding sequence
  source 1..2406: mol_type = other DNA
atgctgcagaacgtgaccccccacaacaagctgcccggcgagggcaacgccggcctgctgggcctgggccccgaggccgccgcccccggcaagagaatcagaaagcccagcctgctgtacgagggcttcgagagccccaccatggccagcgtgcccgccctgcagctgacccccgccaacccccccccccccgaggtgagcaaccccaagaagcccggcagagtgaccaaccagctgcagtacctgcacaaggtggtgatgaaggccctgtggaagcaccagttcgcctggcccttcagacagcccgtggacgccgtgaagctgggcctgcccgactaccacaagatcatcaagcagcccatggacatgggcaccatcaagagaagactggagaacaactactactgggccgccagcgagtgcatgcaggacttcaacaccatgttcaccaactgctacatctacaacaagcccaccgacgacatcgtgctgatggcccagaccctggagaagatcttcctgcagaaggtggccagcatgccccaggaggagcaggagctggtggtgaccatccccaagaacagccacaagaagggcgccaagctggccgccctgcagggcagcgtgaccagcgcccaccaggtgcccgccgtgagcagcgtgagccacaccgccctgtacacccccccccccgagatccccaccaccgtgttcaacatcccccaccccagcgtgatcagcagccccctgctgaagagcctgcacagcgccggcccccccctgctggccgtgaccgccgccccccccgcccagcccctggccaagaagaagggcgtgaagagaaaggccgacaccaccacccccacccccaccgccatcctggcccccggcagccccgccagcccccccggcagcctggagcccaaggccgccagactgccccccatgagaagagagagcggcagacccatcaagccccccagaaaggacctgcccgacagccagcagcagcaccagagcagcaagaagggcaagctgagcgagcagctgaagcactgcaacggcatcctgaaggagctgctgagcaagaagcacgccgcctacgcctggcccttctacaagcccgtggacgccagcgccctgggcctgcacgactaccacgacatcatcaagcaccccatggacctgagcaccgtgaagagaaagatggagaacagagactacagagacgcccaggagttcgccgccgacgtgagactgatgttcagcaactgctacaagtacaacccccccgaccacgacgtggtggccatggccagaaagctgcaggacgtgttcgagttcagatacgccaagatgcccgacgagcccctggagcccggccccctgcccgtgagcaccgccatgccccccggcctggccaagagcagcagcgagagcagcagcgaggagagcagcagcgagagcagcagcgaggaggaggaggaggaggacgaggaggacgaggaggaggaggagagcgagagcagcgacagcgaggaggagagagcccacagactggccgagctgcaggagcagctgagagccgtgcacgagcagctggccgccctgagccagggccccatcagcaagcccaagagaaagagagagaagaaggagaagaagaagaagagaaaggccgagaagcacagaggcagagccggcgccgacgaggacgacaagggccccagagcccccagacccccccagcccaagaagagcaagaaggccagcggcagcggcggcggcagcgccgccctgggccccagcggcttcggccccagcggcggcagcggcaccaagctgcccaagaaggccaccaagaccgccccccccgccctgcccaccggctacgacagcgaggaggaggaggagagcagacccatgagctacgacgagaagagacagctgagcctggacatcaacaagctgcccggcgagaagctgggcagagtggtgcacatcatccaggccagagagcccagcctgagagacagcaaccccgaggagatcgagatcgacttcgagaccctgaagcccagcaccctgagagagctggagagatacgtgctgagctgcctgagaaagaagcccagaaagccctacaccatcaagaagcccgtgggcaagaccaaggaggagctggccctggagaagaagagagagctggagaagagactgcaggacgtgagcggccagctgaacagcaccaagaagccccccaagaaggccaacgagaagaccgagagcagcagcgcccagcaggtggccgtgagcagactgagcgccagcagcagcagcagcgacagcagcagcagcagcagcagcagcagcagcagcgacaccagcgacagcgacagcggctag

SEQ ID NO: 74606 - DNA, 1842 bp, synthetic construct
  misc_feature 1..1842: note = Description of Artificial Sequence: Synthetic coding sequence
  source 1..1842: mol_type = other DNA
atgctgcagaacgtgaccccccacaacaagctgcccggcgagggcaacgccggcctgctgggcctgggccccgaggccgccgcccccggcaagagaatcagaaagcccagcctgctgtacgagggcttcgagagccccaccatggccagcgtgcccgccctgcagctgacccccgccaacccccccccccccgaggtgagcaaccccaagaagcccggcagagtgaccaaccagctgcagtacctgcacaaggtggtgatgaaggccctgtggaagcaccagttcgcctggcccttcagacagcccgtggacgccgtgaagctgggcctgcccgactaccacaagatcatcaagcagcccatggacatgggcaccatcaagagaagactggagaacaactactactgggccgccagcgagtgcatgcaggacttcaacaccatgttcaccaactgctacatctacaacaagcccaccgacgacatcgtgctgatggcccagaccctggagaagatcttcctgcagaaggtggccagcatgccccaggaggagcaggagctggtggtgaccatccccaagaacagccacaagaagggcgccaagctggccgccctgcagggcagcgtgaccagcgcccaccaggtgcccgccgtgagcagcgtgagccacaccgccctgtacacccccccccccgagatccccaccaccgtgctgaacatcccccaccccagcgtgatcagcagccccctgctgaagagcctgcacagcgccggcccccccctgctggccgtgaccgccgccccccccgcccagcccctggccaagaagaagggcgtgaagagaaaggccgacaccaccacccccacccccaccgccatcctggcccccggcagccccgccagcccccccggcagcctggagcccaaggccgccagactgccccccatgagaagagagagcggcagacccatcaagccccccagaaaggacctgcccgacagccagcagcagcaccagagcagcaagaagggcaagctgagcgagcagctgaagcactgcaacggcatcctgaaggagctgctgagcaagaagcacgccgcctacgcctggcccttctacaagcccgtggacgccagcgccctgggcctgcacgactaccacgacatcatcaagcaccccatggacctgagcaccgtgaagagaaagatggagaacagagactacagagacgcccaggagttcgccgccgacgtgagactgatgttcagcaactgctacaagtacaacccccccgaccacgacgtggtggccatggccagaaagctgcaggacgtgttcgagttcagatacgccaagatgcccgacgagcccctggagcccggccccctgcccgtgagcaccgccatgccccccggcctggccaagagcagcagcgagagcagcagcgaggagagcagcagcgagagcagcagcgaggaggaggaggaggaggacgaggaggacgaggaggaggaggagagcgagagcagcgacagcgaggaggagagagcccacagactggccgagctgcaggagcagctgagagccgtgcacgagcagctggccgccctgagccagggccccatcagcaagcccaagagaaagagagagaagaaggagaagaagaagaagagaaaggccgagaagcacagaggcagagccggcgccgacgaggacgacaagggccccagagcccccagacccccccagcccaagaagagcaagaaggccagcggcagcggcggcggcagcgccgccctgggccccagcggcttcggccccagcggcggcagcggcacctag

SEQ ID NO: 74607 - DNA, 1842 bp, synthetic construct; identical to SEQ ID NO: 74606
  misc_feature 1..1842: note = Description of Artificial Sequence: Synthetic coding sequence
  source 1..1842: mol_type = other DNA

SEQ ID NO: 74608 - DNA, 987 bp, synthetic construct
  misc_feature 1..987: note = Description of Artificial Sequence: Synthetic coding sequence
  source 1..987: mol_type = other DNA
tgagccaagagcagcagcgagagcagcagcgaggagagcagcagcgagagcagcagcgaggaggaggaggaggaggacgaggacgaggaggaggaggagagcgagagcagcgacagcgaggaggagagagcccacagactggccgagctgcaggagcagctgagagccgtgcacgagcagctggccgccctgagccagggccccatcagcaagcccaagagaaagagagagaagaaggagaagaagaagaagagaaaggccgagaagcacagaggcagagccggcgccgacgaggacgacaagggccccagagcccccagacccccccagcccaagaagagcaagaaggccagcggcagcggcggcggcagcgccgccctgggccccagcggcttcggccccagcggcggcagcggcaccaagctgcccaagaaggccaccaagaccgccccccccgccctgcccaccggctacgacagcgaggaggaggaggagagcagacccatgagctacgacgagaagagacagctgagcctggacatcaacaagctgcccggcgagaagctgggcagagtggtgcacatcatccaggccagagagcccagcctgagagacagcaaccccgaggagatcgagatcgacttcgagaccctgaagcccagcaccctgagagagctggagagatacgtgctgagctgcctgagaaagaagcccagaaagccctacaccatcaagaagcccgtgggcaagaccaaggaggagctggccctggagaagaagagagagctggagaagagactgcaggacgtgagcggccagctgaacagcaccaagaagccccccaagaaggccaacgagaagaccgagagcagcagcgcccagcaggtggccgtgagcagactgagcgccagcagcagcagcagcgacagcagcagcagcagcagcagcagcagcagcagcgacaccagcgacagcgacagcggctag

SEQ ID NO: 74609 - DNA, 1947 bp, synthetic construct
  misc_feature 1..1947: note = Description of Artificial Sequence: Synthetic coding sequence
  source 1..1947: mol_type = other DNA
atgctgcagaacgtgaccccccacaacaagctgcccggcgagggcaacgccggcctgctgggcctgggccccgaggccgccgcccccggcaagagaatcagaaagcccagcctgctgtacgagggcttcgagagccccaccatggccagcgtgcccgccctgcagctgacccccgccaacccccccccccccgaggtgagcaaccccaagaagcccggcagagtgaccaaccagctgcagtacctgcacaaggtggtgatgaaggccctgtggaagcaccagttcgcctggcccttcagacagcccgtggacgccgtgaagctgggcctgcccgactaccacaagatcatcaagcagcccatggacatgggcaccatcaagagaagactggagaacaactactactgggccgccagcgagtgcatgcaggacttcaacaccatgttcaccaactgctacatctacaacaagcccaccgacgacatcgtgctgatggcccagaccctggagaagatcttcctgcagaaggtggccagcatgccccaggaggagcaggagctggtggtgaccatccccaagaacagccacaagaagggcgccaagctggccgccctgcagggcagcgtgaccagcgcccaccaggtgcccgccgtgagcagcgtgagccacaccgccctgtacacccccccccccgagatccccaccaccgtgctgaacatcccccaccccagcgtgatcagcagccccctgctgaagagcctgcacagcgccggcccccccctgctggccgtgaccgccgccccccccgcccagcccctggccaagaagaagggcgtgaagagaaaggccgacaccaccacccccacccccaccgccatcctggcccccggcagccccgccagcccccccggcagcctggagcccaaggccgccagactgccccccatgagaagagagagcggcagacccatcaagccccccagaaaggacctgcccgacagccagcagcagcaccagagcagcaagaagggcaagctgagcgagcagctgaagcactgcaacggcatcctgaaggagctgctgagcaagaagcacgccgcctacgcctggcccttctacaagcccgtggacgccagcgccctgggcctgcacgactaccacgacatcatcaagcaccccatggacctgagcaccgtgaagagaaagatggagaacagagactacagagacgcccaggagttcgccgccgacgtgagactgatgttcagcaactgctacaagtacaacccccccgaccacgacgtggtggccatggccagaaagctgcaggacgtgttcgagttcagatacgccaagatgcccgacgagcccctggagcccggccccctgcccgtgagcaccgccatgccccccggcctggccaagagcagcagcgagagcagcagcgaggagagcagcagcgagagcagcagcgaggaggaggaggaggaggacgaggaggacgaggaggaggaggagagcgagagcagcgacagcgaggaggagagagcccacagactggccgagctgcaggagcagctgagagccgtgcacgagcagctggccgccctgagccagggccccatcagcaagcccaagagaaagagagagaagaaggagaagaagaagaagagaaaggccgagaagcacagaggcagagccggcgccgacgaggacgacaagggccccagagcccccagacccccccagcccaagaagagcaagaaggccagcggcagcggcggcggcagcgccgccctgggccccagcggcttcggccccagcggcggcagcggcaccaagctgcaggccggcgtgcagtggagagacctgggcctgctgcagccccccctgctgggcttcaagagattcagctgcctgagcctgcccagcagccaggactactag

SEQ ID NO: 74610 - DNA, 2424 bp, synthetic construct
  misc_feature 1..2424: note = Description of Artificial Sequence: Synthetic coding sequence
  source 1..2424: mol_type = other DNA
tgaaacggcggcggcggcagcgccaccgccagaggcggcgagtacagactgcccggcgagggcaacgccggcctgctgggcctgggccccgaggccgccgcccccggcaagagaatcagaaagcccagcctgctgtacgagggcttcgagagccccaccatggccagcgtgcccgccctgcagctgacccccgccaacccccccccccccgaggtgagcaaccccaagaagcccggcagagtgaccaaccagctgcagtacctgcacaaggtggtgatgaaggccctgtggaagcaccagttcgcctggcccttcagacagcccgtggacgccgtgaagctgggcctgcccgactaccacaagatcatcaagcagcccatggacatgggcaccatcaagagaagactggagaacaactactactgggccgccagcgagtgcatgcaggacttcaacaccatgttcaccaactgctacatctacaacaagcccaccgacgacatcgtgctgatggcccagaccctggagaagatcttcctgcagaaggtggccagcatgccccaggaggagcaggagctggtggtgaccatccccaagaacagccacaagaagggcgccaagctggccgccctgcagggcagcgtgaccagcgcccaccaggtgcccgccgtgagcagcgtgagccacaccgccctgtacacccccccccccgagatccccaccaccgtgttcaacatcccccaccccagcgtgatcagcagccccctgctgaagagcctgcacagcgccggcccccccctgctggccgtgaccgccgccccccccgcccagcccctggccaagaagaagggcgtgaagagaaaggccgacaccaccacccccacccccaccgccatcctggcccccggcagccccgccagcccccccggcagcctggagcccaaggccgccagactgccccccatgagaagagagagcggcagacccatcaagccccccagaaaggacctgcccgacagccagcagcagcaccagagcagcaagaagggcaagctgagcgagcagctgaagcactgcaacggcatcctgaaggagctgctgagcaagaagcacgccgcctacgcctggcccttctacaagcccgtggacgccagcgccctgggcctgcacgactaccacgacatcatcaagcaccccatggacctgagcaccgtgaagagaaagatggagaacagagactacagagacgcccaggagttcgccgccgacgtgagactgatgttcagcaactgctacaagtacaacccccccgaccacgacgtggtggccatggccagaaagctgcaggacgtgttcgagttcagatacgccaagatgcccgacgagcccctggagcccggccccctgcccgtgagcaccgccatgccccccggcctggccaagagcagcagcgagagcagcagcgaggagagcagcagcgagagcagcagcgaggaggaggaggaggaggacgaggaggacgaggaggaggaggagagcgagagcagcgacagcgaggaggagagagcccacagactggccgagctgcaggagcagctgagagccgtgcacgagcagctggccgccctgagccagggccccatcagcaagcccaagagaaagagagagaagaaggagaagaagaagaagagaaaggccgagaagcacagaggcagagccggcgccgacgaggacgacaagggccccagagcccccagacccccccagcccaagaagagcaagaaggccagcggcagcggcggcggcagcgccgccctgggccccagcggcttcggccccagcggcggcagcggcaccaagctgcccaagaaggccaccaagaccgccccccccgccctgcccaccggctacgacagcgaggaggaggaggagagcagacccatgagctacgacgagaagagacagctgagcctggacatcaacaagctgcccggcgagaagctgggcagagtggtgcacatcatccaggccagagagcccagcctgagagacagcaaccccgaggagatcgagatcgacttcgagaccctgaagcccagcaccctgagagagctggagagatacgtgctgagctgcctgagaaagaagcccagaaagccctacaccatcaagaagcccgtgggcaagaccaaggaggagctggccctggagaagaagagagagctggagaagagactgcaggacgtgagcggccagctgaacagcaccaagaagccccccaagaaggccaacgagaagaccgagagcagcagcgcccagcaggtggccgtgagcagactgagcgccagcagcagcagcagcgacagcagcagcagcagcagcagcagcagcagcagcgacaccagcgacagcgacagcggctag

SEQ ID NO: 74611 - DNA, 891 bp, synthetic construct
  misc_feature 1..891: note = Description of Artificial Sequence: Synthetic coding sequence
  source 1..891: mol_type = other DNA
tgaagacccctgggcgtgcagcagcccggcgccagactgcccggcgagggcaacgccggcctgctgggcctgggccccgaggccgccgcccccggcaagagaatcagaaagcccagcctgctgtacgagggcttcgagagccccaccatggccagcgtgcccgccctgcagctgacccccgccaacccccccccccccgaggtgagcaaccccaagaagcccggcagagtgaccaaccagctgcagtacctgcacaaggtggtgatgaaggccctgtggaagcaccagttcgcctggcccttcagacagcccgtggacgccgtgaagctgggcctgcccgactaccacaagatcatcaagcagcccatggacatgggcaccatcaagagaagactggagaacaactactactgggccgccagcgagtgcatgcaggacttcaacaccatgttcaccaactgctacatctacaacaagcccaccgacgacatcgtgctgatggcccagaccctggagaagatcttcctgcagaaggtggccagcatgccccaggaggagcaggagctggtggtgaccatccccaagaacagccacaagaagggcgccaagctggccgccctgcagggcagcgtgaccagcgcccaccaggtgcccgccgtgagcagcgtgagccacaccgccctgtacacccccccccccgagatccccaccaccgtgttcaacatcccccaccccagcgtgatcagcagccccctgctgaagagcctgcacagcgccggcccccccctgctggccgtgaccgccgccccccccgcccagcccctggccaagaagaagggcgtgaagagaaaggccgacaccaccacccccacccccaccgccatcctgtag

SEQ ID NO: 74612 - DNA, 2265 bp, synthetic construct
  misc_feature 1..2265: note = Description of Artificial Sequence: Synthetic coding sequence
  source 1..2265: mol_type = other DNA
atggccagcgtgcccgccctgcagctgacccccgccaacccccccccccccgaggtgagcaaccccaagaagcccggcagagtgaccaaccagctgcagtacctgcacaaggtggtgatgaaggccctgtggaagcaccagttcgcctggcccttcagacagcccgtggacgccgtgaagctgggcctgcccgactaccacaagatcatcaagcagcccatggacatgggcaccatcaagagaagactggagaacaactactactgggccgccagcgagtgcatgcaggacttcaacaccatgttcaccaactgctacatctacaacaagcccaccgacgacatcgtgctgatggcccagaccctggagaagatcttcctgcagaaggtggccagcatgccccaggaggagcaggagctggtggtgaccatccccaagaacagccacaagaagggcgccaagctggccgccctgcagggcagcgtgaccagcgcccaccaggtgcccgccgtgagcagcgtgagccacaccgccctgtacacccccccccccgagatccccaccaccgtgctgaacatcccccaccccagcgtgatcagcagccccctgctgaagagcctgcacagcgccggcccccccctgctggccgtgaccgccgccccccccgcccagcccctggccaagaagaagggcgtgaagagaaaggccgacaccaccacccccacccccaccgccatcctggcccccggcagccccgccagcccccccggcagcctggagcccaaggccgccagactgccccccatgagaagagagagcggcagacccatcaagccccccagaaaggacctgcccgacagccagcagcagcaccagagcagcaagaagggcaagctgagcgagcagctgaagcactgcaacggcatcctgaaggagctgctgagcaagaagcacgccgcctacgcctggcccttctacaagcccgtggacgccagcgccctgggcctgcacgactaccacgacatcatcaagcaccccatggacctgagcaccgtgaagagaaagatggagaacagagactacagagacgcccaggagttcgccgccgacgtgagactgatgttcagcaactgctacaagtacaacccccccgaccacgacgtggtggccatggccagaaagctgcaggacgtgttcgagttcagatacgccaagatgcccgacgagcccctggagcccggccccctgcccgtgagcaccgccatgccccccggcctggccaagagcagcagcgagagcagcagcgaggagagcagcagcgagagcagcagcgaggaggaggaggaggaggacgaggaggacgaggaggaggaggagagcgagagcagcgacagcgaggaggagagagcccacagactggccgagctgcaggagcagctgagagccgtgcacgagcagctggccgccctgagccagggccccatcagcaagcccaagagaaagagagagaagaaggagaagaagaagaagagaaaggccgagaagcacagaggcagagccggcgccgacgaggacgacaagggccccagagcccccagacccccccagcccaagaagagcaagaaggccagcggcagcggcggcggcagcgccgccctgggccccagcggcttcggccccagcggcggcagcggcaccaagctgcccaagaaggccaccaagaccgccccccccgccctgcccaccggctacgacagcgaggaggaggaggagagcagacccatgagctacgacgagaagagacagctgagcctggacatcaacaagctgcccggcgagaagctgggcagagtggtgcacatcatccaggccagagagcccagcctgagagacagcaaccccgaggagatcgagatcgacttcgagaccctgaagcccagcaccctgagagagctggagagatacgtgctgagctgcctgagaaagaagcccagaaagccctacaccatcaagaagcccgtgggcaagaccaaggaggagctggccctggagaagaagagagagctggagaagagactgcaggacgtgagcggccagctgaacagcaccaagaagccccccaagaaggccaacgagaagaccgagagcagcagcgcccagcaggtggccgtgagcagactgagcgccagcagcagcagcagcgacagcagcagcagcagcagcagcagcagcagcagcgacaccagcgacagcgacagcggctag

SEQ ID NO: 74613 - DNA, 2406 bp, synthetic construct; identical to SEQ ID NO: 74596
  misc_feature 1..2406: note = Description of Artificial Sequence: Synthetic coding sequence
  source 1..2406: mol_type = other DNA

SEQ ID NO: 74614 - DNA, 2424 bp, synthetic construct
  misc_feature 1..2424: note = Description of Artificial Sequence: Synthetic coding sequence
  source 1..2424: mol_type = other DNA
tgaaacggcggcggcggcagcgccaccgccagaggcggcgagtacagactgcccggcgagggcaacgccggcctgctgggcctgggccccgaggccgccgcccccggcaagagaatcagaaagcccagcctgctgtacgagggcttcgagagccccaccatggccagcgtgcccgccctgcagctgacccccgccaacccccccccccccgaggtgagcaaccccaagaagcccggcagagtgaccaaccagctgcagtacctgcacaaggtggtgatgaaggccctgtggaagcaccagttcgcctggcccttcagacagcccgtggacgccgtgaagctgggcctgcccgactaccacaagatcatcaagcagcccatggacatgggcaccatcaagagaagactggagaacaactactactgggccgccagcgagtgcatgcaggacttcaacaccatgttcaccaactgctacatctacaacaagcccaccgacgacatcgtgctgatggcccagaccctggagaagatcttcctgcagaaggtggccagcatgccccaggaggagcaggagctggtggtgaccatccccaagaacagccacaagaagggcgccaagctggccgccctgcagggcagcgtgaccagcgcccaccaggtgcccgccgtgagcagcgtgagccacaccgccctgtacacccccccccccgagatccccaccaccgtgctgaacatcccccaccccagcgtgatcagcagccccctgctgaagagcctgcacagcgccggcccccccctgctggccgtgaccgccgccccccccgcccagcccctggccaagaagaagggcgtgaagagaaaggccgacaccaccacccccacccccaccgccatcctggcccccggcagccccgccagcccccccggcagcctggagcccaaggccgccagactgccccccatgagaagagagagcggcagacccatcaagccccccagaaaggacctgcccgacagccagcagcagcaccagagcagcaagaagggcaagctgagcgagcagctgaagcactgcaacggcatcctgaaggagctgctgagcaagaagcacgccgcctacgcctggcccttctacaagcccgtggacgccagcgccctgggcctgcacgactaccacgacatcatcaagcaccccatggacctgagcaccgtgaagagaaagatggagaacagagactacagagacgcccaggagttcgccgccgacgtgagactgatgttcagcaactgctacaagtacaacccccccgaccacgacgtggtggccatggccagaaagctgcaggacgtgttcgagttcagatacgccaagatgcccgacgagcccctggagcccggccccctgcccgtgagcaccgccatgccccccggcctggccaagagcagcagcgagagcagcagcgaggagagcagcagcgagagcagcagcgaggaggaggaggaggaggacgaggaggacgaggaggaggaggagagcgagagcagcgacagcgaggaggagagagcccacagactggccgagctgcaggagcagctgagagccgtgcacgagcagctggccgccctgagccagggccccatcagcaagcccaagagaaagagagagaagaaggagaagaagaagaagagaaaggccgagaagcacagaggcagagccggcgccgacgaggacgacaagggccccagagcccccagacccccccagcccaagaagagcaagaaggccagcggcagcggcggcggcagcgccgccctgggccccagcggcttcggccccagcggcggcagcggcaccaagctgcccaagaaggccaccaagaccgccccccccgccctgcccaccggctacgacagcgaggaggaggaggagagcagacccatgagctacgacgagaagagacagctgagcctggacatcaacaagctgcccggcgagaagctgggcagagtggtgcacatcatccaggccagagagcccagcctgagagacagcaaccccgaggagatcgagatcgacttcgagaccctgaagcccagcaccctgagagagctggagagatacgtgctgagctgcctgagaaagaagcccagaaagccctacaccatcaagaagcccgtgggcaagaccaaggaggagctggccctggagaagaagagagagctggagaagagactgcaggacgtgagcggccagctgaacagcaccaagaagccccccaagaaggccaacgagaagaccgagagcagcagcgcccagcaggtggccgtgagcagactgagcgccagcagcagcagcagcgacagcagcagcagcagcagcagcagcagcagcagcgacaccagcgacagcgacagcggctag

SEQ ID NO: 74615 - DNA, 1092 bp, synthetic construct
  misc_feature 1..1092: note = Description of Artificial Sequence: Synthetic coding sequence
  source 1..1092: mol_type = other DNA
tgagccaagagcagcagcgagagcagcagcgaggagagcagcagcgagagcagcagcgaggaggaggaggaggaggacgaggacgaggaggaggaggagagcgagagcagcgacagcgaggaggagagagcccacagactggccgagctgcaggagcagctgagagccgtgcacgagcagctggccgccctgagccagggccccatcagcaagcccaagagaaagagagagaagaaggagaagaagaagaagagaaaggccgagaagcacagaggcagagccggcgccgacgaggacgacaagggccccagagcccccagacccccccagcccaagaagagcaagaaggccagcggcagcggcggcggcagcgccgccctgggccccagcggcttcggccccagcggcggcagcggcaccaagctgcaggccggcgtgcagtggagagacctgggcctgctgcagccccccctgctgggcttcaagagattcagctgcctgagcctgcccagcagccaggactacagactgcccaagaaggccaccaagaccgccccccccgccctgcccaccggctacgacagcgaggaggaggaggagagcagacccatgagctacgacgagaagagacagctgagcctggacatcaacaagctgcccggcgagaagctgggcagagtggtgcacatcatccaggccagagagcccagcctgagagacagcaaccccgaggagatcgagatcgacttcgagaccctgaagcccagcaccctgagagagctggagagatacgtgctgagctgcctgagaaagaagcccagaaagccctacaccatcaagaagcccgtgggcaagaccaaggaggagctggccctggagaagaagagagagctggagaagagactgcaggacgtgagcggccagctgaacagcaccaagaagccccccaagaaggccaacgagaagaccgagagcagcagcgcccagcaggtggccgtgagcagactgagcgccagcagcagcagcagcgacagcagcagcagcagcagcagcagcagcagcagcgacaccagcgacagcgacagcggctag

SEQ ID NO: 74616 - DNA, 2511 bp, synthetic construct; identical to SEQ ID NO: 74599
  misc_feature 1..2511: note = Description of Artificial Sequence: Synthetic coding sequence
  source 1..2511: mol_type = other DNA

SEQ ID NO: 74617 - DNA, 2046 bp, synthetic construct
  misc_feature 1..2046: note = Description of Artificial Sequence: Synthetic coding sequence
  source 1..2046: mol_type = other DNA
atggacatgggcaccatcaagagaagactggagaacaactactactgggccgccagcgagtgcatgcaggacttcaacaccatgttcaccaactgctacatctacaacaagcccaccgacgacatcgtgctgatggcccagaccctggagaagatcttcctgcagaaggtggccagcatgccccaggaggagcaggagctggtggtgaccatccccaagaacagccacaagaagggcgccaagctggccgccctgcagggcagcgtgaccagcgcccaccaggtgcccgccgtgagcagcgtgagccacaccgccctgtacacccccccccccgagatccccaccaccgtgctgaacatcccccaccccagcgtgatcagcagccccctgctgaagagcctgcacagcgccggcccccccctgctggccgtgaccgccgccccccccgcccagcccctggccaagaagaagggcgtgaagagaaaggccgacaccaccacccccacccccaccgccatcctggcccccggcagccccgccagcccccccggcagcctggagcccaaggccgccagactgccccccatgagaagagagagcggcagacccatcaagccccccagaaaggacctgcccgacagccagcagcagcaccagagcagcaagaagggcaagctgagcgagcagctgaagcactgcaacggcatcctgaaggagctgctgagcaagaagcacgccgcctacgcctggcccttctacaagcccgtggacgccagcgccctgggcctgcacgactaccacgacatcatcaagcaccccatggacctgagcaccgtgaagagaaagatggagaacagagactacagagacgcccaggagttcgccgccgacgtgagactgatgttcagcaactgctacaagtacaacccccccgaccacgacgtggtggccatggccagaaagctgcaggacgtgttcgagttcagatacgccaagatgcccgacgagcccctggagcccggccccctgcccgtgagcaccgccatgccccccggcctggccaagagcagcagcgagagcagcagcgaggagagcagcagcgagagcagcagcgaggaggaggaggaggaggacgaggaggacgaggaggaggaggagagcgagagcagcgacagcgaggaggagagagcccacagactggccgagctgcaggagcagctgagagccgtgcacgagcagctggccgccctgagccagggccccatcagcaagcccaagagaaagagagagaagaaggagaagaagaagaagagaaaggccgagaagcacagaggcagagccggcgccgacgaggacgacaagggccccagagcccccagacccccccagcccaagaagagcaagaaggccagcggcagcggcggcggcagcgccgccctgggccccagcggcttcggccccagcggcggcagcggcaccaagctgcccaagaaggccaccaagaccgccccccccgccctgcccaccggctacgacagcgaggaggaggaggagagcagacccatgagctacgacgagaagagacagctgagcctggacatcaacaagctgcccggcgagaagctgggcagagtggtgcacatcatccaggccagagagcccagcctgagagacagcaaccccgaggagatcgagatcgacttcgagaccctgaagcccagcaccctgagagagctggagagatacgtgctgagctgcctgagaaagaagcccagaaagccctacaccatcaagaagcccgtgggcaagaccaaggaggagctggccctggagaagaagagagagctggagaagagactgcaggacgtgagcggccagctgaacagcaccaagaagccccccaagaaggccaacgagaagaccgagagcagcagcgcccagcaggtggccgtgagcagactgagcgccagcagcagcagcagcgacagcagcagcagcagcagcagcagcagcagcagcgacaccagcgacagcgacagcggctag

SEQ ID NO: 74618 - DNA, 2424 bp, synthetic construct; identical to SEQ ID NO: 74614
  misc_feature 1..2424: note = Description of Artificial Sequence: Synthetic coding sequence
  source 1..2424: mol_type = other DNA

SEQ ID NO: 74619 - DNA, 987 bp, synthetic construct; identical to SEQ ID NO: 74608
  misc_feature 1..987: note = Description of Artificial Sequence: Synthetic coding sequence
  source 1..987: mol_type = other DNA

SEQ ID NO: 74620 - DNA, 2511 bp, synthetic construct; identical to SEQ ID NO: 74599
  misc_feature 1..2511: note = Description of Artificial Sequence: Synthetic coding sequence
  source 1..2511: mol_type = other DNA

SEQ ID NO: 74621 - DNA, 2424 bp, synthetic construct; identical to SEQ ID NO: 74614
  misc_feature 1..2424: note = Description of Artificial Sequence: Synthetic coding sequence
  source 1..2424: mol_type = other DNA

SEQ ID NO: 74622 - DNA, 2265 bp, synthetic construct; identical to SEQ ID NO: 74612
  misc_feature 1..2265: note = Description of Artificial Sequence: Synthetic coding sequence
  source 1..2265: mol_type = other DNA

SEQ ID NO: 74623 - DNA, 2406 bp, synthetic construct; identical to SEQ ID NO: 74605
  misc_feature 1..2406: note = Description of Artificial Sequence: Synthetic coding sequence
  source 1..2406: mol_type = other DNA

SEQ ID NO: 74624 - DNA, 891 bp, synthetic construct; identical to SEQ ID NO: 74604
  misc_feature 1..891: note = Description of Artificial Sequence: Synthetic coding sequence
  source 1..891: mol_type = other DNA

SEQ ID NO: 74625 - DNA, 2511 bp, synthetic construct
  misc_feature 1..2511: note = Description of Artificial Sequence: Synthetic coding sequence
  source 1..2511: mol_type = other DNA
atgctgcagaacgtgaccccccacaacaagctgcccggcgagggcaacgccggcctgctgggcctgggccccgaggccgccgcccccggcaagagaatcagaaagcccagcctgctgtacgagggcttcgagagccccaccatggccagcgtgcccgccctgcagctgacccccgccaacccccccccccccgaggtgagcaaccccaagaagcccggcagagtgaccaaccagctgcagtacctgcacaaggtggtgatgaaggccctgtggaagcaccagttcgcctggcccttcagacagcccgtggacgccgtgaagctgggcctgcccgactaccacaagatcatcaagcagcccatggacatgggcaccatcaagagaagactggagaacaactactactgggccgccagcgagtgcatgcaggacttcaacaccatgttcaccaactgctacatctacaacaagcccaccgacgacatcgtgctgatggcccagaccctggagaagatcttcctgcagaaggtggccagcatgccccaggaggagcaggagctggtggtgaccatccccaagaacagccacaagaagggcgccaagctggccgccctgcagggcagcgtgaccagcgcccaccaggtgcccgccgtgagcagcgtgagccacaccgccctgtacacccccccccccgagatccccaccaccgtgttcaacatcccccaccccagcgtgatcagcagccccctgctgaagagcctgcacagcgccggcccccccctgctggccgtgaccgccgccccccccgcccagcccctggccaagaagaagggcgtgaagagaaaggccgacaccaccacccccacccccaccgccatcctggcccccggcagccccgccagcccccccggcagcctggagcccaaggccgccagactgccccccatgagaagagagagcggcagacccatcaagccccccagaaaggacctgcccgacagccagcagcagcaccagagcagcaagaagggcaagctgagcgagcagctgaagcactgcaacggcatcctgaaggagctgctgagcaagaagcacgccgcctacgcctggcccttctacaagcccgtggacgccagcgccctgggcctgcacgactaccacgacatcatcaagcaccccatggacctgagcaccgtgaagagaaagatggagaacagagactacagagacgcccaggagttcgccgccgacgtgagactgatgttcagcaactgctacaagtacaacccccccgaccacgacgtggtggccatggccagaaagctgcaggacgtgttcgagttcagatacgccaagatgcccgacgagcccctggagcccggccccctgcccgtgagcaccgccatgccccccggcctggccaagagcagcagcgagagcagcagcgaggagagcagcagcgagagcagcagcgaggaggaggaggaggaggacgaggaggacgaggaggaggaggagagcgagagcagcgacagcgaggaggagagagcccacagactggccgagctgcaggagcagctgagagccgtgcacgagcagctggccgccctgagccagggccccatcagcaagcccaagagaaagagagagaagaaggagaagaagaagaagagaaaggccgagaagcacagaggcagagccggcgccgacgaggacgacaagggccccagagcccccagacccccccagcccaagaagagcaagaaggccagcggcagcggcggcggcagcgccgccctgggccccagcggcttcggccccagcggcggcagcggcaccaagctgcaggccggcgtgcagtggagagacctgggcctgctgcagccccccctgctgggcttcaagagattcagctgcctgagcctgcccagcagccagaactacagactgcccaagaaggccaccaagaccgccccccccgccctgcccaccggctacgacagcgaggaggaggaggagagcagacccatgagctacgacgagaagagacagctgagcctggacatcaacaagctgcccggcgagaagctgggcagagtggtgcacatcatccaggccagagagcccagcctgagagacagcaaccccgaggagatcgagatcgacttcgagaccctgaagcccagcaccctgagagagctggagagatacgtgctgagctgcctgagaaagaagcccagaaagccctacaccatcaagaagcccgtgggcaagaccaaggaggagctggccctggagaagaagagagagctggagaagagactgcaggacgtgagcggccagctgaacagcaccaagaagccccccaagaaggccaacgagaagaccgagagcagcagcgcccagcaggtggccgtgagcagactgagcgccagcagcagcagcagcgacagcagcagcagcagcagcagcagcagcagcagcgacaccagcgacagcgacagcggctag

SEQ ID NO: 74626 - DNA, 987 bp, synthetic construct; identical to SEQ ID NO: 74608
  misc_feature 1..987: note = Description of Artificial Sequence: Synthetic coding sequence
  source 1..987: mol_type = other DNA

SEQ ID NO: 74627 - DNA, 891 bp, synthetic construct; identical to SEQ ID NO: 74604
  misc_feature 1..891: note = Description of Artificial Sequence: Synthetic coding sequence
  source 1..891: mol_type = other DNA

SEQ ID NO: 74628 - DNA, 891 bp, synthetic construct; identical to SEQ ID NO: 74604
  misc_feature 1..891: note = Description of Artificial Sequence: Synthetic coding sequence
  source 1..891: mol_type = other DNA

SEQ ID NO: 74629 - DNA, 1860 bp, synthetic construct
  misc_feature 1..1860: note = Description of Artificial Sequence: Synthetic coding sequence
  source 1..1860: mol_type = other DNA
tgaaacggcggcggcggcagcgccaccgccagaggcggcgagtacagactgcccggcgagggcaacgccggcctgctgggcctgggccccgaggccgccgcccccggcaagagaatcagaaagcccagcctgctgtacgagggcttcgagagccccaccatggccagcgtgcccgccctgcagctgacccccgccaacccccccccccccgaggtgagcaaccccaagaagcccggcagagtgaccaaccagctgcagtacctgcacaaggtggtgatgaaggccctgtggaagcaccagttcgcctggcccttcagacagcccgtggacgccgtgaagctgggcctgcccgactaccacaagatcatcaagcagcccatggacatgggcaccatcaagagaagactggagaacaactactactgggccgccagcgagtgcatgcaggacttcaacaccatgttcaccaactgctacatctacaacaagcccaccgacgacatcgtgctgatggcccagaccctggagaagatcttcctgcagaaggtggccagcatgccccaggaggagcaggagctggtggtgaccatccccaagaacagccacaagaagggcgccaagctggccgccctgcagggcagcgtgaccagcgcccaccaggtgcccgccgtgagcagcgtgagccacaccgccctgtacacccccccccccgagatccccaccaccgtgctgaacatcccccaccccagcgtgatcagcagccccctgctgaagagcctgcacagcgccggcccccccctgctggccgtgaccgccgccccccccgcccagcccctggccaagaagaagggcgtgaagagaaaggccgacaccaccacccccacccccaccgccatcctggcccccggcagccccgccagcccccccggcagcctggagcccaaggccgccagactgccccccatgagaagagagagcggcagacccatcaagccccccagaaaggacctgcccgacagccagcagcagcaccagagcagcaagaagggcaagctgagcgagcagctgaagcactgcaacggcatcctgaaggagctgctgagcaagaagcacgccgcctacgcctggcccttctacaagcccgtggacgccagcgccctgggcctgcacgactaccacgacatcatcaagcaccccatggacctgagcaccgtgaagagaaagatggagaacagagactacagagacgcccaggagttcgccgccgacgtgagactgatgttcagcaactgctacaagtacaacccccccgaccacgacgtggtggccatggccagaaagctgcaggacgtgttcgagttcagatacgccaagatgcccgacgagcccctggagcccggccccctgcccgtgagcaccgccatgccccccggcctggccaagagcagcagcgagagcagcagcgaggagagcagcagcgagagcagcagcgaggaggaggaggaggaggacgaggaggacgaggaggaggaggagagcgagagcagcgacagcgaggaggagagagcccacagactggccgagctgcaggagcagctgagagccgtgcacgagcagctggccgccctgagccagggccccatcagcaagcccaagagaaagagagagaagaaggagaagaagaagaagagaaaggccgagaagcacagaggcagagccggcgccgacgaggacgacaagggccccagagcccccagacccccccagcccaagaagagcaagaaggccagcggcagcggcggcggcagcgccgccctgggccccagcggcttcggccccagcggcggcagcggcacctag

SEQ ID NO: 74630 - DNA, 987 bp, synthetic construct; identical to SEQ ID NO: 74608
  misc_feature 1..987: note = Description of Artificial Sequence: Synthetic coding sequence
  source 1..987: mol_type = other DNA

SEQ ID NO: 74631 - DNA, 2046 bp, synthetic construct
  misc_feature 1..2046: note = Description of Artificial Sequence: Synthetic coding sequence
  source 1..2046: mol_type = other DNA
atggacatgggcaccatcaagagaagactggagaacaactactactgggccgccagcgagtgcatgcaggacttcaacaccatgttcaccaactgctacatctacaacaagcccaccgacgacatcgtgctgatggcccagaccctggagaagatcttcctgcagaaggtggccagcatgccccaggaggagcaggagctggtggtgaccatccccaagaacagccacaagaagggcgccaagctggccgccctgcagggcagcgtgaccagcgcccaccaggtgcccgccgtgagcagcgtgagccacaccgccctgtacacccccccccccgagatccccaccaccgtgttcaacatcccccaccccagcgtgatcagcagccccctgctgaagagcctgcacagcgccggcccccccctgctggccgtgaccgccgccccccccgcccagcccctggccaagaagaagggcgtgaagagaaaggccgacaccaccacccccacccccaccgccatcctggcccccggcagccccgccagcccccccggcagcctggagcccaaggccgccagactgccccccatgagaagagagagcggcagacccatcaagccccccagaaaggacctgcccgacagccagcagcagcaccagagcagcaagaagggcaagctgagcgagcagctgaagcactgcaacggcatcctgaaggagctgctgagcaagaagcacgccgcctacgcctggcccttctacaagcccgtggacgccagcgccctgggcctgcacgactaccacgacatcatcaagcaccccatggacctgagcaccgtgaagagaaagatggagaacagagactacagagacgcccaggagttcgccgccgacgtgagactgatgttcagcaactgctacaagtacaacccccccgaccacgacgtggtggccatggccagaaagctgcaggacgtgttcgagttcagatacgccaagatgcccgacgagcccctggagcccggccccctgcccgtgagcaccgccatgccccccggcctggccaagagcagcagcgagagcagcagcgaggagagcagcagcgagagcagcagcgaggaggaggaggaggaggacgaggaggacgaggaggaggaggagagcgagagcagcgacagcgaggaggagagagcccacagactggccgagctgcaggagcagctgagagccgtgcacgagcagctggccgccctgagccagggccccatcagcaagcccaagagaaagagagagaagaaggagaagaagaagaagagaaaggccgagaagcacagaggcagagccggcgccgacgaggacgacaagggccccagagcccccagacccccccagcccaagaagagcaagaaggccagcggcagcggcggcggcagcgccgccctgggccccagcggcttcggccccagcggcggcagcggcaccaagctgcccaagaaggccaccaagaccgccccccccgccctgcccaccggctacgacagcgaggaggaggaggagagcagacccatgagctacgacgagaagagacagctgagcctggacatcaacaagctgcccggcgagaagctgggcagagtggtgcacatcatccaggccagagagcccagcctgagagacagcaaccccgaggagatcgagatcgacttcgagaccctgaagcccagcaccctgagagagctggagagatacgtgctgagctgcctgagaaagaagcccagaaagccctacaccatcaagaagcccgtgggcaagaccaaggaggagctggccctggagaagaagagagagctggagaagagactgcaggacgtgagcggccagctgaacagcaccaagaagccccccaagaaggccaacgagaagaccgagagcagcagcgcccagcaggtggccgtgagcagactgagcgccagcagcagcagcagcgacagcagcagcagcagcagcagcagcagcagcagcgacaccagcgacagcgacagcggctag

SEQ ID NO: 74632 - DNA, 2265 bp, synthetic construct
  misc_feature 1..2265: note = Description of Artificial Sequence: Synthetic coding sequence
  source 1..2265: mol_type = other DNA
atggccagcgtgcccgccctgcagctgacccccgccaacccccccccccccgaggtgagcaaccccaagaagcccggcagagtgaccaaccagctgcagtacctgcacaaggtggtgatgaaggccctgtggaagcaccagttcgcctggcccttcagacagcccgtggacgccgtgaagctgggcctgcccgactaccacaagatcatcaagcagcccatggacatgggcaccatcaagagaagactggagaacaactactactgggccgccagcgagtgcatgcaggacttcaacaccatgttcaccaactgctacatctacaacaagcccaccgacgacatcgtgctgatggcccagaccctggagaagatcttcctgcagaaggtggccagcatgccccaggaggagcaggagctggtggtgaccatccccaagaacagccacaagaagggcgccaagctggccgccctgcagggcagcgtgaccagcgcccaccaggtgcccgccgtgagcagcgtgagccacaccgccctgtacacccccccccccgagatccccaccaccgtgttcaacatcccccaccccagcgtgatcagcagccccctgctgaagagcctgcacagcgccggcccccccctgctggccgtgaccgccgccccccccgcccagcccctggccaagaagaagggcgtgaagagaaaggccgacaccaccacccccacccccaccgccatcctggcccccggcagccccgccagcccccccggcagcctggagcccaaggccgccagactgccccccatgagaagagagagcggcagacccatcaagccccccagaaaggacctgcccgacagccagcagcagcaccagagcagcaagaagggcaagctgagcgagcagctgaagcactgcaacggcatcctgaaggagctgctgagcaagaagcacgccgcctacgcctggcccttctacaagcccgtggacgccagcgccctgggcctgcacgactaccacgacatcatcaagcaccccatggacctgagcaccgtgaagagaaagatggagaacagagactacagagacgcccaggagttcgccgccgacgtgagactgatgttcagcaactgctacaagtacaacccccccgaccacgacgtggtggccatggccagaaagctgcaggacgtgttcgagttcagatacgccaagatgcccgacgagcccctggagcccggccccctgcccgtgagcaccgccatgccccccggcctggccaagagcagcagcgagagcagcagcgaggagagcagcagcgagagcagcagcgaggaggaggaggaggaggacgaggaggacgaggaggaggaggagagcgagagcagcgacagcgaggaggagagagcccacagactggccgagctgcaggagcagctgagagccgtgcacgagcagctggccgccctgagccagggccccatcagcaagcccaagagaaagagagagaagaaggagaagaagaagaagagaaaggccgagaagcacagaggcagagccggcgccgacgaggacgacaagggccccagagcccccagacccccccagcccaagaagagcaagaaggccagcggcagcggcggcggcagcgccgccctgggccccagcggcttcggccccagcggcggcagcggcaccaagctgcccaagaaggccaccaagaccgccccccccgccctgcccaccggctacgacagcgaggaggaggaggagagcagacccatgagctacgacgagaagagacagctgagcctggacatcaacaagctgcccggcgagaagctgggcagagtggtgcacatcatccaggccagagagcccagcctgagagacagcaaccccgaggagatcgagatcgacttcgagaccctgaagcccagcaccctgagagagctggagagatacgtgctgagctgcctgagaaagaagcccagaaagccctacaccatcaagaagcccgtgggcaagaccaaggaggagctggccctggagaagaagagagagctggagaagagactgcaggacgtgagcggccagctgaacagcaccaagaagccccccaagaaggccaacgagaagaccgagagcagcagcgcccagcaggtggccgtgagcagactgagcgccagcagcagcagcagcgacagcagcagcagcagcagcagcagcagcagcagcgacaccagcgacagcgacagcggctag

SEQ ID NO: 74633 - DNA, 2511 bp, synthetic construct; identical to SEQ ID NO: 74599
  misc_feature 1..2511: note = Description of Artificial Sequence: Synthetic coding sequence
  source 1..2511: mol_type = other DNA

SEQ ID NO: 74634 - DNA, 2046 bp, synthetic construct; identical to SEQ ID NO: 74617
  misc_feature 1..2046: note = Description of Artificial Sequence: Synthetic coding sequence
  source 1..2046: mol_type = other DNA

SEQ ID NO: 74635 - DNA, 2511 bp, synthetic construct; identical to SEQ ID NO: 74599
  misc_feature 1..2511: note = Description of Artificial Sequence: Synthetic coding sequence
  source 1..2511: mol_type = other DNA

SEQ ID NO: 74636 - DNA, 2265 bp, synthetic construct; identical to SEQ ID NO: 74612
  misc_feature 1..2265: note = Description of Artificial Sequence: Synthetic coding sequence
  source 1..2265: mol_type = other DNA

SEQ ID NO: 74637 - DNA, 2046 bp, synthetic construct; identical to SEQ ID NO: 74617
  misc_feature 1..2046: note = Description of Artificial Sequence: Synthetic coding sequence
  source 1..2046: mol_type = other DNA

SEQ ID NO: 74638 - DNA, 2511 bp, synthetic construct; identical to SEQ ID NO: 74599
  misc_feature 1..2511: note = Description of Artificial Sequence: Synthetic coding sequence
  source 1..2511: mol_type = other DNA

SEQ ID NO: 74639 - DNA, 2511 bp, synthetic construct; identical to SEQ ID NO: 74625
  misc_feature 1..2511: note = Description of Artificial Sequence: Synthetic coding sequence
  source 1..2511: mol_type = other DNA

SEQ ID NO: 74640 - DNA, 2265 bp, synthetic construct; identical to SEQ ID NO: 74612
  misc_feature 1..2265: note = Description of Artificial Sequence: Synthetic coding sequence
  source 1..2265: mol_type = other DNA

SEQ ID NO: 74641 - DNA, 2406 bp, synthetic construct; identical to SEQ ID NO: 74596
  misc_feature 1..2406: note = Description of Artificial Sequence: Synthetic coding sequence
  source 1..2406: mol_type = other DNA

SEQ ID NO: 74642 - DNA, 2046 bp, synthetic construct; identical to SEQ ID NO: 74617
  misc_feature 1..2046: note = Description of Artificial Sequence: Synthetic coding sequence
  source 1..2046: mol_type = other DNA

SEQ ID NO: 74643 - DNA, 4089 bp, synthetic construct
  misc_feature 1..4089: note = Description of Artificial Sequence: Synthetic coding sequence
  source 1..4089: mol_type = other DNA
atgagcgccgagagcggccccggcaccagactgagaaacctgcccgtgatgggcgacggcctggagaccagccagatgagcaccacccaggcccaggcccagccccagcccgccaacgccgccagcaccaacccccccccccccgagaccagcaaccccaacaagcccaagagacagaccaaccagctgcagtacctgctgagagtggtgctgaagaccctgtggaagcaccagttcgcctggcccttccagcagcccgtggacgccgtgaagctgaacctgcccgactactacaagatcatcaagacccccatggacatgggcaccatcaagaagagactggagaacaactactactggaacgcccaggagtgcatccaggacttcaacaccatgttcaccaactgctacatctacaacaagcccggcgacgacatcgtgctgatggccgaggccctggagaagctgttcctgcagaagatcaacgagctgcccaccgaggagaccgagatcatgatcgtgcaggccaagggcagaggcagaggcagaaaggagaccggcaccgccaagcccggcgtgagcaccgtgcccaacaccacccaggccagcacccccccccagacccagaccccccagcccaaccccccccccgtgcaggccaccccccaccccttccccgccgtgacccccgacctgatcgtgcagacccccgtgatgaccgtggtgcccccccagcccctgcagacccccccccccgtgcccccccagccccagcccccccccgcccccgccccccagcccgtgcagagccacccccccatcatcgccgccaccccccagcccgtgaagaccaagaagggcgtgaagagaaaggccgacaccaccacccccaccaccatcgaccccatccacgagccccccagcctgccccccgagcccaagaccaccaagctgggccagagaagagagagcagcagacccgtgaagccccccaagaaggacgtgcccgacagccagcagcaccccgcccccgagaagagcagcaaggtgagcgagcagctgaagtgctgcagcggcatcctgaaggagatgttcgccaagaagcacgccgcctacgcctggcccttctacaagcccgtggacgtggaggccctgggcctgcacgactactgcgacatcatcaagcaccccatggacatgagcaccatcaagagcaagctggaggccagagagtacagagacgcccaggagttcggcgccgacgtgagactgatgttcagcaactgctacaagtacaacccccccgaccacgaggtggtggccatggccagaaagctgcaggacgtgttcgagatgagattcgccaagatgcccgacgagcccgaggagcccgtggtggccgtgagcagccccgccgtgcccccccccaccaaggtggtggccccccccagcagcagcgacagcagcagcgacagcagcagcgacagcgacagcagcaccgacgacagcgaggaggagagagcccagagactggccgagctgcaggagcagctgaaggccgtgcacgagcagctggccgccctgagccagccccagcagaacaagcccaagaagaaggagaaggacaagaaggagaagaagaaggagaagcacaagagaaaggaggaggtggaggagaacaagaagagcaaggccaaggagcccccccccaagaagaccaagaagaacaacagcagcaacagcaacgtgagcaagaaggagcccgcccccatgaagagcaagcccccccccacctacgagagcgaggaggaggacaagtgcaagcccatgagctacgaggagaagagacagctgagcctggacatcaacaagctgcccggcgagaagctgggcagagtggtgcacatcatccagagcagagagcccagcctgaagaacagcaaccccgacgagatcgagatcgacttcgagaccctgaagcccagcaccctgagagagctggagagatacgtgaccagctgcctgagaaagaagagaaagccccaggccgagaaggtggacgtgatcgccggcagcagcaagatgaagggcttcagcagcagcgagagcgagagcagcagcgagagcagcagcagcgacagcgaggacagcgagaccgagatggcccccaagagcaagaagaagggccaccccggcagagagcagaagaagcaccaccaccaccaccaccagcagatgcagcaggcccccgcccccgtgccccagcagccccccccccccccccagcagccccccccccccccccccccccagcagcagcagcagccccccccccccccccccccccccagcatgccccagcaggccgcccccgccatgaagagcagccccccccccttcatcgccacccaggtgcccgtgctggagccccagctgcccggcagcgtgttcgaccccatcggccacttcacccagcccatcctgcacctgccccagcccgagctgcccccccacctgccccagccccccgagcacagcacccccccccacctgaaccagcacgccgtggtgagcccccccgccctgcacaacgccctgccccagcagcccagcagacccagcaacagagccgccgccctgccccccaagcccgccagaccccccgccgtgagccccgccctgacccagacccccctgctgccccagccccccatggcccagcccccccaggtgctgctggaggacgaggagccccccgccccccccctgaccagcatgcagatgcagctgtacctgcagcagctgcagaaggtgcagccccccacccccctgctgcccagcgtgaaggtgcagagccagccccccccccccctgcccccccccccccaccccagcgtgcagcagcagctgcagcagcagccccccccccccccccccccccagccccagccccccccccagcagcagcaccagcccccccccagacccgtgcacctgcagcccatgcagttcagcacccacatccagcagcccccccccccccagggccagcagcccccccaccccccccccggccagcagcccccccccccccagcccgccaagccccagcaggtgatccagcaccaccacagccccagacaccacaagagcgacccctacagcaccggccacctgagagaggcccccagccccctgatgatccacagcccccagatgagccagttccagagcctgacccaccagagccccccccagcagaacgtgcagcccaagaagcaggagctgagagccgccagcgtggtgcagccccagcccctggtggtggtgaaggaggagaagatccacagccccatcatcagaagcgagcccttcagccccagcctgagacccgagccccccaagcaccccgagagcatcaaggcccccgtgcacctgccccagagacccgagatgaagcccgtggacgtgggcagacccgtgatcagaccccccgagcagaacgcccccccccccggcgcccccgacaaggacaagcagaagcaggagcccaagacccccgtggcccccaagaaggacctgaagatcaagaacatgggcagctgggccagcctggtgcagaagcaccccaccacccccagcagcaccgccaagagcagcagcgacagcttcgagcagttcagaagagccgccagagagaaggaggagagagagaaggccctgaaggcccaggccgagcacgccgagaaggagaaggagagactgagacaggagagaatgagaagcagagaggacgaggacgccctggagcaggccagaagagcccacgaggaggccagaagaagacaggagcagcagcagcagcagagacaggagcagcagcagcagcagcagcagcaggccgccgccgtggccgccgccgccaccccccaggcccagagcagccagccccagagcatgctggaccagcagagagagctggccagaaagagagagcaggagagaagaagaagagaggccatggccgccaccatcgacatgaacttccagagcgacctgctgagcatcttcgaggagaacctgttctag

SEQ ID NO: 74644 - DNA, 2385 bp, synthetic construct
  misc_feature 1..2385: note = Description of Artificial Sequence: Synthetic coding sequence
  source 1..2385: mol_type = other DNA
atgagcgccgagagcggccccggcaccagactgagaaacctgcccgtgatgggcgacggcctggagaccagccagatgagcaccacccaggcccaggcccagccccagcccgccaacgccgccagcaccaacccccccccccccgagaccagcaaccccaacaagcccaagagacagaccaaccagctgcagtacctgctgagagtggtgctgaagaccctgtggaagcaccagttcgcctggcccttccagcagcccgtggacgccgtgaagctgaacctgcccgactactacaagatcatcaagacccccatggacatgggcaccatcaagaagagactggagaacaactactactggaacgcccaggagtgcatccaggacttcaacaccatgttcaccaactgctacatctacaacaagcccggcgacgacatcgtgctgatggccgaggccctggagaagctgttcctgcagaagatcaacgagctgcccaccgaggagaccgagatcatgatcgtgcaggccaagggcagaggcagaggcagaaaggagaccggcaccgccaagcccggcgtgagcaccgtgcccaacaccacccaggccagcacccccccccagacccagaccccccagcccaaccccccccccgtgcaggccaccccccaccccttccccgccgtgacccccgacctgatcgtgcagacccccgtgatgaccgtggtgcccccccagcccctgcagacccccccccccgtgcccccccagccccagcccccccccgcccccgccccccagcccgtgcagagccacccccccatcatcgccgccaccccccagcccgtgaagaccaagaagggcgtgaagagaaaggccgacaccaccacccccaccaccatcgaccccatccacgagccccccagcctgccccccgagcccaagaccaccaagctgggccagagaagagagagcagcagacccgtgaagccccccaagaaggacgtgcccgacagccagcagcaccccgcccccgagaagagcagcaaggtgagcgagcagctgaagtgctgcagcggcatcctgaaggagatgttcgccaagaagcacgccgcctacgcctggcccttctacaagcccgtggacgtggaggccctgggcctgcacgactactgcgacatcatcaagcaccccatggacatgagcaccatcaagagcaagctggaggccagagagtacagagacgcccaggagttcggcgccgacgtgagactgatgttcagcaactgctacaagtacaacccccccgaccacgaggtggtggccatggccagaaagctgcaggacgtgttcgagatgagattcgccaagatgcccgacgagcccgaggagcccgtggtggccgtgagcagccccgccgtgcccccccccaccaaggtggtggccccccccagcagcagcgacagcagcagcgacagcagcagcgacagcgacagcagcaccgacgacagcgaggaggagagagcccagagactggccgagctgcaggagcagctgaaggccgtgcacgagcagctggccgccctgagccagccccagcagaacaagcccaagaagaaggagaaggacaagaaggagaagaagaaggagaagcacaagagaaaggaggaggtggaggagaacaagaagagcaaggccaaggagcccccccccaagaagaccaagaagaacaacagcagcaacagcaacgtgagcaagaaggagcccgcccccatgaagagcaagcccccccccacctacgagagcgaggaggaggacaagtgcaagcccatgagctacgaggagaagagacagctgagcctggacatcaacaagctgcccggcgagaagctgggcagagtggtgcacatcatccagagcagagagcccagcctgaagaacagcaaccccgacgagatcgagatcgacttcgagaccctgaagcccagcaccctgagagagctggagagatacgtgaccagctgcctgagaaagaagagaaagccccaggccgagaaggtggacgtgatcgccggcagcagcaagatgaagggcttcagcagcagcgagagcgagagcagcagcgagagcagcagcagcgacagcgaggacagcgagaccgccttctgcaccagcggcgacttcgtgagccccggccccagcccctaccacagccacgtgcagtgcggcagattcagagagatgctgagatggttcctggtggacgtggagcagaccgccgccggccagccccacagacagagcgccgccggccccgccatcacctgggcccccgccatcgcctaccccagccccgagtgcgccagatgctgcgtgggctgcagctag

SEQ ID NO: 74645 - DNA, 2169 bp, synthetic construct
  misc_feature 1..2169: note = Description of Artificial Sequence: Synthetic coding sequence
  source 1..2169: mol_type = other DNA
atgagcgccgagagcggccccggcaccagactgagaaacctgcccgtgatgggcgacggcctggagaccagccagatgagcaccacccaggcccaggcccagccccagcccgccaacgccgccagcaccaacccccccccccccgagaccagcaaccccaacaagcccaagagacagaccaaccagctgcagtacctgctgagagtggtgctgaagaccctgtggaagcaccagttcgcctggcccttccagcagcccgtggacgccgtgaagctgaacctgcccgactactacaagatcatcaagacccccatggacatgggcaccatcaagaagagactggagaacaactactactggaacgcccaggagtgcatccaggacttcaacaccatgttcaccaactgctacatctacaacaagcccggcgacgacatcgtgctgatggccgaggccctggagaagctgttcctgcagaagatcaacgagctgcccaccgaggagaccgagatcatgatcgtgcaggccaagggcagaggcagaggcagaaaggagaccggcaccgccaagcccggcgtgagcaccgtgcccaacaccacccaggccagcacccccccccagacccagaccccccagcccaaccccccccccgtgcaggccaccccccaccccttccccgccgtgacccccgacctgatcgtgcagacccccgtgatgaccgtggtgcccccccagcccctgcagacccccccccccgtgcccccccagccccagcccccccccgcccccgccccccagcccgtgcagagccacccccccatcatcgccgccaccccccagcccgtgaagaccaagaagggcgtgaagagaaaggccgacaccaccacccccaccaccatcgaccccatccacgagccccccagcctgccccccgagcccaagaccaccaagctgggccagagaagagagagcagcagacccgtgaagccccccaagaaggacgtgcccgacagccagcagcaccccgcccccgagaagagcagcaaggtgagcgagcagctgaagtgctgcagcggcatcctgaaggagatgttcgccaagaagcacgccgcctacgcctggcccttctacaagcccgtggacgtggaggccctgggcctgcacgactactgcgacatcatcaagcaccccatggacatgagcaccatcaagagcaagctggaggccagagagtacagagacgcccaggagttcggcgccgacgtgagactgatgttcagcaactgctacaagtacaacccccccgaccacgaggtggtggccatggccagaaagctgcaggacgtgttcgagatgagattcgccaagatgcccgacgagcccgaggagcccgtggtggccgtgagcagccccgccgtgcccccccccaccaaggtggtggccccccccagcagcagcgacagcagcagcgacagcagcagcgacagcgacagcagcaccgacgacagcgaggaggagagagcccagagactggccgagctgcaggagcagctgaaggccgtgcacgagcagctggccgccctgagccagccccagcagaacaagcccaagaagaaggagaaggacaagaaggagaagaagaaggagaagcacaagagaaaggaggaggtggaggagaacaagaagagcaaggccaaggagcccccccccaagaagaccaagaagaacaacagcagcaacagcaacgtgagcaagaaggagcccgcccccatgaagagcaagcccccccccacctacgagagcgaggaggaggacaagtgcaagcccatgagctacgaggagaagagacagctgagcctggacatcaacaagctgcccggcgagaagctgggcagagtggtgcacatcatccagagcagagagcccagcctgaagaacagcaaccccgacgagatcgagatcgacttcgagaccctgaagcccagcaccctgagagagctggagagatacgtgaccagctgcctgagaaagaagagaaagccccaggccgagaaggtggacgtgatcgccggcagcagcaagatgaagggcttcagcagcagcgagagcgagagcagcagcgagagcagcagcagcgacagcgaggacagcgagaccggccccgcctag

SEQ ID NO: 74646 - DNA, 2625 bp, synthetic construct
  misc_feature 1..2625: note = Description of Artificial Sequence: Synthetic coding sequence
  source 1..2625: mol_type = other DNA
atggacctgaacaccatcaagaagagactggagaacaagtactacgccaaggccagcgagtgcatcgaggacttcaacaccatgttcagcaactgctacctgtacaacaagcccggcgacgacatcgtgctgatggcccaggccctggagaagctgttcatgcagaagctgagccagatgccccaggaggagcaggtggtgggcgtgaaggagagaatcaagaagggcacccagcagaacatcgccgtgagcagcgccaaggagaagagcagccccagcgccaccgagaaggtgttcaagcagcaggagatccccagcgtgttccccaagaccagcatcagccccctgaacgtggtgcagggcgccagcgtgaacagcagcagccagaccgccgcccaggtgaccaagggcgtgaagagaaaggccgacaccaccacccccgccaccagcgccgtgaaggccagcagcgagttcagccccaccttcaccgagaagagcgtggccctgccccccatcaaggagaacatgcccaagaacgtgctgcccgacagccagcagcagtacaacgtggtgaagaccgtgaaggtgaccgagcagctgagacactgcagcgagatcctgaaggagatgctggccaagaagcacttcagctacgcctggcccttctacaaccccgtggacgtgaacgccctgggcctgcacaactactacgacgtggtgaagaaccccatggacctgggcaccatcaaggagaagatggacaaccaggagtacaaggacgcctacaagttcgccgccgacgtgagactgatgttcatgaactgctacaagtacaacccccccgaccacgaggtggtgaccatggccagaatgctgcaggacgtgttcgagacccacttcagcaagatccccatcgagcccgtggagagcatgcccctgtgctacatcaagaccgacatcaccgagaccaccggcagagagaacaccaacgaggccagcagcgagggcaacagcagcgacgacagcgaggacgagagagtgaagagactggccaagctgcaggagcagctgaaggccgtgcaccagcagctgcaggtgctgagccaggtgcccttcagaaagctgaacaagaagaaggagaagagcaagaaggagaagaagaaggagaaggtgaacaacagcaacgagaaccccagaaagatgtgcgagcagatgagactgaaggagaagagcaagagaaaccagcccaagaagagaaagcagcagttcatcggcctgaagagcgaggacgaggacaacgccaagcccatgaactacgacgagaagagacagctgagcctgaacatcaacaagctgcccggcgacaagctgggcagagtggtgcacatcatccagagcagagagcccagcctgagcaacagcaaccccgacgagatcgagatcgacttcgagaccctgaaggccagcaccctgagagagctggagaagtacgtgagcgcctgcctgagaaagagacccctgaagccccccgccaagaagatcatgatgagcaaggaggagctgcacagccagaagaagcaggagctggagaagagactgctggacgtgaacaaccagctgaacagcagaaagagacagaccaagagcgacaagacccagcccagcaaggccgtggagaacgtgagcagactgagcgagagcagcagcagcagcagcagcagcagcgagagcgagagcagcagcagcgacctgagcagcagcgacagcagcgacagcgagagcgagatgttccccaagttcaccgaggtgaagcccaacgacagccccagcaaggagaacgtgaagaagatgaagaacgagtgcatcccccccgagggcagaaccggcgtgacccagatcggctactgcgtgcaggacaccaccagcgccaacaccaccctggtgcaccagaccacccccagccacgtgatgccccccaaccaccaccagctggccttcaactaccaggagctggagcacctgcagaccgtgaagaacatcagccccctgcagatcctgccccccagcggcgacagcgagcagctgagcaacggcatcaccgtgatgcaccccagcggcgacagcgacaccaccatgctggagagcgagtgccaggcccccgtgcagaaggacatcaagatcaagaacgccgacagctggaagagcctgggcaagcccgtgaagcccagcggcgtgatgaagagcagcgacgagctgttcaaccagttcagaaaggccgccatcgagaaggaggtgaaggccagaacccaggagctgatcagaaagcacctggagcagaacaccaaggagctgaaggccagccaggagaaccagagagacctgggcaacggcctgaccgtggagagcttcagcaacaagatccagaacaagtgcagcggcgaggagcagaaggagcaccagcagagcagcgaggcccaggacaagagcaagctgtggctgctgaaggacagagacctggccagacagaaggagcaggagagaagaagaagagaggccatggtgggcaccatcgacatgaccctgcagagcgacatcatgaccatgttcgagaacaacttcgactag

SEQ ID NO: 74647 - DNA, 45 bp, synthetic construct
  misc_feature 1..45: note = Description of Artificial Sequence: Synthetic coding sequence
  source 1..45: mol_type = other DNA
atgagcctgcccagcagacagaccgccatcatcgtgaacccctag

SEQ ID NO: 74648 - DNA, 2844 bp, synthetic construct
  misc_feature 1..2844: note = Description of Artificial Sequence: Synthetic coding sequence
  source 1..2844: mol_type = other DNA
atgagcctgcccagcagacagaccgccatcatcgtgaacccccccccccccgagtacatcaacaccaagaagaacggcagactgaccaaccagctgcagtacctgcagaaggtggtgctgaaggacctgtggaagcacagcttcagctggcccttccagagacccgtggacgccgtgaagctgcagctgcccgactactacaccatcatcaagaaccccatggacctgaacaccatcaagaagagactggagaacaagtactacgccaaggccagcgagtgcatcgaggacttcaacaccatgttcagcaactgctacctgtacaacaagcccggcgacgacatcgtgctgatggcccaggccctggagaagctgttcatgcagaagctgagccagatgccccaggaggagcaggtggtgggcgtgaaggagagaatcaagaagggcacccagcagaacatcgccgtgagcagcgccaaggagaagagcagccccagcgccaccgagaaggtgttcaagcagcaggagatccccagcgtgttccccaagaccagcatcagccccctgaacgtggtgcagggcgccagcgtgaacagcagcagccagaccgccgcccaggtgaccaagggcgtgaagagaaaggccgacaccaccacccccgccaccagcgccgtgaaggccagcagcgagttcagccccaccttcaccgagaagagcgtggccctgccccccatcaaggagaacatgcccaagaacgtgctgcccgacagccagcagcagtacaacgtggtgaagaccgtgaaggtgaccgagcagctgagacactgcagcgagatcctgaaggagatgctggccaagaagcacttcagctacgcctggcccttctacaaccccgtggacgtgaacgccctgggcctgcacaactactacgacgtggtgaagaaccccatggacctgggcaccatcaaggagaagatggacaaccaggagtacaaggacgcctacaagttcgccgccgacgtgagactgatgttcatgaactgctacaagtacaacccccccgaccacgaggtggtgaccatggccagaatgctgcaggacgtgttcgagacccacttcagcaagatccccatcgagcccgtggagagcatgcccctgtgctacatcaagaccgacatcaccgagaccaccggcagagagaacaccaacgaggccagcagcgagggcaacagcagcgacgacagcgaggacgagagagtgaagagactggccaagctgcaggagcagctgaaggccgtgcaccagcagctgcaggtgctgagccaggtgcccttcagaaagctgaacaagaagaaggagaagagcaagaaggagaagaagaaggagaaggtgaacaacagcaacgagaaccccagaaagatgtgcgagcagatgagactgaaggagaagagcaagagaaaccagcccaagaagagaaagcagcagttcatcggcctgaagagcgaggacgaggacaacgccaagcccatgaactacgacgagaagagacagctgagcctgaacatcaacaagctgcccggcgacaagctgggcagagtggtgcacatcatccagagcagagagcccagcctgagcaacagcaaccccgacgagatcgagatcgacttcgagaccctgaaggccagcaccctgagagagctggagaagtacgtgagcgcctgcctgagaaagagacccctgaagccccccgccaagaagatcatgatgagcaaggaggagctgcacagccagaagaagcaggagctggagaagagactgctggacgtgaacaaccagctgaacagcagaaagagacagaccaagagcgacaagacccagcccagcaaggccgtggagaacgtgagcagactgagcgagagcagcagcagcagcagcagcagcagcgagagcgagagcagcagcagcgacctgagcagcagcgacagcagcgacagcgagagcgagatgttccccaagttcaccgaggtgaagcccaacgacagccccagcaaggagaacgtgaagaagatgaagaacgagtgcatcccccccgagggcagaaccggcgtgacccagatcggctactgcgtgcaggacaccaccagcgccaacaccaccctggtgcaccagaccacccccagccacgtgatgccccccaaccaccaccagctggccttcaactaccaggagctggagcacctgcagaccgtgaagaacatcagccccctgcagatcctgccccccagcggcgacagcgagcagctgagcaacggcatcaccgtgatgcaccccagcggcgacagcgacaccaccatgctggagagcgagtgccaggcccccgtgcagaaggacatcaagatcaagaacgccgacagctggaagagcctgggcaagcccgtgaagcccagcggcgtgatgaagagcagcgacgagctgttcaaccagttcagaaaggccgccatcgagaaggaggtgaaggccagaacccaggagctgatcagaaagcacctggagcagaacaccaaggagctgaaggccagccaggagaaccagagagacctgggcaacggcctgaccgtggagagcttcagcaacaagatccagaacaagtgcagcggcgaggagcagaaggagcaccagcagagcagcgaggcccaggacaagagcaagctgtggctgctgaaggacagagacctggccagacagaaggagcaggagagaagaagaagagaggccatggtgggcaccatcgacatgaccctgcagagcgacatcatgaccatgttcgagaacaacttcgactag

SEQ ID NO: 74649 - DNA, 2706 bp, synthetic construct
  misc_feature 1..2706: note = Description of Artificial Sequence: Synthetic coding sequence
  source 1..2706: mol_type = other DNA
atgagcctgcccagcagacagaccgccatcatcgtgaacccccccccccccgagtacatcaacaccaagaagaacggcagactgaccaaccagctgcagtacctgcagaaggtggtgctgaaggacctgtggaagcacagcttcagctggcccttccagagacccgtggacgccgtgaagctgcagctgccccccggcgacgacatcgtgctgatggcccaggccctggagaagctgttcatgcagaagctgagccagatgccccaggaggagcaggtggtgggcgtgaaggagagaatcaagaagggcacccagcagaacatcgccgtgagcagcgccaaggagaagagcagccccagcgccaccgagaaggtgttcaagcagcaggagatccccagcgtgttccccaagaccagcatcagccccctgaacgtggtgcagggcgccagcgtgaacagcagcagccagaccgccgcccaggtgaccaagggcgtgaagagaaaggccgacaccaccacccccgccaccagcgccgtgaaggccagcagcgagttcagccccaccttcaccgagaagagcgtggccctgccccccatcaaggagaacatgcccaagaacgtgctgcccgacagccagcagcagtacaacgtggtgaagaccgtgaaggtgaccgagcagctgagacactgcagcgagatcctgaaggagatgctggccaagaagcacttcagctacgcctggcccttctacaaccccgtggacgtgaacgccctgggcctgcacaactactacgacgtggtgaagaaccccatggacctgggcaccatcaaggagaagatggacaaccaggagtacaaggacgcctacaagttcgccgccgacgtgagactgatgttcatgaactgctacaagtacaacccccccgaccacgaggtggtgaccatggccagaatgctgcaggacgtgttcgagacccacttcagcaagatccccatcgagcccgtggagagcatgcccctgtgctacatcaagaccgacatcaccgagaccaccggcagagagaacaccaacgaggccagcagcgagggcaacagcagcgacgacagcgaggacgagagagtgaagagactggccaagctgcaggagcagctgaaggccgtgcaccagcagctgcaggtgctgagccaggtgcccttcagaaagctgaacaagaagaaggagaagagcaagaaggagaagaagaaggagaaggtgaacaacagcaacgagaaccccagaaagatgtgcgagcagatgagactgaaggagaagagcaagagaaaccagcccaagaagagaaagcagcagttcatcggcctgaagagcgaggacgaggacaacgccaagcccatgaactacgacgagaagagacagctgagcctgaacatcaacaagctgcccggcgacaagctgggcagagtggtgcacatcatccagagcagagagcccagcctgagcaacagcaaccccgacgagatcgagatcgacttcgagaccctgaaggccagcaccctgagagagctggagaagtacgtgagcgcctgcctgagaaagagacccctgaagccccccgccaagaagatcatgatgagcaaggaggagctgcacagccagaagaagcaggagctggagaagagactgctggacgtgaacaaccagctgaacagcagaaagagacagaccaagagcgacaagacccagcccagcaaggccgtggagaacgtgagcagactgagcgagagcagcagcagcagcagcagcagcagcgagagcgagagcagcagcagcgacctgagcagcagcgacagcagcgacagcgagagcgagatgttccccaagttcaccgaggtgaagcccaacgacagccccagcaaggagaacgtgaagaagatgaagaacgagtgcatcccccccgagggcagaaccggcgtgacccagatcggctactgcgtgcaggacaccaccagcgccaacaccaccctggtgcaccagaccacccccagccacgtgatgccccccaaccaccaccagctggccttcaactaccaggagctggagcacctgcagaccgtgaagaacatcagccccctgcagatcctgccccccagcggcgacagcgagcagctgagcaacggcatcaccgtgatgcaccccagcggcgacagcgacaccaccatgctggagagcgagtgccaggcccccgtgcagaaggacatcaagatcaagaacgccgacagctggaagagcctgggcaagcccgtgaagcccagcggcgtgatgaagagcagcgacgagctgttcaaccagttcagaaaggccgccatcgagaaggaggtgaaggccagaacccaggagctgatcagaaagcacctggagcagaacaccaaggagctgaaggccagccaggagaaccagagagacctgggcaacggcctgaccgtggagagcttcagcaacaagatccagaacaagtgcagcggcgaggagcagaaggagcaccagcagagcagcgaggcccaggacaagagcaagctgtggctgctgaaggacagagacctggccagacagaaggagcaggagagaagaagaagagaggccatggtgggcaccatcgacatgaccctgcagagcgacatcatgaccatgttcgagaacaacttcgactag

SEQ ID NO: 74650 - DNA, 2844 bp, synthetic construct; identical to SEQ ID NO: 74648
  misc_feature 1..2844: note = Description of Artificial Sequence: Synthetic coding sequence
  source 1..2844: mol_type = other DNA

SEQ ID NO: 74651 - DNA, 2844 bp, synthetic construct; identical to SEQ ID NO: 74648
  misc_feature 1..2844: note = Description of Artificial Sequence: Synthetic coding sequence
  source 1..2844: mol_type = other DNA

SEQ ID NO: 74652 - DNA, 531 bp, synthetic construct
  misc_feature 1..531: note = Description of Artificial Sequence: Synthetic coding sequence
  source 1..531: mol_type = other DNA
atgagcctgcccagcagacagaccgccatcatcgtgaacccccccccccccgagtacatcaacaccaagaagaacggcagactgaccaaccagctgcagtacctgcagaaggtggtgctgaaggacctgtggaagcacagcttcagctggcccttccagagacccgtggacgccgtgaagctgcagctgcccgactactacaccatcatcaagaaccccatggacctgaacaccatcaagaagagactggagaacaagtactacgccaaggccagcgagtgcatcgaggacttcaacaccatgttcagcaactgctacctgtacaacaagcccggcgacgacatcgtgctgatggcccaggccctggagaagctgttcatgcagaagctgagccagatgccccaggaggagcaggtggtgggcgtgaaggagagaatcaagaagggcacccagcagaacatcgccgtgagcagcgccaaggagaagagcagccccagcgccaccgagaaggtgttcaagcagcaggagtag

SEQ ID NO: 74653 - DNA, 1389 bp, synthetic construct
  misc_feature 1..1389: note = Description of Artificial Sequence: Synthetic coding sequence
  source 1..1389: mol_type = other DNA
atgagcctgcccagcagacagaccgccatcatcgtgaacccccccccccccgagtacatcaacaccaagaagaacggcagactgaccaaccagctgcagtacctgcagaaggtggtgctgaaggacctgtggaagcacagcttcagctggcccttccagagacccgtggacgccgtgaagctgcagctgcccgactactacaccatcatcaagaaccccatggacctgaacaccatcaagaagagactggagaacaagtactacgccaaggccagcgagtgcatcgaggacttcaacaccatgttcagcaactgctacctgtacaacaagcccggcgacgacatcgtgctgatggcccaggccctggagaagctgttcatgcagaagctgagccagatgccccaggaggagcaggtggtgggcgtgaaggagagaatcaagaagggcacccagcagaacatcgccgtgagcagcgccaaggagaagagcagccccagcgccaccgagaaggtgttcaagcagcaggagatccccagcgtgttccccaagaccagcatcagccccctgaacgtggtgcagggcgccagcgtgaacagcagcagccagaccgccgcccaggtgaccaagggcgtgaagagaaaggccgacaccaccacccccgccaccagcgccgtgaaggccagcagcgagttcagccccaccttcaccgagaagagcgtggccctgccccccatcaaggagaacatgcccaagaacgtgctgcccgacagccagcagcagtacaacgtggtgaagaccgtgaaggtgaccgagcagctgagacactgcagcgagatcctgaaggagatgctggccaagaagcacttcagctacgcctggcccttctacaaccccgtggacgtgaacgccctgggcctgcacaactactacgacgtggtgaagaaccccatggacctgggcaccatcaaggagaagatggacaaccaggagtacaaggacgcctacaagttcgccgccgacgtgagactgatgttcatgaactgctacaagtacaacccccccgaccacgaggtggtgaccatggccagaatgctgcaggacgtgttcgagacccacttcagcaagatccccatcgagcccgtggagagcatgcccctgtgctacatcaagaccgacatcaccgagaccaccggcagagagaacaccaacgaggccagcagcgagggcaacagcagcgacgacagcgaggacgagagagtgaagagactggccaagctgcaggagcagctgaaggccgtgcaccagcagctgcaggtgctgagccaggtgcccttcagaaagctgaacaagaagaaggagaagagcaagaaggagaagaagaaggagtag

SEQ ID NO: 74654 - DNA, 468 bp, synthetic construct
  misc_feature 1..468: note = Description of Artificial Sequence: Synthetic coding sequence
  source 1..468: mol_type = other DNA
atgagcctgcccagcagacagaccgccatcatcgtgaacccccccccccccgagtacatcaacaccaagaagaacggcagactgaccaaccagctgcagtacctgcagaaggtggtgctgaaggacctgtggaagcacagcttcagctggcccttccagagacccgtggacgccgtgaagctgcagctgcccgactactacaccatcatcaagaaccccatggacctgaacaccatcaagaagagactggagaacaagtactacgccaaggccagcgagtgcatcgaggacttcaacaccatgttcagcaactgctacctgtacaacaagcccggcgacgacatcgtgctgatggcccaggccctggagaagctgttcatgcagaagctgagccagatgccccaggaggagcaggtggtgggcgtgaaggagagaatcaagaagggcacccagcagaacatcgcctag

SEQ ID NO: 74655 - DNA, 603 bp, synthetic construct
  misc_feature 1..603: note = Description of Artificial Sequence: Synthetic coding sequence
  source 1..603: mol_type = other DNA
atgagcctgcccagcagacagaccgccatcatcgtgaacccccccccccccgagtacatcaacaccaagaagaacggcagactgaccaaccagctgcagtacctgcagaaggtggtgctgaaggacctgtggaagcacagcttcagctggcccttccagagacccgtggacgccgtgaagctgcagctgcccgactactacaccatcatcaagaaccccatggacctgaacaccatcaagaagagactggagaacaagtactacgccaaggccagcgagtgcatcgaggacttcaacaccatgttcagcaactgctacctgtacaacaagcccggcgacgacatcgtgctgatggcccaggccctggagaagctgttcatgcagaagctgagccagatgccccaggaggagcaggtggtgggcgtgaaggagagaatcaagaagggcacccagcagaacatcgccgtgagcagcgccaaggagaagagcagccccagcgccaccgagaaggtgttcaagcagcaggagatccccagcgtgttccccaagaccagcatcagccccctgaacgtggtgcagggcgccagcgtgaacagcagctag

SEQ ID NO: 74656 - DNA, 468 bp, synthetic construct; identical to SEQ ID NO: 74654
  misc_feature 1..468: note = Description of Artificial Sequence: Synthetic coding sequence
  source 1..468: mol_type = other DNA

SEQ ID NO: 74657 - DNA, 159 bp, synthetic construct
  misc_feature 1..159: note = Description of Artificial Sequence: Synthetic coding sequence
  source 1..159: mol_type = other DNA
atgagcctgcccagcagacagaccgccatcatcgtgaacccccccccccccgagtacatcaacaccaagaagaacggcagactgaccaaccagctgcagtacctgcagaaggtggtgctgaaggacctgtggaagcacagcttcagctggcccttctag

SEQ ID NO: 74658 - DNA, 291 bp, synthetic construct
  misc_feature 1..291: note = Description of Artificial Sequence: Synthetic coding sequence
  source 1..291: mol_type = other DNA
atgagcctgcccagcagacagaccgccatcatcgtgaacccccccccccccgagtacatcaacaccaagaagaacggcagactgaccaaccagctgcagtacctgcagaaggtggtgctgaaggacctgtggaagcacagcttcagctggcccttccagagacccgtggacgccgtgaagctgcagctgcccgactactacaccatcatcaagaaccccatggacctgaacaccatcaagaagagactggagaacaagtactacgccaaggccagcgagtgcatcgagtag

SEQ ID NO: 74659 - DNA, 99 bp, synthetic construct
  misc_feature 1..99: note = Description of Artificial Sequence: Synthetic coding sequence
  source 1..99: mol_type = other DNA
atgagcctgcccagcagacagaccgccatcatcgtgaacccccccccccccgagtacatcaacaccaagaagaacggcagactgaccaaccagctgtag

SEQ ID NO: 74660 - DNA, 1398 bp, synthetic construct
  misc_feature 1..1398: note = Description of Artificial Sequence: Synthetic coding sequence
  source 1..1398: mol_type = other DNA
atgagcctgcccagcagacagaccgccatcatcgtgaacccccccccccccgagtacatcaacaccaagaagaacggcagactgaccaaccagctgcagtacctgcagaaggtggtgctgaaggacctgtggaagcacagcttcagctggcccttccagagacccgtggacgccgtgaagctgcagctgcccgactactacaccatcatcaagaaccccatggacctgaacaccatcaagaagagactggagaacaagtactacgccaaggccagcgagtgcatcgaggacttcaacaccatgttcagcaactgctacctgtacaacaagcccggcgacgacatcgtgctgatggcccaggccctggagaagctgttcatgcagaagctgagccagatgccccaggaggagcaggtggtgggcgtgaaggagagaatcaagaagggcacccagcagaacatcgccgtgagcagcgccaaggagaagagcagccccagcgccaccgagaaggtgttcaagcagcaggagatccccagcgtgttccccaagaccagcatcagccccctgaacgtggtgcagggcgccagcgtgaacagcagcagccagaccgccgcccaggtgaccaagggcgtgaagagaaaggccgacaccaccacccccgccaccagcgccgtgaaggccagcagcgagttcagccccaccttcaccgagaagagcgtggccctgccccccatcaaggagaacatgcccaagaacgtgctgcccgacagccagcagcagtacaacgtggtgaagaccgtgaaggtgaccgagcagctgagacactgcagcgagatcctgaaggagatgctggccaagaagcacttcagctacgcctggcccttctacaaccccgtggacgtgaacgccctgggcctgcacaactactacgacgtggtgaagaaccccatggacctgggcaccatcaaggagaagatggacaaccaggagtacaaggacgcctacaagttcgccgccgacgtgagactgatgttcatgaactgctacaagtacaacccccccgaccacgaggtggtgaccatggccagaatgctgcaggacgtgttcgagacccacttcagcaagatccccatcgagcccgtggagagcatgcccctgtgctacatcaagaccgacatcaccgagaccaccggcagagagaacaccaacgaggccagcagcgagggcaacagcagcgacgacagcgaggacgagagagtgaagagactggccaagctgcaggagcagctgaaggccgtgcaccagcagctgcaggtgctgagccaggtgcccttcagaaagctgaacaagaagaaggagaagagcaagaaggagaagaagaaggagaagaagaagtag

SEQ ID NO: 74661 - DNA, 303 bp, synthetic construct
  misc_feature 1..303: note = Description of Artificial Sequence: Synthetic coding sequence
  source 1..303: mol_type = other DNA
atgagcctgcccagcagacagaccgccatcatcgtgaacccccccccccccgagtacatcaacaccaagaagaacggcagactgaccaaccagctgcagtacctgcagaaggtggtgctgaaggacctgtggaagcacagcttcagctggcccttccagagacccgtggacgccgtgaagctgcagctgcccgactactacaccatcatcaagaaccccatggacctgaacaccatcaagaagagactggagaacaagtactacgccaaggccagcgagtgcatcgaggacttcaacacctag

SEQ ID NO: 74662 - DNA, 5550 bp, synthetic construct
  misc_feature 1..5550: note = Description of Artificial Sequence: Synthetic coding sequence
  source 1..5550: mol_type = other DNA
atggccgtgagcagactggacagactgttcatcctgctggacaccggcaccacccccgtgaccagaaaggccgccgcccagcagctgggcgaggtggtgaagctgcacccccacgagctgaacaacctgctgagcaaggtgctgatctacctgagaagcgccaactgggacaccagaatcgccgccggccaggccgtggaggccatcgtgaagaacgtgcccgagtggaaccccgtgcccagaaccagacaggagcccaccagcgagagcagcatggaggacagccccaccaccgagagactgaacttcgacagattcgacatctgcagactgctgcagcacggcgccagcctgctgggcagcgccggcgccgagttcgaggtgcaggacgagaagagcggcgaggtggaccccaaggagagaatcgccagacagagaaagctgctgcagaagaagctgggcctgaacatgggcgaggccatcggcatgagcaccgaggagctgttcaacgacgaggacctggactacacccccaccagcgccagcttcgtgaacaagcagcccaccctgcaggccgccgagctgatcgacagcgagttcagagccggcatgagcaacagacagaagaacaaggccaagagaatggccaagctgttcgccaagcagagaagcagagacgccgtggagaccaacgagaagagcaacgacagcaccgacggcgagcccgaggagaagagaagaaagatcgccaacgtggtgatcaaccagagcgccaacgacagcaaggtgctgatcgacaacatccccgacagcagcagcctgatcgaggagaccaacgagtggcccctggagagcttctgcgaggagctgtgcaacgacctgttcaaccccagctgggaggtgagacacggcgccggcaccggcctgagagagatcctgaaggcccacggcaagagcggcggcaagatgggcgacagcaccctggaggagatgatccagcagcaccaggagtggctggaggacctggtgatcagactgctgtgcgtgttcgccctggacagattcggcgacttcgtgagcgacgaggtggtggcccccgtgagagagacctgcgcccagaccctgggcgtggtgctgaagcacatgaacgagaccggcgtgcacaagaccgtggacgtgctgctgaagctgctgacccaggagcagtgggaggtgagacacggcggcctgctgggcatcaagtacgccctggccgtgagacaggacgtgatcaacaccctgctgcccaaggtgctgaccagaatcatcgagggcctgcaggacctggacgacgacgtgagagccgtggccgccgccagcctggtgcccgtggtggagagcctggtgtacctgcagacccagaaggtgcccttcatcatcaacaccctgtgggacgccctgctggagctggacgacctgaccgccagcaccaacagcatcatgaccctgctgagcagcctgctgacctacccccaggtgcagcagtgcagcatccagcagagcctgaccgtgctggtgcccagagtgtggcccttcctgcaccacaccatcagcagcgtgagaagagccgccctggagaccctgttcaccctgctgagcacccaggaccagaacagcagcagctggctgatccccatcctgcccgacatgctgagacacatcttccagttctgcgtgctggagagcagccaggagatcctggacctgatccacaaggtgtggatggagctgctgagcaaggccagcgtgcagtacgtggtggccgccgcctgcccctggatgggcgcctggctgtgcctgatgatgcagcccagccacctgcccatcgacctgaacatgctgctggaggtgaaggccagagccaaggagaagaccggcggcaaggtgagacagggccagagccagaacaaggaggtgctgcaggagtacatcgccggcgccgacaccatcatggaggaccccgccaccagagacttcgtggtgatgagagccagaatgatggccgccaagctgctgggcgccctgtgctgctgcatctgcgaccccggcgtgaacgtggtgacccaggagatcaagcccgccgagagcctgggccagctgctgctgttccacctgaacagcaagagcgccctgcagagaatcagcgtggccctggtgatctgcgagtgggccgccctgcagaaggagtgcaaggccgtgaccctggccgtgcagcccagactgctggacatcctgagcgagcacctgtactacgacgagatcgccgtgcccttcaccagaatgcagaacgagtgcaagcagctgatcagcagcctggccgacgtgcacatcgaggtgggcaacagagtgaacaacaacgtgctgaccatcgaccaggccagcgacctggtgaccaccgtgttcaacgaggccaccagcagcttcgacctgaacccccaggtgctgcagcagctggacagcaagagacagcaggtgcagatgaccgtgaccgagaccaaccaggagtggcaggtgctgcagctgagagtgcacaccttcgccgcctgcgccgtggtgagcctgcagcagctgcccgagaagctgaaccccatcatcaagcccctgatggagaccatcaagaaggaggagaacaccctggtgcagaactacgccgcccagtgcatcgccaagctgctgcagcagtgcaccaccagaaccccctgccccaacagcaagatcatcaagaacctgtgcagcagcctgtgcgtggacccctacctgaccccctgcgtgacctgccccgtgcccacccagagcggccaggagaacagcaagggcagcaccagcgagaaggacggcatgcaccacaccgtgaccaagcacagaggcatcatcaccctgtacagacaccagaaggccgccttcgccatcaccagcagaagaggccccacccccaaggccgtgaaggcccagatcgccgacctgcccgccggcagcagcggcaacatcctggtggagctggacgaggcccagaagccctacctggtgcagagaagaggcgccgagttcgccctgaccaccatcgtgaagcacttcggcggcgagatggccgtgaagctgccccacctgtgggacgccatggtgggccccctgagaaacaccatcgacatcaacaacttcgacggcaagagcctgctggacaagggcgacagccccgcccaggagctggtgaacagcctgcaggtgttcgagaccgccgccgccagcatggacagcgagctgcaccccctgctggtgcagcacctgccccacctgtacatgtgcctgcagtaccccagcaccgccgtgagacacatggccgccagatgcgtgggcgtgatgagcaagatcgccaccatggagaccatgaacatcttcctggagaaggtgctgccctggctgggcgccatcgacgacagcgtgaagcaggagggcgccatcgaggccctggcctgcgtgatggagcagctggacgtgggcatcgtgccctacatcgtgctgctggtggtgcccgtgctgggcagaatgagcgaccagaccgacagcgtgagattcatggccacccagtgcttcgccaccctgatcagactgatgcccctggaggccggcatccccgacccccccaacatgagcgccgagctgatccagctgaaggccaaggagagacacttcctggagcagctgctggacggcaagaagctggagaactacaagatccccgtgcccatcaacgccgagctgagaaagtaccagcaggacggcgtgaactggctggccttcctgaacaagtacaagctgcacggcatcctgtgcgacgacatgggcctgggcaagaccctgcagagcatctgcatcctggccggcgaccactgccacagagcccaggagtacgccagaagcaagctggccgagtgcatgcccctgcccagcctggtggtgtgcccccccaccctgaccggccactgggtggacgaggtgggcaagttctgcagcagagagtacctgaaccccctgcactacaccggcccccccaccgagagaatcagactgcagcaccaggtgaagagacacaacctgatcgtggccagctacgacgtggtgagaaacgacatcgacttcttcagaaacatcaagttcaactactgcatcctggacgagggccacgtgatcaagaacggcaagaccaagctgagcaaggccgtgaagcagctgaccgccaactacagaatcatcctgagcggcacccccatccagaacaacgtgctggagctgtggagcctgttcgacttcctgatgcccggcttcctgggcaccgagagacagttcgccgccagatacggcaagcccatcctggccagcagagacgccagaagcagcagcagagagcaggaggccggcgtgctggccatggacgccctgcacagacaggtgctgcccttcctgctgagaagaatgaaggaggacgtgctgcaggacctgccccccaagatcatccaggactactactgcaccctgagccccctgcaggtgcagctgtacgaggacttcgccaagagcagagccaagtgcgacgtggacgagaccgtgagcagcgccaccctgagcgaggagaccgagaagcccaagctgaaggccaccggccacgtgttccaggccctgcagtacctgagaaagctgtgcaaccaccccgccctggtgctgaccccccagcaccccgagttcaagaccaccgccgagaagctggccgtgcagaacagcagcctgcacgacatccagcacgcccccaagctgagcgccctgaagcagctgctgctggactgcggcctgggcaacggcagcaccagcgagagcggcaccgagagcgtggtggcccagcacagaatcctgatcttctgccagctgaagagcatgctggacatcgtggagcacgacctgctgaagccccacctgcccagcgtgacctacctgagactggacggcagcatcccccccggccagagacacagcatcgtgagcagattcaacaacgaccccagcatcgacgtgctgctgctgaccacccacgtgggcggcctgggcctgaacctgaccggcgccgacaccgtggtgttcgtggagcacgactggaaccccatgagagacctgcaggccatggacagagcccacagaatcggccagaagagagtggtgaacgtgtacagactgatcaccagaggcaccctggaggagaagatcatgggcctgcagaagttcaagatgaacatcgccaacaccgtgatcagccaggagaacagcagcctgcagagcatgggcaccgaccagctgctggacctgttcaccctggacaaggacggcaaggccgagaaggccgacaccagcaccagcggcaaggccagcatgaagagcatcctggagaacctgagcgacctgtgggaccaggagcagtacgacagcgagtacagcctggagaacttcatgcacagcctgaagtag

SEQ ID NO: 74663 - DNA, 2100 bp, synthetic construct
  misc_feature 1..2100: note = Description of Artificial Sequence: Synthetic coding sequence
  source 1..2100: mol_type = other DNA
aagctgtggttcaagaacaccgaggactacagaagaaccgccctgaccagactgaccagcggcgtgatggagcagctggacgtgggcatcgtgccctacatcgtgctgctggtggtgcccgtgctgggcagaatgagcgaccagaccgacagcgtgagattcatggccacccagtgcttcgccaccctgatcagactgatgcccctggaggccggcatccccgacccccccaacatgagcgccgagctgatccagctgaaggccaaggagagacacttcctggagcagctgctggacggcaagaagctggagaactacaagatccccgtgcccatcaacgccgagctgagaaagtaccagcaggacggcgtgaactggctggccttcctgaacaagtacaagctgcacggcatcctgtgcgacgacatgggcctgggcaagaccctgcagagcatctgcatcctggccggcgaccactgccacagagcccaggagtacgccagaagcaagctggccgagtgcatgcccctgcccagcctggtggtgtgcccccccaccctgaccggccactgggtggacgaggtgggcaagttctgcagcagagagtacctgaaccccctgcactacaccggcccccccaccgagagaatcagactgcagcaccaggtgaagagacacaacctgatcgtggccagctacgacgtggtgagaaacgacatcgacttcttcagaaacatcaagttcaactactgcatcctggacgagggccacgtgatcaagaacggcaagaccaagctgagcaaggccgtgaagcagctgaccgccaactacagaatcatcctgagcggcacccccatccagaacaacgtgctggagctgtggagcctgttcgacttcctgatgcccggcttcctgggcaccgagagacagttcgccgccagatacggcaagcccatcctggccagcagagacgccagaagcagcagcagagagcaggaggccggcgtgctggccatggacgccctgcacagacaggtgctgcccttcctgctgagaagaatgaaggaggacgtgctgcaggacctgccccccaagatcatccaggactactactgcaccctgagccccctgcaggtgcagctgtacgaggacttcgccaagagcagagccaagtgcgacgtggacgagaccgtgagcagcgccaccctgagcgaggagaccgagaagcccaagctgaaggccaccggccacgtgttccaggccctgcagtacctgagaaagctgtgcaaccaccccgccctggtgctgaccccccagcaccccgagttcaagaccaccgccgagaagctggccgtgcagaacagcagcctgcacgacatccagcacgcccccaagctgagcgccctgaagcagctgctgctggactgcggcctgggcaacggcagcaccagcgagagcggcaccgagagcgtggtggcccagcacagaatcctgatcttctgccagctgaagagcatgctggacatcgtggagcacgacctgctgaagccccacctgcccagcgtgacctacctgagactggacggcagcatcccccccggccagagacacagcatcgtgagcagattcaacaacgaccccagcatcgacgtgctgctgctgaccacccacgtgggcggcctgggcctgaacctgaccggcgccgacaccgtggtgttcgtggagcacgactggaaccccatgagagacctgcaggccatggacagagcccacagaatcggccagaagagagtggtgaacgtgtacagactgatcaccagaggcaccctggaggagaagatcatgggcctgcagaagttcaagatgaacatcgccaacaccgtgatcagccaggagaacagcagcctgcagagcatgggcaccgaccagctgctggacctgttcaccctggacaaggacggcaaggccgagaaggccgacaccagcaccagcggcaaggccagcatgaagagcatcctggagaacctgagcgacctgtgggaccaggagcagtacgacagcgagtacagcctggagaacttcatgcacagcctgaagtag

SEQ ID NO: 74664 - DNA, 2034 bp, synthetic construct
  misc_feature 1..2034: note = Description of Artificial Sequence: Synthetic coding sequence
  source 1..2034: mol_type = other DNA
atggagcagctggacgtgggcatcgtgccctacatcgtgctgctggtggtgcccgtgctgggcagaatgagcgaccagaccgacagcgtgagattcatggccacccagtgcttcgccaccctgatcagactgatgcccctggaggccggcatccccgacccccccaacatgagcgccgagctgatccagctgaaggccaaggagagacacttcctggagcagctgctggacggcaagaagctggagaactacaagatccccgtgcccatcaacgccgagctgagaaagtaccagcaggacggcgtgaactggctggccttcctgaacaagtacaagctgcacggcatcctgtgcgacgacatgggcctgggcaagaccctgcagagcatctgcatcctggccggcgaccactgccacagagcccaggagtacgccagaagcaagctggccgagtgcatgcccctgcccagcctggtggtgtgcccccccaccctgaccggccactgggtggacgaggtgggcaagttctgcagcagagagtacctgaaccccctgcactacaccggcccccccaccgagagaatcagactgcagcaccaggtgaagagacacaacctgatcgtggccagctacgacgtggtgagaaacgacatcgacttcttcagaaacatcaagttcaactactgcatcctggacgagggccacgtgatcaagaacggcaagaccaagctgagcaaggccgtgaagcagctgaccgccaactacagaatcatcctgagcggcacccccatccagaacaacgtgctggagctgtggagcctgttcgacttcctgatgcccggcttcctgggcaccgagagacagttcgccgccagatacggcaagcccatcctggccagcagagacgccagaagcagcagcagagagcaggaggccggcgtgctggccatggacgccctgcacagacaggtgctgcccttcctgctgagaagaatgaaggaggacgtgctgcaggacctgccccccaagatcatccaggactactactgcaccctgagccccctgcaggtgcagctgtacgaggacttcgccaagagcagagccaagtgcgacgtggacgagaccgtgagcagcgccaccctgagcgaggagaccgagaagcccaagctgaaggccaccggccacgtgttccaggccctgcagtacctgagaaagctgtgcaaccaccccgccctggtgctgaccccccagcaccccgagttcaagaccaccgccgagaagctggccgtgcagaacagcagcctgcacgacatccagcacgcccccaagctgagcgccctgaagcagctgctgctggactgcggcctgggcaacggcagcaccagcgagagcggcaccgagagcgtggtggcccagcacagaatcctgatcttctgccagctgaagagcatgctggacatcgtggagcacgacctgctgaagccccacctgcccagcgtgacctacctgagactggacggcagcatcccccccggccagagacacagcatcgtgagcagattcaacaacgaccccagcatcgacgtgctgctgctgaccacccacgtgggcggcctgggcctgaacctgaccggcgccgacaccgtggtgttcgtggagcacgactggaaccccatgagagacctgcaggccatggacagagcccacagaatcggccagaagagagtggtgaacgtgtacagactgatcaccagaggcaccctggaggagaagatcatgggcctgcagaagttcaagatgaacatcgccaacaccgtgatcagccaggagaacagcagcctgcagagcatgggcaccgaccagctgctggacctgttcaccctggacaaggacggcaaggccgagaaggccgacaccagcaccagcggcaaggccagcatgaagagcatcctggagaacctgagcgacctgtgggaccaggagcagtacgacagcgagtacagcctggagaacttcatgcacagcctgaagtag

SEQ ID NO: 74665 - DNA, 1233 bp, synthetic construct
  misc_feature 1..1233: note = Description of Artificial Sequence: Synthetic coding sequence
  source 1..1233: mol_type = other DNA
atgggcgccaacgccagcaactacccccacagctgcagccccagagtgggcggcaacagccaggcccagcagaccttcatcggcaccagcagctacagccagcagggctacggctgcgagagcaagctgtacagcctggaccacggccacgagaagccccaggacaagaagaagagaaccagcggcctggccaccctgaagaagaagttcatcaagagaagaaagagcaacagaagcgccgaccacgccaagcagatgagagagctgctgagcggctgggacgtgagagacgtgaacgccctggtggaggagtacgagggcaccagcgccctgaaggagctgagcctgcaggccagcctggccagacccgaggccagaaccctgcagaaggacatggccgacctgtacgagtacaagtactgcaccgacgtggacctgatcttccaggagacctgcttccccgtgcacagagccatcctggccgccagatgccccttcttcaagaccctgctgagcagcagccccgagtacggcgccgagatcatcatggacatcaacaccgccggcatcgacatgcccatgttcagcgccctgctgcactacctgtacaccggcgagttcggcatggaggacagcagattccagaacgtggacatcctggtgcagctgagcgaggagttcggcacccccaacagcctggacgtggacatgagaggcctgttcgactacatgtgctactacgacgtggtgctgagcttcagcagcgacagcgagctggtggaggccttcggcggcaaccagaactgcctggacgaggagctgaaggcccacaaggccgtgatcagcgccagaagccccttcttcagaaacctgctgcagagaagaatcagaaccggcgaggagatcaccgacagaaccctgagaacccccaccagaatcatcctggacgagagcatcatccccaagaagtacgccaccgtgatcctgcactgcatgtacaccgacgtggtggacctgagcgtgctgcactgcagccccagcgtgggcagcctgagcgaggtgcaggccctggtggccggcaagcccaacatgaccagagccgaggaggccatggagctgtaccacatcgccctgttcctggagttcaacatgctggcccaggaggagaccaccgtgatcagacccgcctgcgccgccgagctgagcaacagctgcctgctgccccagagctag

SEQ ID NO: 74666 - DNA, 3399 bp, synthetic construct
  misc_feature 1..3399: note = Description of Artificial Sequence: Synthetic coding sequence
  source 1..3399: mol_type = other DNA
atgggcgccaacgccagcaactacccccacagctgcagccccagagtgggcggcaacagccaggcccagcagaccttcatcggcaccagcagctacagccagcagggctacggctgcgagagcaagctgtacagcctggaccacggccacgagaagccccaggacaagaagaagagaaccagcggcctggccaccctgaagaagaagttcatcaagagaagaaagagcaacagaagcgccgaccacgccaagcagatgagagagctgctgagcggctgggacgtgagagacgtgaacgccctggtggaggagtacgagggcaccagcgccctgaaggagctgagcctgcaggccagcctggccagacccgaggccagaaccctgcagaaggacatggccgacctgtacgagtacaagtactgcaccgacgtggacctgatcttccaggagacctgcttccccgtgcacagagccatcctggccgccagatgccccttcttcaagaccctgctgagcagcagccccgagtacggcgccgagatcatcatggacatcaacaccgccggcatcgacatgcccatgttcagcgccctgctgcactacctgtacaccggcgagttcggcatggaggacagcagattccagaacgtggacatcctggtgcagctgagcgaggagttcggcacccccaacagcctggacgtggacatgagaggcctgttcgactacatgtgctactacgacgtggtgctgagcttcagcagcgacagcgagctggtggaggccttcggcggcaaccagaactgcctggacgaggagctgaaggcccacaaggccgtgatcagcgccagaagccccttcttcagaaacctgctgcagagaagaatcagaaccggcgaggagatcaccgacagaaccctgagaacccccaccagaatcatcctggacgagagcatcatccccaagaagtacgccaccgtgatcctgcactgcatgtacaccgacgtggtggacctgagcgtgctgcactgcagccccagcgtgggcagcctgagcgaggtgcaggccctggtggccggcaagcccaacatgaccagagccgaggaggccatggagctgtaccacatcgccctgttcctggagttcaacatgctggcccagggctgcgaggacatcatcgccgagagcatcagcctggacaccctgatcgccatcctgaagtggagcagccacccctacggcagcaagtgggtgcacagacaggccctgcacttcctgtgcgaggagttcagccaggtgatgaccagcgacgtgttctacgagctgagcaaggaccacctgctgaccgccatccagagcgactacctgcaggccagcgagcaggacatcctgaagtacctgatcaagtggggcgagcaccagctgatgaagagaatcgccgacagagagcccaacctgctgagcggcaccgcccacagcgtgaacaagagaggcgtgaagagaagagacctggacatggaggagctgagagagatcctgagcagcctgctgcccttcgtgagaatcgagcacatcctgcccatcaacagcgaggtgctgagcgacgccatgaagagaggcctgatcagcaccccccccagcgacatgctgcccaccaccgagggcggcaagagcaacgcctggctgagacagaagaacgccggcatctacgtgagacccagactgttcagcccctacgtggaggaggccaagagcgtgctggacgagatgatggtggagcagaccgacctggtgagactgagaatggtgagaatgagcaacgtgcccgacaccctgtacatggtgaacaacgccgtgccccagtgctgccacatgatcagccaccagcagatcagcagcaaccagagcagcccccccagcgtggtggccaacgagatccccgtgcccagactgctgatcatgaaggacatggtgagaagactgcaggagctgagacacaccgagcaggtgcagagagcctacgccctgaactgcggcgagggcgccaccgtgagctacgagatccagatcagagtgctgagagagttcggcctggccgacgccgccgccgagctgctgcagaacccccacaagttcttccccgacgagagattcggcgacgagagccccctgctgaccatgagacagcccggcagatgcagagtgaacagcaccccccccgccgagaccatgttcaccgacctggacagcttcgtggccttccacccccccctgcccccccccccccccccctaccacccccccgccacccccatccacaaccagctgaaggccggctggaagcagagaccccccagccagcaccccagcagaagcttcagctacccctgcaaccacagcctgttccacagcagaaccgcccccaaggccggccccccccccgtgtacctgcccagcgtgaaggccgccccccccgactgcaccagcaccgccggcctgggcagacagaccgtggccgccgccgccgccaccaccaccagcaccgccaccgccgccgccgccgccgccagcgagaagcaggtgagaacccagcccgtgctgaacgacctgatgcccgacatcgccgtgggcgtgagcaccctgagcctgaaggacagaagactgcccgagctggccgtggacaccgagctgagccagagcgtgagcgaggccggccccggccccccccagcacctgagctgcatcccccagagacacacccacaccagcagaaagaagcacaccctggagcagaagaccgacaccagagagaacccccaggagtaccccgacttctacgacttcagcaacgccgcctgcagacccagcacccccgccctgagcagaagaacccccagccccagccagggcggctacttcggccccgacctgtacagccacaacaaggccagccccagcggcctgaagagcgcctacctgcccggccagaccagccccaagaagcaggaggaggccagaagagagtaccccctgagccccgacggccacctgcacagacagaagaacgagcccatccacctggacgtggtggagcagcccccccagagaagcgacttccccctggccgcccccgagaacgccagcaccggccccgcccacgtgagaggcagaaccgccgtggagaccgacctgaccttcggcctgacccccaacagacccagcctgagcgcctgcagcagcgaggcccccgaggagagaagcggcagaagactggccgacagcgagagcctgggccacggcgcccagagaaacaccgacctggagagagaggacagcatcagcagaggcagaagaagccccagcaagcccgacttcctgtacaagaagagcgccctgtag

SEQ ID NO: 74667 - DNA, 2121 bp, synthetic construct
  misc_feature 1..2121: note = Description of Artificial Sequence: Synthetic coding sequence
  source 1..2121: mol_type = other DNA
atgtacaccgacgtggtggacctgagcgtgctgcactgcagccccagcgtgggcagcctgagcgaggtgcaggccctggtggccggcaagcccaacatgaccagagccgaggaggccatggagctgtaccacatcgccctgttcctggagttcaacatgctggcccaggagcccaacctgctgagcggcaccgcccacagcgtgaacaagagaggcgtgaagagaagagacctggacatggaggagctgagagagatcctgagcagcctgctgcccttcgtgagaatcgagcacatcctgcccatcaacagcgaggtgctgagcgacgccatgaagagaggcctgatcagcaccccccccagcgacatgctgcccaccaccgagggcggcaagagcaacgcctggctgagacagaagaacgccggcatctacgtgagacccagactgttcagcccctacgtggaggaggccaagagcgtgctggacgagatgatggtggagcagaccgacctggtgagactgagaatggtgagaatgagcaacgtgcccgacaccctgtacatggtgaacaacgccgtgccccagtgctgccacatgatcagccaccagcagatcagcagcaaccagagcagcccccccagcgtggtggccaacgagatccccgtgcccagactgctgatcatgaaggacatggtgagaagactgcaggagctgagacacaccgagcaggtgcagagagcctacgccctgaactgcggcgagggcgccaccgtgagctacgagatccagatcagagtgctgagagagttcggcctggccgacgccgccgccgagctgctgcagaacccccacaagttcttccccgacgagagattcggcgacgagagccccctgctgaccatgagacagcccggcagatgcagagtgaacagcaccccccccgccgagaccatgttcaccgacctggacagcttcgtggccttccacccccccctgcccccccccccccccccctaccacccccccgccacccccatccacaaccagctgaaggccggctggaagcagagaccccccagccagcaccccagcagaagcttcagctacccctgcaaccacagcctgttccacagcagaaccgcccccaaggccggccccccccccgtgtacctgcccagcgtgaaggccgccccccccgactgcaccagcaccgccggcctgggcagacagaccgtggccgccgccgccgccaccaccaccagcaccgccaccgccgccgccgccgccgccagcgagaagcaggtgagaacccagcccgtgctgaacgacctgatgcccgacatcgccgtgggcgtgagcaccctgagcctgaaggacagaagactgcccgagctggccgtggacaccgagctgagccagagcgtgagcgaggccggccccggccccccccagcacctgagctgcatcccccagagacacacccacaccagcagaaagaagcacaccctggagcagaagaccgacaccagagagaacccccaggagtaccccgacttctacgacttcagcaacgccgcctgcagacccagcacccccgccctgagcagaagaacccccagccccagccagggcggctacttcggccccgacctgtacagccacaacaaggccagccccagcggcctgaagagcgcctacctgcccggccagaccagccccaagaagcaggaggaggccagaagagagtaccccctgagccccgacggccacctgcacagacagaagaacgagcccatccacctggacgtggtggagcagcccccccagagaagcgacttccccctggccgcccccgagaacgccagcaccggccccgcccacgtgagaggcagaaccgccgtggagaccgacctgaccttcggcctgacccccaacagacccagcctgagcgcctgcagcagcgaggcccccgaggagagaagcggcagaagactggccgacagcgagagcctgggccacggcgcccagagaaacaccgacctggagagagaggacagcatcagcagaggcagaagaagccccagcaagcccgacttcctgtacaagaagagcgccctgtag

SEQ ID NO: 74668 - DNA, 2346 bp, synthetic construct
  misc_feature 1..2346: note = Description of Artificial Sequence: Synthetic coding sequence
  source 1..2346: mol_type = other DNA
atggccggcggcgccggcgccggcgccgacggcggcgccggcggcggcggcggcggcggcgacggcagcggccccagcggcagcagcagcggcggcagaagcctgagaggctgcgaggacatcatcgccgagagcatcagcctggacaccctgatcgccatcctgaagtggagcagccacccctacggcagcaagtgggtgcacagacaggccctgcacttcctgtgcgaggagttcagccaggtgatgaccagcgacgtgttctacgagctgagcaaggaccacctgctgaccgccatccagagcgactacctgcaggccagcgagcaggacatcctgaagtacctgatcaagtggggcgagcaccagctgatgaagagaatcgccgacagagagcccaacctgctgagcggcaccgcccacagcgtgaacaagagaggcgtgaagagaagagacctggacatggaggagctgagagagatcctgagcagcctgctgcccttcgtgagaatcgagcacatcctgcccatcaacagcgaggtgctgagcgacgccatgaagagaggcctgatcagcaccccccccagcgacatgctgcccaccaccgagggcggcaagagcaacgcctggctgagacagaagaacgccggcatctacgtgagacccagactgttcagcccctacgtggaggaggccaagagcgtgctggacgagatgatggtggagcagaccgacctggtgagactgagaatggtgagaatgagcaacgtgcccgacaccctgtacatggtgaacaacgccgtgccccagtgctgccacatgatcagccaccagcagatcagcagcaaccagagcagcccccccagcgtggtggccaacgagatccccgtgcccagactgctgatcatgaaggacatggtgagaagactgcaggagctgagacacaccgagcaggtgcagagagcctacgccctgaactgcggcgagggcgccaccgtgagctacgagatccagatcagagtgctgagagagttcggcctggccgacgccgccgccgagctgctgcagaacccccacaagttcttccccgacgagagattcggcgacgagagccccctgctgaccatgagacagcccggcagatgcagagtgaacagcaccccccccgccgagaccatgttcaccgacctggacagcttcgtggccttccacccccccctgcccccccccccccccccctaccacccccccgccacccccatccacaaccagctgaaggccggctggaagcagagaccccccagccagcaccccagcagaagcttcagctacccctgcaaccacagcctgttccacagcagaaccgcccccaaggccggccccccccccgtgtacctgcccagcgtgaaggccgccccccccgactgcaccagcaccgccggcctgggcagacagaccgtggccgccgccgccgccaccaccaccagcaccgccaccgccgccgccgccgccgccagcgagaagcaggtgagaacccagcccgtgctgaacgacctgatgcccgacatcgccgtgggcgtgagcaccctgagcctgaaggacagaagactgcccgagctggccgtggacaccgagctgagccagagcgtgagcgaggccggccccggccccccccagcacctgagctgcatcccccagagacacacccacaccagcagaaagaagcacaccctggagcagaagaccgacaccagagagaacccccaggagtaccccgacttctacgacttcagcaacgccgcctgcagacccagcacccccgccctgagcagaagaacccccagccccagccagggcggctacttcggccccgacctgtacagccacaacaaggccagccccagcggcctgaagagcgcctacctgcccggccagaccagccccaagaagcaggaggaggccagaagagagtaccccctgagccccgacggccacctgcacagacagaagaacgagcccatccacctggacgtggtggagcagcccccccagagaagcgacttccccctggccgcccccgagaacgccagcaccggccccgcccacgtgagaggcagaaccgccgtggagaccgacctgaccttcggcctgacccccaacagacccagcctgagcgcctgcagcagcgaggcccccgaggagagaagcggcagaagactggccgacagcgagagcctgggccacggcgcccagagaaacaccgacctggagagagaggacagcatcagcagaggcagaagaagccccagcaagcccgacttcctgtacaagaagagcgccctgtag

SEQ ID NO: 74669 - DNA, 168 bp, synthetic construct
  misc_feature 1..168: note = Description of Artificial Sequence: Synthetic coding sequence
  source 1..168: mol_type = other DNA
atgggcgccaacgccagcaactacccccacagctgcagccccagagtgggcggcaacagccaggcccagcagaccttcatcggcaccagcagctacagccagcagggctacggctgcgagagcaagctgtacagcctggaccacggccacgagaagccccaggactag

SEQ ID NO: 74670 - DNA, 1635 bp, synthetic construct
  misc_feature 1..1635: note = Description of Artificial Sequence: Synthetic coding sequence
  source 1..1635: mol_type = other DNA
atgagagagagccagcccgaggccgagatccccctgcaggacaccaccgccgaggccttcaccatgctgctgaagtacatctacaccggcagagccaccctgaccgacgagaaggaggaggtgctgctggacttcctgagcctggcccacaagtacggcttccccgagctggaggacagcaccagcgagtacctgtgcaccatcctgaacatccagaacgtgtgcatgaccttcgacgtggccagcctgtacagcctgcccaagctgacctgcatgtgctgcatgttcatggacagaaacgcccaggaggtgctgagcagcgagggcttcctgagcctgagcaagaccgccctgctgaacatcgtgctgagagacagcttcgccgcccccgagaaggacatcttcctggccctgctgaactggtgcaagcacaacagcaaggagaaccacgccgagatcatgcaggccgtgagactgcccctgatgagcctgaccgagctgctgaacgtggtgagacccagcggcctgctgagccccgacgccatcctggacgccatcaaggtgagaagcgagagcagagacatggacctgaactacagaggcatgctgatccccgaggagaacatcgccaccatgaagtacggcgcccaggtggtgaagggcgagctgaagagcgccctgctggacggcgacacccagaactacgacctggaccacggcttcagcagacaccccatcgacgacgactgcagaagcggcatcgagatcaagctgggccagcccagcatcatcaaccacatcagaatcctgctgtgggacagagacagcagaagctacagctacttcatcgaggtgagcatggacgagctggactgggtgagagtgatcgaccacagccagtacctgtgcagaagctggcagaagctgtacttccccgccagagtgtgcagatacatcagaatcgtgggcacccacaacaccgtgaacaagatcttccacatcgtggccttcgagtgcatgttcaccaacaagaccttcaccctggagaagggcctgatcgtgcccatggagaacgtggccaccatcgccgactgcgccagcgtgatcgagggcgtgagcagaagcagaaacgccctgctgaacggcgacaccaagaactacgactgggacagcggctacacctgccaccagctgggcagcggcgccatcgtggtgcagctggcccagccctacatgatcggcagcatcagactgctgctgtgggactgcgacgacagaagctacagctactacgtggaggtgagcaccaaccagcagcagtggaccatggtggccgacagaaccaaggtgagctgcaagagctggcagagcgtgaccttcgagagacagcccgccagcttcatcagaatcgtgggcacccacaacaccgccaacgaggtgttccactgcgtgcacttcgagtgccccgagcagcagagcagccagaaggaggagaacagcgaggagagcggcaccggcgacaccagcctggccggccagcagctggacagccacgccctgagagcccccagcggcagcagcctgcccagcagccccggcagcaacagcagaagccccaacagacagcaccagtag

SEQ ID NO: 74671 - DNA, 1839 bp, synthetic construct
  misc_feature 1..1839: note = Description of Artificial Sequence: Synthetic coding sequence
  source 1..1839: mol_type = other DNA
atgagcaacagccaccccctgagacccttcaccgccgtgggcgagatcgaccacgtgcacatcctgagcgagcacatcggcgccctgctgatcggcgaggagtacggcgacgtgaccttcgtggtggagaagaagagattccccgcccacagagtgatcctggccgccagatgccagtacttcagagccctgctgtacggcggcatgagagagagccagcccgaggccgagatccccctgcaggacaccaccgccgaggccttcaccatgctgctgaagtacatctacaccggcagagccaccctgaccgacgagaaggaggaggtgctgctggacttcctgagcctggcccacaagtacggcttccccgagctggaggacagcaccagcgagtacctgtgcaccatcctgaacatccagaacgtgtgcatgaccttcgacgtggccagcctgtacagcctgcccaagctgacctgcatgtgctgcatgttcatggacagaaacgcccaggaggtgctgagcagcgagggcttcctgagcctgagcaagaccgccctgctgaacatcgtgctgagagacagcttcgccgcccccgagaaggacatcttcctggccctgctgaactggtgcaagcacaacagcaaggagaaccacgccgagatcatgcaggccgtgagactgcccctgatgagcctgaccgagctgctgaacgtggtgagacccagcggcctgctgagccccgacgccatcctggacgccatcaaggtgagaagcgagagcagagacatggacctgaactacagaggcatgctgatccccgaggagaacatcgccaccatgaagtacggcgcccaggtggtgaagggcgagctgaagagcgccctgctggacggcgacacccagaactacgacctggaccacggcttcagcagacaccccatcgacgacgactgcagaagcggcatcgagatcaagctgggccagcccagcatcatcaaccacatcagaatcctgctgtgggacagagacagcagaagctacagctacttcatcgaggtgagcatggacgagctggactgggtgagagtgatcgaccacagccagtacctgtgcagaagctggcagaagctgtacttccccgccagagtgtgcagatacatcagaatcgtgggcacccacaacaccgtgaacaagatcttccacatcgtggccttcgagtgcatgttcaccaacaagaccttcaccctggagaagggcctgatcgtgcccatggagaacgtggccaccatcgccgactgcgccagcgtgatcgagggcgtgagcagaagcagaaacgccctgctgaacggcgacaccaagaactacgactgggacagcggctacacctgccaccagctgggcagcggcgccatcgtggtgcagctggcccagccctacatgatcggcagcatcagactgctgctgtgggactgcgacgacagaagctacagctactacgtggaggtgagcaccaaccagcagcagtggaccatggtggccgacagaaccaaggtgagctgcaagagctggcagagcgtgaccttcgagagacagcccgccagcttcatcagaatcgtgggcacccacaacaccgccaacgaggtgttccactgcgtgcacttcgagtgccccgagcagcagagcagccagaaggaggagaacagcgaggagagcggcaccggcgacaccagcctggccggccagcagctggacagccacgccctgagagcccccagcggcagcagcctgcccagcagccccggcagcaacagcagaagccccaacagacagcaccagtag

SEQ ID NO: 74672 - DNA, 1635 bp, synthetic construct; identical to SEQ ID NO: 74670
  misc_feature 1..1635: note = Description of Artificial Sequence: Synthetic coding sequence
  source 1..1635: mol_type = other DNA

SEQ ID NO: 74673 - DNA, 1839 bp, synthetic construct; identical to SEQ ID NO: 74671
  misc_feature 1..1839: note = Description of Artificial Sequence: Synthetic coding sequence
  source 1..1839: mol_type = other DNA

SEQ ID NO: 74674 - DNA, 279 bp, synthetic construct
  misc_feature 1..279: note = Description of Artificial Sequence: Synthetic coding sequence
  source 1..279: mol_type = other DNA
atgagcaacagccaccccctgagacccttcaccgccgtgggcgagatcgaccacgtgcacatcctgagcgagcacatcggcgccctgctgatcggcgaggagtacggcgacgtgaccttcgtggtggagaagaagagattccccgcccacagagtgatcctggccgccagatgccagtacttcagagccctgctgtacggcggcatgagagagagccagcccgaggccgagatccccctgcaggacaccaccgccgaggccttcaccatgctgctgtag

SEQ ID NO: 74675 - DNA, 1749 bp, synthetic construct
  misc_feature 1..1749: note = Description of Artificial Sequence: Synthetic coding sequence
  source 1..1749: mol_type = other DNA
atgtgcagagccctgctgtacggcggcatgagagagagccagcccgaggccgagatccccctgcaggacaccaccgccgaggccttcaccatgctgctgaagtacatctacaccggcagagccaccctgaccgacgagaaggaggaggtgctgctggacttcctgagcctggcccacaagtacggcttccccgagctggaggacagcaccagcgagtacctgtgcaccatcctgaacatccagaacgtgtgcatgaccttcgacgtggccagcctgtacagcctgcccaagctgacctgcatgtgctgcatgttcatggacagaaacgcccaggaggtgctgagcagcgagggcttcctgagcctgagcaagaccgccctgctgaacatcgtgctgagagacagcttcgccgcccccgagaaggacatcttcctggccctgctgaactggtgcaagcacaacagcaaggagaaccacgccgagatcatgcaggccgtgagactgcccctgatgagcctgaccgagctgctgaacgtggtgagacccagcggcctgctgagccccgacgccatcctggacgccatcaaggtgagaagcgagagcagagacatggacctgaactacagaggcatgctgatccccgaggagaacatcgccaccatgaagtacggcgcccaggtggtgaagggcgagctgaagagcgccctgctggacggcgacacccagaactacgacctggaccacggcttcagcagacaccccatcgacgacgactgcagaagcggcatcgagatcaagctgggccagcccagcatcatcaaccacatcagaatcctgctgtgggacagagacagcagaagctacagctacttcatcgaggtgagcatggacgagctggactgggtgagagtgatcgaccacagccagtacctgtgcagaagctggcagaagctgtacttccccgccagagtgtgcagcggcgacggcgtgagcctgtggtgccccctgtggagcagaacccccgagctgaagcagagcagcctgctgggcctgcccaagtgcagatacatcagaatcgtgggcacccacaacaccgtgaacaagatcttccacatcgtggccttcgagtgcatgttcaccaacaagaccttcaccctggagaagggcctgatcgtgcccatggagaacgtggccaccatcgccgactgcgccagcgtgatcgagggcgtgagcagaagcagaaacgccctgctgaacggcgacaccaagaactacgactgggacagcggctacacctgccaccagctgggcagcggcgccatcgtggtgcagctggcccagccctacatgatcggcagcatcagactgctgctgtgggactgcgacgacagaagctacagctactacgtggaggtgagcaccaaccagcagcagtggaccatggtggccgacagaaccaaggtgagctgcaagagctggcagagcgtgaccttcgagagacagcccgccagcttcatcagaatcgtgggcacccacaacaccgccaacgaggtgttccactgcgtgcacttcgagtgccccgagcagcagagcagccagaaggaggagaacagcgaggagagcggcaccggcgacaccagcctggccggccagcagctggacagccacgccctgagagcccccagcggcagcagcctgcccagcagccccggcagcaacagcagaagccccaacagacagcaccagtag

SEQ ID NO: 74676 - DNA, 2211 bp, synthetic construct
  misc_feature 1..2211: note = Description of Artificial Sequence: Synthetic coding sequence
  source 1..2211: mol_type = other DNA
atgagcctgagcgagaacagcgtgttcgcctacgagagcagcgtgcacagcaccaacgtgctgctgagcctgaacgaccagagaaagaaggacgtgctgtgcgacgtgaccatcttcgtggagggccagagattcagagcccacagaagcgtgctggccgcctgcagcagctacttccacagcagaatcgtgggccaggccgacggcgagctgaacatcaccctgcccgaggaggtgaccgtgaagggcttcgagcccctgatccagttcgcctacaccgccaagctgatcctgagcaaggagaacgtggacgaggtgtgcaagtgcgtggagttcctgagcgtgcacaacatcgaggagagctgcttccagttcctgaagttcaagttcctggacagcaccgccgaccagcaggagtgccccagaaagaagtgcttcagcagccactgccagaagaccgacctgaagctgagcctgctggaccagagagacctggagaccgacgaggtggaggagttcctggagaacaagaacgtgcagaccccccagtgcaagctgagaagataccagggcaacgccaaggccagcccccccctgcaggacagcgccagccagacctacgagagcatgtgcctggagaaggacgccgccctggccctgcccagcctgtgccccaagtacagaaagttccagaaggccttcggcaccgacagagtgagaaccggcgagagcagcgtgaaggacatccacgccagcgtgcagcccaacgagagaagcgagaacgagtgcctgggcggcgtgcccgagtgcagagacctgcaggtgatgctgaagtgcgacgagagcaagctggccatggagcccgaggagaccaagaaggaccccgccagccagtgccccaccgagaagagcgaggtgacccccttcccccacaacagcagcatcgacccccacggcctgtacagcctgagcctgctgcacacctacgaccagtacggcgacctgaacttcgccggcatgcagaacaccaccgtgctgaccgagaagcccctgagcggcaccgacgtgcaggagaagaccttcggcgagagccaggacctgcccctgaagagcgacctgggcaccagagaggacagcagcgtggccagcagcgacagaagcagcgtggagagagaggtggccgagcacctggccaagggcttctggagcgacatctgcagcaccgacaccccctgccagatgcagctgagccccgccgtggccaaggacggcagcgagcagatcagccagaagagaagcgagtgcccctggctgggcatcagaatcagcgagagccccgagcccggccagagaaccttcaccaccctgagcagcgtgaactgccccttcatcagcaccctgagcaccgagggctgcagcagcaacctggagatcggcaacgacgactacgtgagcgagccccagcaggagccctgcccctacgcctgcgtgatcagcctgggcgacgacagcgagaccgacaccgagggcgacagcgagagctgcagcgccagagagcaggagtgcgaggtgaagctgcccttcaacgcccagagaatcatcagcctgagcagaaacgacttccagagcctgctgaagatgcacaagctgacccccgagcagctggactgcatccacgacatcagaagaagaagcaagaacagaatcgccgcccagagatgcagaaagagaaagctggactgcatccagaacctggagagcgagatcgagaagctgcagagcgagaaggagagcctgctgaaggagagagaccacatcctgagcaccctgggcgagaccaagcagaacctgaccggcctgtgccagaaggtgtgcaaggaggccgccctgagccaggagcagatccagatcctggccaagtacagcgccgccgactgccccctgagcttcctgatcagcgagaaggacaagagcacccccgacggcgagctggccctgcccagcatcttcagcctgagcgacagaccccccgccgtgctgcccccctgcgccagaggcaacagcgagcccggctacgccagaggccaggagagccagcagatgagcaccgccaccagcgagcaggccggccccgccgagcagtgcagacagagcggcggcatcagcgacttctgccagcagatgaccgacaagtgcaccaccgacgagtag

SEQ ID NO: 74677 - DNA, 2211 bp, synthetic construct; identical to SEQ ID NO: 74676
  misc_feature 1..2211: note = Description of Artificial Sequence: Synthetic coding sequence
  source 1..2211: mol_type = other DNA

SEQ ID NO: 74678 - DNA, 513 bp, synthetic construct
  misc_feature 1..513: note = Description of Artificial Sequence: Synthetic coding sequence
  source 1..513: mol_type = other DNA
atgagcctgagcgagaacagcgtgttcgcctacgagagcagcgtgcacagcaccaacgtgctgctgagcctgaacgaccagagaaagaaggacgtgctgtgcgacgtgaccatcttcgtggagggccagagattcagagcccacagaagcgtgctggccgcctgcagcagctacttccacagcagaatcgtgggccaggccgacggcgagctgaacatcaccctgcccgaggaggtgaccgtgaagggcttcgagcccctgatccagttcgcctacaccgccaagctgatcctgagcaaggagaacgtggacgaggtgtgcaagtgcgtggagttcctgagcgtgcacaacatcgaggagagctgcttccagttcctgaagttcaagttcctggacagcaccgccgaccagcaggagtgccccagaaagaagtgcttcagcagccactgccagaagaccgacctgaagctgagcctgctggaccagagagacctggagaccgacgaggtgtag

SEQ ID NO: 74679 - DNA, 663 bp, synthetic construct
  misc_feature 1..663: note = Description of Artificial Sequence: Synthetic coding sequence
  source 1..663: mol_type = other DNA
atgagcctgagcgagaacagcgtgttcgcctacgagagcagcgtgcacagcaccaacgtgctgctgagcctgaacgaccagagaaagaaggacgtgctgtgcgacgtgaccatcttcgtggagggccagagattcagagcccacagaagcgtgctggccgcctgcagcagctacttccacagcagaatcgtgggccaggccgacggcgagctgaacatcaccctgcccgaggaggtgaccgtgaagggcttcgagcccctgatccagttcgcctacaccgccaagctgatcctgagcaaggagaacgtggacgaggtgtgcaagtgcgtggagttcctgagcgtgcacaacatcgaggagagctgcttccagttcctgaagttcaagttcctggacagcaccgccgaccagcaggagtgccccagaaagaagtgcttcagcagccactgccagaagaccgacctgaagctgagcctgctggaccagagagacctggagaccgacgaggtggaggagttcctggagaacaagaacgtgcagaccccccagtgcaagctgagaagataccagggcaacgccaaggccagcccccccctgcaggacagcgccagccagacctacgagagcatgtgcctggagaaggacgccgccctggccctgtag

SEQ ID NO: 74680 - DNA, 678 bp, synthetic construct
  misc_feature 1..678: note = Description of Artificial Sequence: Synthetic coding sequence
  source 1..678: mol_type = other DNA
atgagcctgagcgagaacagcgtgttcgcctacgagagcagcgtgcacagcaccaacgtgctgctgagcctgaacgaccagagaaagaaggacgtgctgtgcgacgtgaccatcttcgtggagggccagagattcagagcccacagaagcgtgctggccgcctgcagcagctacttccacagcagaatcgtgggccaggccgacggcgagctgaacatcaccctgcccgaggaggtgaccgtgaagggcttcgagcccctgatccagttcgcctacaccgccaagctgatcctgagcaaggagaacgtggacgaggtgtgcaagtgcgtggagttcctgagcgtgcacaacatcgaggagagctgcttccagttcctgaagttcaagttcctggacagcaccgccgaccagcaggagtgccccagaaagaagtgcttcagcagccactgccagaagaccgacctgaagctgagcctgctggaccagagagacctggagaccgacgaggtggaggagttcctggagaacaagaacgtgcagaccccccagtgcaagctgagaagataccagggcaacgccaaggccagcccccccctgcaggacagcgccagccagacctacgagagcatgtgcctggagaaggacgccgccctggccctgcccagcctgtgcccctag

SEQ ID NO: 74681 - DNA, 78 bp, synthetic construct
  misc_feature 1..78: note = Description of Artificial Sequence: Synthetic coding sequence
  source 1..78: mol_type = other DNA
atgagcctgagcgagaacagcgtgttcgcctacgagagcagcgtgcacagcaccaacgtgctgctgagcctgaactag

SEQ ID NO: 74682 - DNA, 78 bp, synthetic construct; identical to SEQ ID NO: 74681
  misc_feature 1..78: note = Description of Artificial Sequence: Synthetic coding sequence
  source 1..78: mol_type = other DNA

SEQ ID NO: 74683 - DNA, 78 bp, synthetic construct; identical to SEQ ID NO: 74681
  misc_feature 1..78: note = Description of Artificial Sequence: Synthetic coding sequence
  source 1..78: mol_type = other DNA

SEQ ID NO: 74684 - DNA, 78 bp, synthetic construct; identical to SEQ ID NO: 74681
  misc_feature 1..78: note = Description of Artificial Sequence: Synthetic coding sequence
  source 1..78: mol_type = other DNA

SEQ ID NO: 74685 - DNA, 78 bp, synthetic construct; identical to SEQ ID NO: 74681
  misc_feature 1..78: note = Description of Artificial Sequence: Synthetic coding sequence
  source 1..78: mol_type = other DNA

SEQ ID NO: 74686 - DNA, 2526 bp, synthetic construct
  misc_feature 1..2526: note = Description of Artificial Sequence: Synthetic coding sequence
  source 1..2526: mol_type = other DNA
atgagcgtggacgagaagcccgacagccccatgtacgtgtacgagagcaccgtgcactgcaccaacatcctgctgggcctgaacgaccagagaaagaaggacatcctgtgcgacgtgaccctgatcgtggagagaaaggagttcagagcccacagagccgtgctggccgcctgcagcgagtacttctggcaggccctggtgggccagaccaagaacgacctggtggtgagcctgcccgaggaggtgaccgccagaggcttcggccccctgctgcagttcgcctacaccgccaagctgctgctgagcagagagaacatcagagaggtgatcagatgcgccgagttcctgagaatgcacaacctggaggacagctgcttcagcttcctgcagacccagctgctgaacagcgaggacggcctgttcgtgtgcagaaaggacgccgcctgccagagaccccacgaggactgcgagaacagcgccggcgaggaggaggacgaggaggaggagaccatggacagcgagaccgccaagatggcctgccccagagaccagatgctgcccgagcccatcagcttcgaggccgccgccatccccgtggccgagaaggaggaggccctgctgcccgagcccgacgtgcccaccgacaccaaggagagcagcgagaaggacgccctgacccagtaccccagatacaagaagtaccagctggcctgcaccaagaacgtgtacaacgccagcagccacagcaccagcggcttcgccagcaccttcagagaggacaacagcagcaacagcctgaagcccggcctggccagaggccagatcaagagcgagccccccagcgaggagaacgaggaggagagcatcaccctgtgcctgagcggcgacgagcccgacgccaaggacagagccggcgacgtggagatggacagaaagcagcccagccccgcccccacccccaccgcccccgccggcgccgcctgcctggagagaagcagaagcgtggccagccccagctgcctgagaagcctgttcagcatcaccaagagcgtggagctgagcggcctgcccagcaccagccagcagcacttcgccagaagccccgcctgccccttcgacaagggcatcacccagggcgacctgaagaccgactacacccccttcaccggcaactacggccagccccacgtgggccagaaggaggtgagcaacttcaccatgggcagccccctgagaggccccggcctggaggccctgtgcaagcaggagggcgagctggacagaagaagcgtgatcttcagcagcagcgcctgcgaccaggtgagcaccagcgtgcacagctacagcggcgtgagcagcctggacaaggacctgagcgagcccgtgcccaagggcctgtgggtgggcgccggccagagcctgcccagcagccaggcctacagccacggcggcctgatggccgaccacctgcccggcagaatgagacccaacaccagctgccccgtgcccatcaaggtgtgccccagaagcccccccctggagaccagaaccagaaccagcagcagctgcagcagctacagctacgccgaggacggcagcggcggcagcccctgcagcctgcccctgtgcgagttcagcagcagcccctgcagccagggcgccagattcctggccaccgagcaccaggagcccggcctgatgggcgacggcatgtacaaccaggtgagaccccagatcaagtgcgagcagagctacggcaccaacagcagcgacgagagcggcagcttcagcgaggccgacagcgagagctgccccgtgcaggacagaggccaggaggtgaagctgcccttccccgtggaccagatcaccgacctgcccagaaacgacttccagatgatgatcaagatgcacaagctgaccagcgagcagctggagttcatccacgacgtgagaagaagaagcaagaacagaatcgccgcccagagatgcagaaagagaaagctggactgcatccagaacctggagtgcgagatcagaaagctggtgtgcgagaaggagaagctgctgagcgagagaaaccagctgaaggcctgcatgggcgagctgctggacaacttcagctgcctgagccaggaggtgtgcagagacatccagagccccgagcagatccaggccctgcacagatactgccccgtgctgagacccatggacctgcccaccgccagcagcatcaaccccgcccccctgggcgccgagcagaacatcgccgccagccagtgcgccgtgggcgagaacgtgccctgctgcctggagcccggcgccgccccccccggccccccctgggcccccagcaacaccagcgagaactgcaccagcggcagaagactggagggcaccgaccccggcaccttcagcgagagaggcccccccctggagcccagaagccagaccgtgaccgtggacttctgccaggagatgaccgacaagtgcaccaccgacgagcagcccagaaaggactacacctag

SEQ ID NO: 74687 - DNA, 2526 bp, synthetic construct; identical to SEQ ID NO: 74686
  misc_feature 1..2526: note = Description of Artificial Sequence: Synthetic coding sequence
  source 1..2526: mol_type = other DNA

SEQ ID NO: 74688 - DNA, 246 bp, synthetic construct
  misc_feature 1..246: note = Description of Artificial Sequence: Synthetic coding sequence
  source 1..246: mol_type = other DNA
atgagcgtggacgagaagcccgacagccccatgtacgtgtacgagagcaccgtgcactgcaccaacatcctgctgggcctgaacgaccagagaaagaaggacatcctgtgcgacgtgaccctgatcgtggagagaaaggagttcagagcccacagagccgtgctggccgcctgcagcgagtacttctggcaggccctggtgggccagaccaagaacgacctggtggtgagcctgcccgaggagtag

SEQ ID NO: 74689 - DNA, 246 bp, synthetic construct; identical to SEQ ID NO: 74688
  misc_feature 1..246: note = Description of Artificial Sequence: Synthetic coding sequence
  source 1..246: mol_type = other DNA

SEQ ID NO: 74690 - DNA, 2526 bp, synthetic construct; identical to SEQ ID NO: 74686
  misc_feature 1..2526: note = Description of Artificial Sequence: Synthetic coding sequence
  source 1..2526: mol_type = other DNA

SEQ ID NO: 74691 - DNA, 477 bp, synthetic construct
  misc_feature 1..477: note = Description of Artificial Sequence: Synthetic coding sequence
  source 1..477: mol_type = other DNA
atgagccacggcaagggcaccgacatgctgcccgagatcgccgccgccgtgggcttcctgagcagcctgctgagaaccagaggctgcgtgagcgagcagagactgaaggtgttcagcggcgccctgcaggaggccctgaccgagcactacaagcaccactggttccccgagaagcccagcaagggcagcggctacagatgcatcagaatcaaccacaagatggaccccatcatcagcagagtggccagccagatcggcctgagccagccccagctgcaccagctgctgcccagcgagctgaccctgtgggtggacccctacgaggtgagctacagaatcggcgaggacggcagcatctgcgtgctgtacgaggaggcccccctggccgccagctgcggcctgctgacctgcaagaaccaggtgctgctgggcagaagcagccccagcaagaactacgtgatggccgtgagcagctag

SEQ ID NO: 74692 - DNA, 3258 bp, synthetic construct
  misc_feature 1..3258: note = Description of Artificial Sequence: Synthetic coding sequence
  source 1..3258: mol_type = other DNA
atggacacccccgagaacgtgctgcagatgctggaggcccacatgcagagctacaagggcaacgaccccctgggcgagtgggagagatacatccagtgggtggaggagaacttccccgagaacaaggagtacctgatcaccctgctggagcacctgatgaaggagttcctggacaagaagaagtaccacaacgaccccagattcatcagctactgcctgaagttcgccgagtacaacagcgacctgcaccagttcttcgagttcctgtacaaccacggcatcggcaccctgagcagccccctgtacatcgcctgggccggccacctggaggcccagggcgagctgcagcacgccagcgccgtgctgcagagaggcatccagaaccaggccgagcccagagagttcctgcagcagcagtacagactgttccagaccagactgaccgagacccacctgcccgcccaggccagaaccagcgagcccctgcacaacgtgcaggtgctgaaccagatgatcaccagcaagagcaaccccggcaacaacatggcctgcatcagcaagaaccagggcagcgagctgagcggcgtgatcagcagcgcctgcgacaaggagagcaacatggagagaagagtgatcaccatcagcaagagcgagtacagcgtgcacagcagcctggccagcaaggtggacgtggagcaggtggtgatgtactgcaaggagaagctgatcagaggcgagagcgagttcagcttcgaggagctgagagcccagaagtacaaccagagaagaaagcacgagcagtgggtgaacgaggacagacactacatgaagagaaaggaggccaacgccttcgaggagcagctgctgaagcagaagatggacgagctgcacaagaagctgcaccaggtggtggagaccagccacgaggacctgcccgccagccaggagagaagcgaggtgaaccccgccagaatgggccccagcgtgggcagccagcaggagctgagagccccctgcctgcccgtgacctaccagcagacccccgtgaacatggagaagaaccccagagaggccccccccgtggtgccccccctggccaacgccatcagcgccgccctggtgagccccgccaccagccagagcatcgccccccccgtgcccctgaaggcccagaccgtgaccgacagcatgttcgccgtggccagcaaggacgccggctgcgtgaacaagagcacccacgagttcaagccccagagcggcgccgagatcaaggagggctgcgagacccacaaggtggccaacaccagcagcttccacaccacccccaacaccagcctgggcatggtgcaggccacccccagcaaggtgcagcccagccccaccgtgcacaccaaggaggccctgggcttcatcatgaacatgttccaggcccccaccctgcccgacatcagcgacgacaaggacgagtggcagagcctggaccagaacgaggacgccttcgaggcccagttccagaagaacgtgagaagcagcggcgcctggggcgtgaacaagatcatcagcagcctgagcagcgccttccacgtgttcgaggacggcaacaaggagaactacggcctgccccagcccaagaacaagcccaccggcgccagaaccttcggcgagagaagcgtgagcagactgcccagcaagcccaaggaggaggtgccccacgccgaggagttcctggacgacagcaccgtgtggggcatcagatgcaacaagaccctggcccccagccccaagagccccggcgacttcaccagcgccgcccagctggccagcacccccttccacaagctgcccgtggagagcgtgcacatcctggaggacaaggagaacgtggtggccaagcagtgcacccaggccaccctggacagctgcgaggagaacatggtggtgcccagcagagacggcaagttcagccccatccaggagaagagccccaagcaggccctgagcagccacatgtacagcgccagcctgctgagactgagccagcccgccgccggcggcgtgctgacctgcgaggccgagctgggcgtggaggcctgcagactgaccgacaccgacgccgccatcgccgaggacccccccgacgccatcgccggcctgcaggccgagtggatgcagatgagcagcctgggcaccgtggacgcccccaacttcatcgtgggcaacccctgggacgacaagctgatcttcaagctgctgagcggcctgagcaagcccgtgagcagctaccccaacaccttcgagtggcagtgcaagctgcccgccatcaagcccaagaccgagttccagctgggcagcaagctggtgtacgtgcaccacctgctgggcgagggcgccttcgcccaggtgtacgaggccacccagggcgacctgaacgacgccaagaacaagcagaagttcgtgctgaaggtgcagaagcccgccaacccctgggagttctacatcggcacccagctgatggagagactgaagcccagcatgcagcacatgttcatgaagttctacagcgcccacctgttccagaacggcagcgtgctggtgggcgagctgtacagctacggcaccctgctgaacgccatcaacctgtacaagaacacccccgagaaggtgatgccccagggcctggtgatcagcttcgccatgagaatgctgtacatgatcgagcaggtgcacgactgcgagatcatccacggcgacatcaagcccgacaacttcatcctgggcaacggcttcctggagcaggacgacgaggacgacctgagcgccggcctggccctgatcgacctgggccagagcatcgacatgaagctgttccccaagggcaccatcttcaccgccaagtgcgagaccagcggcttccagtgcgtggagatgctgagcaacaagccctggaactaccagatcgactacttcggcgtggccgccaccgtgtactgcatgctgttcggcacctacatgaaggtgaagaacgagggcggcgagtgcaagcccgagggcctgttcagaagactgccccacctggacatgtggaacgagttcttccacgtgatgctgaacatccccgactgccaccacctgcccagcctggacctgctgagacagaagctgaagaaggtgttccagcagcactacaccaacaagatcagagccctgagaaacagactgatcgtgctgctgctggagtgcaagagaagcagaaagtag

SEQ ID NO: 74693 - DNA, 3087 bp, synthetic construct
  misc_feature 1..3087: note = Description of Artificial Sequence: Synthetic coding sequence
  source 1..3087: mol_type = other DNA
atggacacccccgagaacgtgctgcagatgctggaggcccacatgcagagctacaagggcaacgaccccctgggcgagtgggagagatacatccagtgggtggaggagaacttccccgagaacaaggagtacctgatcaccctgctggagcacctgatgaaggagttcctggacaagaagaagtaccacaacgaccccagattcatcagctactgcctgaagttcgccgagtacaacagcgacctgcaccagttcttcgagttcctgtacaaccacggcatcggcaccctgagcagccccctgtacatcgcctgggccggccacctggaggcccagggcgagctgcagcacgccagcgccgtgctgcagagaggcatccagaaccaggccgagcccagagagttcctgcagcagcagtacagactgttccagaccagactgaccgagacccacctgcccgcccaggccagaaccagcgagcccctgcacaacgtgcaggtgctgaaccagatgatcaccagcaagagcaaccccggcaacaacatggcctgcatcagcaagaaccagggcagcgagctgagcggcgtgatcagcagcgcctgcgacaaggagagcaacatggagagaagagtgatcaccatcagcaagagcgagtacagcgtgcacagcagcctggccagcaaggtggacgtggagcaggtggtgatgtactgcaaggagaagctgatcagaggcgagagcgagttcagcttcgaggagctgagagcccagaagtacaaccagagaagaaagcacgagcagtgggtgaacgaggacagacactacatgaagagaaaggaggccaacgccttcgaggagcagctgctgaagcagaagatggacgagctgcacaagaagctgcaccaggtggtggagaccagccacgaggacctgcccgccagccaggagagaagcgaggtgaaccccgccagaatgggccccagcgtgggcagccagcaggagctgagagccccctgcctgcccgtgacctaccagcagacccccgtgaacatggagaagaaccccagagaggccccccccgtggtgccccccctggccaacgccatcagcgccgccctggtgagccccgccaccagccagagcatcgccccccccgtgcccctgaaggcccagaccgtgaccgacagcatgttcgccgtggccagcaaggacgccggctgcgtgaacaagagcacccacgagttcaagccccagagcggcgccgagatcaaggagggctgcgagacccacaaggtggccaacaccagcagcttccacaccacccccaacaccagcctgggcatggtgcaggccacccccagcaaggtgcagcccagccccaccgtgcacaccaaggaggccctgggcttcatcatgaacatgttccaggcccccaccctgcccgacatcagcgacgacaaggacgagtggcagagcctggaccagaacgaggacgccttcgaggcccagttccagaagaacgtgagaagcagcggcgcctggggcgtgaacaagatcatcagcagcctgagcagcgccttccacgtgttcgaggacggcaacaaggagaactacggcctgccccagcccaagaacaagcccaccggcgccagaaccttcggcgagagaagcgtgagcagactgcccagcaagcccaaggaggaggtgccccacgccgaggagttcctggacgacagcaccgtgtggggcatcagatgcaacaagaccctggcccccagccccaagagccccggcgacttcaccagcgccgcccagctggccagcacccccttccacaagctgcccgtggagagcgtgcacatcctggaggacaaggagaacgtggtggccaagcagtgcacccaggccaccctggacagctgcgaggagaacatggtggtgcccagcagagacggcaagttcagccccatccaggagaagagccccaagcaggccctgagcagccacatgtacagcgccagcctgctgagactgagccagcccgccgccggcggcgtgctgacctgcgaggccgagctgggcgtggaggcctgcagactgaccgacaccgacgccgccatcgccgaggacccccccgacgccatcgccggcctgcaggccgagtggatgcagatgagcagcctgggcaccgtggacgcccccaacttcatcgtgggcaacccctgggacgacaagctgatcttcaagctgctgagcggcctgagcaagcccgtgagcagctaccccaacaccttcgagtggcagtgcaagctgcccgccatcaagcccaagaccgagttccagctgggcagcaagctggtgtacgtgcaccacctgctgggcgagggcgccttcgcccaggtgtacgaggccacccagggcgacctgaacgacgccaagaacaagcagaagttcgtgctgaaggtgcagaagcccgccaacccctgggagttctacatcggcacccagctgatggagagactgaagcccagcatgcagcacatgttcatgaagttctacagcgcccacctgttccagaacggcagcgtgctggtgggcgagctgtacagctacggcaccctgctggacgacgaggacgacctgagcgccggcctggccctgatcgacctgggccagagcatcgacatgaagctgttccccaagggcaccatcttcaccgccaagtgcgagaccagcggcttccagtgcgtggagatgctgagcaacaagccctggaactaccagatcgactacttcggcgtggccgccaccgtgtactgcatgctgttcggcacctacatgaaggtgaagaacgagggcggcgagtgcaagcccgagggcctgttcagaagactgccccacctggacatgtggaacgagttcttccacgtgatgctgaacatccccgactgccaccacctgcccagcctggacctgctgagacagaagctgaagaaggtgttccagcagcactacaccaacaagatcagagccctgagaaacagactgatcgtgctgctgctggagtgcaagagaagcagaaagtag

SEQ ID NO: 74694 - DNA, 3198 bp, synthetic construct
  misc_feature 1..3198: note = Description of Artificial Sequence: Synthetic coding sequence
  source 1..3198: mol_type = other DNA
atggacacccccgagaacgtgctgcagtacatccagtgggtggaggagaacttccccgagaacaaggagtacctgatcaccctgctggagcacctgatgaaggagttcctggacaagaagaagtaccacaacgaccccagattcatcagctactgcctgaagttcgccgagtacaacagcgacctgcaccagttcttcgagttcctgtacaaccacggcatcggcaccctgagcagccccctgtacatcgcctgggccggccacctggaggcccagggcgagctgcagcacgccagcgccgtgctgcagagaggcatccagaaccaggccgagcccagagagttcctgcagcagcagtacagactgttccagaccagactgaccgagacccacctgcccgcccaggccagaaccagcgagcccctgcacaacgtgcaggtgctgaaccagatgatcaccagcaagagcaaccccggcaacaacatggcctgcatcagcaagaaccagggcagcgagctgagcggcgtgatcagcagcgcctgcgacaaggagagcaacatggagagaagagtgatcaccatcagcaagagcgagtacagcgtgcacagcagcctggccagcaaggtggacgtggagcaggtggtgatgtactgcaaggagaagctgatcagaggcgagagcgagttcagcttcgaggagctgagagcccagaagtacaaccagagaagaaagcacgagcagtgggtgaacgaggacagacactacatgaagagaaaggaggccaacgccttcgaggagcagctgctgaagcagaagatggacgagctgcacaagaagctgcaccaggtggtggagaccagccacgaggacctgcccgccagccaggagagaagcgaggtgaaccccgccagaatgggccccagcgtgggcagccagcaggagctgagagccccctgcctgcccgtgacctaccagcagacccccgtgaacatggagaagaaccccagagaggccccccccgtggtgccccccctggccaacgccatcagcgccgccctggtgagccccgccaccagccagagcatcgccccccccgtgcccctgaaggcccagaccgtgaccgacagcatgttcgccgtggccagcaaggacgccggctgcgtgaacaagagcacccacgagttcaagccccagagcggcgccgagatcaaggagggctgcgagacccacaaggtggccaacaccagcagcttccacaccacccccaacaccagcctgggcatggtgcaggccacccccagcaaggtgcagcccagccccaccgtgcacaccaaggaggccctgggcttcatcatgaacatgttccaggcccccaccctgcccgacatcagcgacgacaaggacgagtggcagagcctggaccagaacgaggacgccttcgaggcccagttccagaagaacgtgagaagcagcggcgcctggggcgtgaacaagatcatcagcagcctgagcagcgccttccacgtgttcgaggacggcaacaaggagaactacggcctgccccagcccaagaacaagcccaccggcgccagaaccttcggcgagagaagcgtgagcagactgcccagcaagcccaaggaggaggtgccccacgccgaggagttcctggacgacagcaccgtgtggggcatcagatgcaacaagaccctggcccccagccccaagagccccggcgacttcaccagcgccgcccagctggccagcacccccttccacaagctgcccgtggagagcgtgcacatcctggaggacaaggagaacgtggtggccaagcagtgcacccaggccaccctggacagctgcgaggagaacatggtggtgcccagcagagacggcaagttcagccccatccaggagaagagccccaagcaggccctgagcagccacatgtacagcgccagcctgctgagactgagccagcccgccgccggcggcgtgctgacctgcgaggccgagctgggcgtggaggcctgcagactgaccgacaccgacgccgccatcgccgaggacccccccgacgccatcgccggcctgcaggccgagtggatgcagatgagcagcctgggcaccgtggacgcccccaacttcatcgtgggcaacccctgggacgacaagctgatcttcaagctgctgagcggcctgagcaagcccgtgagcagctaccccaacaccttcgagtggcagtgcaagctgcccgccatcaagcccaagaccgagttccagctgggcagcaagctggtgtacgtgcaccacctgctgggcgagggcgccttcgcccaggtgtacgaggccacccagggcgacctgaacgacgccaagaacaagcagaagttcgtgctgaaggtgcagaagcccgccaacccctgggagttctacatcggcacccagctgatggagagactgaagcccagcatgcagcacatgttcatgaagttctacagcgcccacctgttccagaacggcagcgtgctggtgggcgagctgtacagctacggcaccctgctgaacgccatcaacctgtacaagaacacccccgagaaggtgatgccccagggcctggtgatcagcttcgccatgagaatgctgtacatgatcgagcaggtgcacgactgcgagatcatccacggcgacatcaagcccgacaacttcatcctgggcaacggcttcctggagcaggacgacgaggacgacctgagcgccggcctggccctgatcgacctgggccagagcatcgacatgaagctgttccccaagggcaccatcttcaccgccaagtgcgagaccagcggcttccagtgcgtggagatgctgagcaacaagccctggaactaccagatcgactacttcggcgtggccgccaccgtgtactgcatgctgttcggcacctacatgaaggtgaagaacgagggcggcgagtgcaagcccgagggcctgttcagaagactgccccacctggacatgtggaacgagttcttccacgtgatgctgaacatccccgactgccaccacctgcccagcctggacctgctgagacagaagctgaagaaggtgttccagcagcactacaccaacaagatcagagccctgagaaacagactgatcgtgctgctgctggagtgcaagagaagcagaaagtag

SEQ ID NO: 74695 - DNA, 2475 bp, synthetic construct
  misc_feature 1..2475: note = Description of Artificial Sequence: Synthetic coding sequence
  source 1..2475: mol_type = other DNA
atggacacccccgagaacgtgctgcagatgctggaggcccacatgcagagctacaagggcaacgaccccctgggcgagtgggagagatacatccagtgggtggaggagaacttccccgagaacaaggagtacctgatcaccctgctggagcacctgatgaaggagttcctggacaagaagaagtaccacaacgaccccagattcatcagctactgcctgaagttcgccgagtacaacagcgacctgcaccagttcttcgagttcctgtacaaccacggcatcggcaccctgagcagccccctgtacatcgcctgggccggccacctggaggcccagggcgagctgcagcacgccagcgccgtgctgcagagaggcatccagaaccaggccgagcccagagagttcctgcagcagcagtacagactgttccagaccagactgaccgagacccacctgcccgcccaggccagaaccagcgagcccctgcacaacgtgcaggtgctgaaccagatgatcaccagcaagagcaaccccggcaacaacatggcctgcatcagcaagaaccagggcagcgagctgagcggcgtgatcagcagcgcctgcgacaaggagagcaacatggagagaagagtgatcaccatcagcaagagcgagtacagcgtgcacagcagcctggccagcaaggtggacgtggagcaggtggtgatgtactgcaaggagaagctgatcagaggcgagagcgagttcagcttcgaggagctgagagcccagaagtacaaccagagaagaaagcacgagcagtgggtgaacgaggacagacactacatgaagagaaaggaggccaacgccttcgaggagcagctgctgaagcagaagatggacgagctgcacaagaagctgcaccaggtggtggagaccagccacgaggacctgcccgccagccaggagagaagcgaggtgaaccccgccagaatgggccccagcgtgggcagccagcaggagctgagagccccctgcctgcccgtgacctaccagcagacccccgtgaacatggagaagaaccccagagaggccccccccgtggtgccccccctggccaacgccatcagcgccgccctggtgagccccgccaccagccagagcatcgccccccccgtgcccctgaaggcccagaccgtgaccgacagcatgttcgccgtggccagcaaggacgccggctgcgtgaacaagagcacccacgagttcaagccccagagcggcgccgagatcaaggagggctgcgagacccacaaggtggccaacaccagcagcttccacaccacccccaacaccagcctgggcatggtgcaggccacccccagcaaggtgcagcccagccccaccgtgcacaccaaggaggccctgggcttcatcatgaacatgttccaggcccccaccctgcccgacatcagcgacgacaaggacgagtggcagagcctggaccagaacgaggacgccttcgaggcccagttccagaagaacgtgagaagcagcggcgcctggggcgtgaacaagatcatcagcagcctgagcagcgccttccacgtgttcgaggacggcaacaaggagaactacggcctgccccagcccaagaacaagcccaccggcgccagaaccttcggcgagagaagcgtgagcagactgcccagcaagcccaaggaggaggtgccccacgccgaggagttcctggacgacagcaccgtgtggggcatcagatgcaacaagaccctggcccccagccccaagagccccggcgacttcaccagcgccgcccagctggccagcacccccttccacaagctgcccgtggagagcgtgcacatcctggaggacaaggagaacgtggtggccaagcagtgcacccaggccaccctggacagctgcgaggagaacatggtggtgcccagcagagacggcaagttcagccccatccaggagaagagccccaagcaggccctgagcagccacatgtacagcgccagcctgctgagactgagccagcccgccgccggcggcgtgctgacctgcgaggccgagctgggcgtggaggcctgcagactgaccgacaccgacgccgccatcgccgaggacccccccgacgccatcgccggcctgcaggccgagtggatgcagatgagcagcctgggcaccgtggacgcccccaacttcatcgtgggcaacccctgggacgacaagctgatcttcaagctgctgagcggcctgagcaagcccgtgagcagctaccccaacaccttcgagtggcagtgcaagctgcccgccatcaagcccaagaccgagttccagctgggcagcaagctggtgtacgtgcaccacctgctgggcgagggcgccttcgcccaggtgtacgaggccacccagggcgacctgaacgacgccaagaacaagcagaagttcgtgctgaaggtgaagagctag

SEQ ID NO: 74696 - DNA, 981 bp, synthetic construct
  misc_feature 1..981: note = Description of Artificial Sequence: Synthetic coding sequence
  source 1..981: mol_type = other DNA
atgaccggcagcaacgagttcaagctgaaccagccccccgaggacggcatcagcagcgtgaagttcagccccaacaccagccagttcctgctggtgagcagctgggacaccagcgtgagactgtacgacgtgcccgccaacagcatgagactgaagtaccagcacaccggcgccgtgctggactgcgccttctacgaccccacccacgcctggagcggcggcctggaccaccagctgaagatgcacgacctgaacaccgaccaggagaacctggtgggcacccacgacgcccccatcagatgcgtggagtactgccccgaggtgaacgtgatggtgaccggcagctgggaccagaccgtgaagctgtgggaccccagaaccccctgcaacgccggcaccttcagccagcccgagaaggtgtacaccctgagcgtgagcggcgacagactgatcgtgggcaccgccggcagaagagtgctggtgtgggacctgagaaacatgggctacgtgcagcagagaagagagagcagcctgaagtaccagaccagatgcatcagagccttccccaacaagcagggctacgtgctgagcagcatcgagggcagagtggccgtggagtacctggaccccagccccgaggtgcagaagaagaagtacgccttcaagtgccacagactgaaggagaacaacatcgagcagatctaccccgtgaacgccatcagcttccacaacatccacaacaccttcgccaccggcggcagcgacggcttcgtgaacatctgggaccccttcaacaagaagagactgtgccagttccacagataccccaccagcatcgccagcctggccttcagcaacgacggcaccaccctggccatcgccagcagctacatgtacgagatggacgacaccgagcaccccgaggacggcatcttcatcagacaggtgaccgacgccgagaccaagcccaagagcacctag

SEQ ID NO: 74697 - DNA, 987 bp, synthetic construct
  misc_feature 1..987: note = Description of Artificial Sequence: Synthetic coding sequence
  source 1..987: mol_type = other DNA
atgaccggcagcaacgagttcaagctgaaccagccccccgaggacggcatcagcagcgtgaagttcagccccaacaccagccagttcctgctggtgagcagctgggacaccagcgtgagactgtacgacgtgcccgccaacagcatgagactgaagtaccagcacaccggcgccgtgctggactgcgccttctacgaccccacccacgcctggagcggcggcctggaccaccagctgaagatgcacgacctgaacaccgaccaggagaacctggtgggcacccacgacgcccccatcagatgcgtggagtactgccccgaggtgaacgtgatggtgaccggcagctgggaccagaccgtgaagctgtgggaccccagaaccccctgcaacgccggcaccttcagccagcccgagaaggtgtacaccctgagcgtgagcggcgacagactgatcgtgggcaccgccggcagaagagtgctggtgtgggacctgagaaacatgggctacgtgcagcagagaagagagagcagcctgaagtaccagaccagatgcatcagagccttccccaacaagcagggctacgtgctgagcagcatcgagggcagagtggccgtggagtacctggaccccagccccgaggtgcagaagaagaagtacgccttcaagtgccacagactgaaggagaacaacatcgagcagatctaccccgtgaacgccatcagcttccacaacatccacaacaccttcgccaccggcggcagcgacggcttcgtgaacatctgggaccccttcaacaagaagagactgtgccagttccacagataccccaccagcatcgccagcctggccttcagcaacgacggcaccaccctggccatcgccagcagctacatgtacgagatggacgacaccgagcaccccgaggacggcatcttcatcagacaggtgaccgacgccgagaccaagcccaagagcccctgcacctag

SEQ ID NO: 74698 - DNA, 747 bp, synthetic construct
  misc_feature 1..747: note = Description of Artificial Sequence: Synthetic coding sequence
  source 1..747: mol_type = other DNA
atgcacgacctgaacaccgaccaggagaacctggtgggcacccacgacgcccccatcagatgcgtggagtactgccccgaggtgaacgtgatggtgaccggcagctgggaccagaccgtgaagctgtgggaccccagaaccccctgcaacgccggcaccttcagccagcccgagaaggtgtacaccctgagcgtgagcggcgacagactgatcgtgggcaccgccggcagaagagtgctggtgtgggacctgagaaacatgggctacgtgcagcagagaagagagagcagcctgaagtaccagaccagatgcatcagagccttccccaacaagcagggctacgtgctgagcagcatcgagggcagagtggccgtggagtacctggaccccagccccgaggtgcagaagaagaagtacgccttcaagtgccacagactgaaggagaacaacatcgagcagatctaccccgtgaacgccatcagcttccacaacatccacaacaccttcgccaccggcggcagcgacggcttcgtgaacatctgggaccccttcaacaagaagagactgtgccagttccacagataccccaccagcatcgccagcctggccttcagcaacgacggcaccaccctggccatcgccagcagctacatgtacgagatggacgacaccgagcaccccgaggacggcatcttcatcagacaggtgaccgacgccgagaccaagcccaagagcccctgcacctag

SEQ ID NO: 74699 - DNA, 1164 bp, synthetic construct
  misc_feature 1..1164: note = Description of Artificial Sequence: Synthetic coding sequence
  source 1..1164: mol_type = other DNA
atggcctgcaccatccagaaggccgaggccctggacggcgcccacctgatgcagatcctgtggtacgacgaggaggagagcctgtaccccgccgtgtggctgagagacaactgcccctgcagcgactgctacctggacagcgccaaggccagaaagctgctggtggaggccctggacgtgaacatcggcatcaagggcctgatcttcgacagaaagaaggtgtacatcacctggcccgacgagcactacagcgagttccaggccgactggctgaagaagagatgcttcagcaagcaggccagagccaagctgcagagagagctgttcttccccgagtgccagtactggggcagcgagctgcagctgcccaccctggacttcgaggacgtgctgagatacgacgagcacgcctacaagtggctgagcaccctgaagaaggtgggcatcgtgagactgaccggcgccagcgacaagcccggcgaggtgagcaagctgggcaagagaatgggcttcctgtacctgaccttctacggccacacctggcaggtgcaggacaagatcgacgccaacaacgtggcctacaccaccggcaagctgagcttccacaccgactaccccgccctgcaccacccccccggcgtgcagctgctgcactgcatcaagcagaccgtgaccggcggcgacagcgagatcgtggacggcttcaacgtgtgccagaagctgaagaagaacaacccccaggccttccagatcctgagcagcaccttcgtggacttcaccgacatcggcgtggactactgcgacttcagcgtgcagagcaagcacaagatcatcgagctggacgacaagggccaggtggtgagaatcaacttcaacaacgccaccagagacaccatcttcgacgtgcccgtggagagagtgcagcccttctacgccgccctgaaggagttcgtggacctgatgaacagcaaggagagcaagttcaccttcaagatgaaccccggcgacgtgatcaccttcgacaactggagactgctgcacggcagaagaagctacgaggccggcaccgagatcagcagacacctggagggcgcctacgccgactgggacgtggtgatgagcagactgagaatcctgagacagagagtggagaacggcaactag

SEQ ID NO: 74700 - DNA, 1164 bp, synthetic construct; identical to SEQ ID NO: 74699
  misc_feature 1..1164: note = Description of Artificial Sequence: Synthetic coding sequence
  source 1..1164: mol_type = other DNA

SEQ ID NO: 74701 - DNA, 1164 bp, synthetic construct; identical to SEQ ID NO: 74699
  misc_feature 1..1164: note = Description of Artificial Sequence: Synthetic coding sequence
  source 1..1164: mol_type = other DNA

SEQ ID NO: 74702 - DNA, 1164 bp, synthetic construct; identical to SEQ ID NO: 74699
  misc_feature 1..1164: note = Description of Artificial Sequence: Synthetic coding sequence
  source 1..1164: mol_type = other DNA

SEQ ID NO: 74703 - DNA, 207 bp, synthetic construct
  misc_feature 1..207: note = Description of Artificial Sequence: Synthetic coding sequence
  source 1..207: mol_type = other DNA
atggcctgcaccatccagaaggccgaggccctggacggcgcccacctgatgcagatcctgtggtacgacgaggaggagagcctgtaccccgccgtgtggctgagagacaactgcccctgcagcgactgctacctggacagcgccaaggccagaaagctgctggtggaggccctggacgtgaacatcggcatcaagggcctgatctag

SEQ ID NO: 74704 - DNA, 771 bp, synthetic construct
  misc_feature 1..771: note = Description of Artificial Sequence: Synthetic coding sequence
  source 1..771: mol_type = other DNA
atggagcccgccgccgccctgcacttcagcctgcccgccagcctgctgctgctgctgctgctgctgctgctgagcctgtgcgccctggtgagcgcccagttcaccgtggtgggccccgccaaccccatcctggccatggtgggcgagaacaccaccctgagatgccacctgagccccgagaagaacgccgaggacatggaggtgagatggttcagaagccagttcagccccgccgtgttcgtgtacaagggcggcagagagagaaccgaggagcagatggaggagtacagaggcagaatcaccttcgtgagcaaggacatcaacagaggcagcgtggccctggtgatccacaacgtgaccgcccaggagaacggcatctacagatgctacttccaggagggcagaagctacgacgaggccatcctgagactggtggtggccgagagcttcatgcccagcgccagcccctggatggtggccctggccgtgatcctgaccgccagcccctggatggtgagcatgaccgtgatcctggccgtgttcatcatcttcatggccgtgagcatctgctgcatcaagaagctgcagagagagaagaagatcctgagcggcgagaagaaggtggagcaggaggagaaggagatcgcccagcagctgcaggaggagctgagatggagaagaaccttcctgcacgccggctacgagctgcccggcatcagaggccccagctggaagagacccctgcacggcgagccccccagcgccttctag

SEQ ID NO: 74705 - DNA, 942 bp, synthetic construct
  misc_feature 1..942: note = Description of Artificial Sequence: Synthetic coding sequence
  source 1..942: mol_type = other DNA
atggagcccgccgccgccctgcacttcagcctgcccgccagcctgctgctgctgctgctgctgctgctgctgagcctgtgcgccctggtgagcgagagcttcatgcccagcgccagcccctggatggtggccctggccgtgatcctgaccgccagcccctggatggtgagcatgaccgtgatcctggccgtgttcatcatcttcatggccgtgagcatctgctgcatcaagaagctgcagagagagaagaagatcctgagcggcgagaagaaggtggagcaggaggagaaggagatcgcccagcagctgcaggaggagctgagatggagaagaaccttcctgcacgccgccgacgtggtgctggaccccgacaccgcccaccccgagctgttcctgagcgaggacagaagaagcgtgagaagaggcccctacagacagagagtgcccgacaaccccgagagattcgacagccagccctgcgtgctgggctgggagagcttcgccagcggcaagcactactgggaggtggaggtggagaacgtgatggtgtggaccgtgggcgtgtgcagacacagcgtggagagaaagggcgaggtgctgctgatcccccagaacggcttctggaccctggagatgttcggcaaccagtacagagccctgagcagccccgagagaatcctgcccctgaaggagagcctgtgcagagtgggcgtgttcctggactacgaggccggcgacgtgagcttctacaacatgagagacagaagccacatctacacctgccccagaagcgccttcaccgtgcccgtgagacccttcttcagactgggcagcgacgacagccccatcttcatctgccccgccctgaccggcgccagcggcgtgatggtgcccgaggagggcctgaagctgcacagagtgggcacccaccagagcctgtag

SEQ ID NO: 74706 - DNA, 1608 bp, synthetic construct
  misc_feature 1..1608: note = Description of Artificial Sequence: Synthetic coding sequence
  source 1..1608: mol_type = other DNA
atggtgggcgaggacgccgacctgccctgccacctgttccccaccatgagcgccgagaccatggagctgagatgggtgagcagcagcctgagacaggtggtgaacgtgtacgccgacggcaaggaggtggaggacagacagagcgccccctacagaggcagaaccagcatcctgagagacggcatcaccgccggcaaggccgccctgagaatccacaacgtgaccgccagcgacagcggcaagtacctgtgctacttccaggacggcgacttctacgagaaggccctggtggagctgaaggtggccgccctgggcagcgacctgcacatcgaggtgaagggctacgaggacggcggcatccacctggagtgcagaagcaccggctggtacccccagccccagatcaagtggagcgacaccaagggcgagaacatccccgccgtggaggcccccgtggtggccgacggcgtgggcctgtacgccgtggccgccagcgtgatcatgagaggcagcagcggcggcggcgtgagctgcatcatcagaaacagcctgctgggcctggagaagaccgccagcatcagcatcgccgaccccttcttcagaagcgcccagccctggatcgccgccctggccggcaccctgcccatcagcctgctgctgctggccggcgccagctacttcctgtggagacagcagaaggagaagatcgccctgagcagagagaccgagagagagagagagatgaaggagatgggctacgccgccaccgagcaggagatcagcctgagagagtggagaaagatccagtacatggccagaggcgagaagagcctggcctaccacgagtggaagatggccctgttcaagcccgccgacgtgatcctggaccccgacaccgccaacgccatcctgctggtgagcgaggaccagagaagcgtgcagagagccgaggagcccagagacctgcccgacaaccccgagagattcgagtggagatactgcgtgctgggctgcgagaacttcaccagcggcagacactactgggaggtggaggtgggcgacagaaaggagtggcacatcggcgtgtgcagcaagaacgtggagagaaagaagggctgggtgaagatgacccccgagaacggctactggaccatgggcctgaccgacggcaacaagtacagagccctgaccgagcccagaaccaacctgaagctgcccgagccccccagaaaggtgggcatcttcctggactacgagaccggcgagatcagcttctacaacgccaccgacggcagccacatctacaccttcccccacgccagcttcagcgagcccctgtaccccgtgttcagaatcctgaccctggagcccaccgccctgaccatctgccccatccccaaggaggtggagagcagccccgaccccgacctggtgcccgaccacagcctggagacccccctgacccccggcctggccaacgagagcggcgagccccaggccgaggtgaccagcctgctgctgcccgcccaccccggcgccgaggtgagccccagcgccaccaccaaccagaaccacaagctgcaggccagaaccgaggccctgtactag

SEQ ID NO: 74707 - DNA, 1581 bp, synthetic construct
  misc_feature 1..1581: note = Description of Artificial Sequence: Synthetic coding sequence
  source 1..1581: mol_type = other DNA
atggccgtgttccccagcagcggcctgcccagatgcctgctgaccctgatcctgctgcagctgcccaagctggacagcgcccccttcgacgtgatcggcccccccgagcccatcctggccgtggtgggcgaggacgccgagctgccctgcagactgagccccaacgccagcgccgagcacctggagctgagatggttcagaaagaaggtgagccccgccgtgctggtgcacagagacggcagagagcaggaggccgagcagatgcccgagtacagaggcagagccaccctggtgcaggacggcatcgccaagggcagagtggccctgagaatcagaggcgtgagagtgagcgacgacggcgagtacacctgcttcttcagagaggacggcagctacgaggaggccctggtgcacctgaaggtggccgccctgggcagcgacccccacatcagcatgcaggtgcaggagaacggcgagatctgcctggagtgcaccagcgtgggctggtaccccgagccccaggtgcagtggagaaccagcaagggcgagaagttccccagcaccagcgagagcagaaaccccgacgaggagggcctgttcaccgtggccgccagcgtgatcatcagagacaccagcgccaagaacgtgagctgctacatccagaacctgctgctgggccaggagaagaaggtggagatcagcatccccgccagcagcctgcccagactgaccccctggatcgtggccgtggccgtgatcctgatggtgctgggcctgctgaccatcggcagcatcttcttcacctggagactgtacaacgagagacccagagagagaagaaacgagttcagcagcaaggagagactgctggaggagctgaagtggaagaaggccaccctgcacgccgtggacgtgaccctggaccccgacaccgcccacccccacctgttcctgtacgaggacagcaagagcgtgagactggaggacagcagacagaagctgcccgagaagaccgagagattcgacagctggccctgcgtgctgggcagagagaccttcaccagcggcagacactactgggaggtggaggtgggcgacagaaccgactgggccatcggcgtgtgcagagagaacgtgatgaagaagggcttcgaccccatgacccccgagaacggcttctgggccgtggagctgtacggcaacggctactgggccctgacccccctgagaacccccctgcccctggccggcccccccagaagagtgggcatcttcctggactacgagagcggcgacatcagcttctacaacatgaacgacggcagcgacatctacaccttcagcaacgtgaccttcagcggccccctgagacccttcttctgcctgtggagcagcggcaagaagcccctgaccatctgccccatcgccgacggccccgagagagtgaccgtgatcgccaacgcccaggacctgagcaaggagatccccctgagccccatgggcgaggacagcgcccccagagacgccgacaccctgcacagcaagctgatccccacccagcccagccagggcgccccctag

SEQ ID NO: 74708 - DNA, 1485 bp, synthetic construct
  misc_feature 1..1485: note = Description of Artificial Sequence: Synthetic coding sequence
  source 1..1485: mol_type = other DNA
atggccgtgttccccagcagcggcctgcccagatgcctgctgaccctgatcctgctgcagctgcccaagctggacagcgcccccttcgacgtgatcggcccccccgagcccatcctggccgtggtgggcgaggacgccgagctgccctgcagactgagccccaacgccagcgccgagcacctggagctgagatggttcagaaagaaggtgagccccgccgtgctggtgcacagagacggcagagagcaggaggccgagcagatgcccgagtacagaggcagagccaccctggtgcaggacggcatcgccaagggcagagtggccctgagaatcagaggcgtgagagtgagcgacgacggcgagtacacctgcttcttcagagaggacggcagctacgaggaggccctggtgcacctgaaggtggccgccctgggcagcgacccccacatcagcatgcaggtgcaggagaacggcgagatctgcctggagtgcaccagcgtgggctggtaccccgagccccaggtgcagtggagaaccagcaagggcgagaagttccccagcaccagcgagagcagaaaccccgacgaggagggcctgttcaccgtggccgccagcgtgatcatcagagacaccagcgccaagaacgtgagctgctacatccagaacctgctgctgggccaggagaagaaggtggagatcagcatccccgccagcagcctgcccagactgaccccctggatcgtggccgtggccgtgatcctgatggtgctgggcctgctgaccatcggcagcatcttcttcacctggagactgtacaacgagagacccagagagagaagaaacgagttcagcagcaaggagagactgctggaggagctgaagtggaagaaggccaccctgcacgccgtggacgtgaccctggaccccgacaccgcccacccccacctgttcctgtacgaggacagcaagagcgtgagactggaggacagcagacagaagctgcccgagaagaccgagagattcgacagctggccctgcgtgctgggcagagagaccttcaccagcggcagacactactgggaggtggaggtgggcgacagaaccgactgggccatcggcgtgtgcagagagaacgtgatgaagaagggcttcgaccccatgacccccgagaacggcttctgggccgtggagctgtacggcaacggctactgggccctgacccccctgagaacccccctgcccctggccggcccccccagaagagtgggcatcttcctggactacgagagcggcgacatcagcttctacaacatgaacgacggcagcgacatctacaccttcagcaacgtgaccgtgatcgccaacgcccaggacctgagcaaggagatccccctgagccccatgggcgaggacagcgcccccagagacgccgacaccctgcacagcaagctgatccccacccagcccagccagggcgccccctag

SEQ ID NO: 74709 - DNA, 1590 bp, synthetic construct
  misc_feature 1..1590: note = Description of Artificial Sequence: Synthetic coding sequence
  source 1..1590: mol_type = other DNA
atggagagcgccgccgccctgcacttcagcagacccgccagcctgctgctgctgctgctgagcctgtgcgccctggtgagcgcccagttcatcgtggtgggccccaccgaccccatcctggccaccgtgggcgagaacaccaccctgagatgccacctgagccccgagaagaacgccgaggacatggaggtgagatggttcagaagccagttcagccccgccgtgttcgtgtacaagggcggcagagagagaaccgaggagcagatggaggagtacagaggcagaaccaccttcgtgagcaaggacatcagcagaggcagcgtggccctggtgatccacaacatcaccgcccaggagaacggcacctacagatgctacttccaggagggcagaagctacgacgaggccatcctgcacctggtggtggccggcctgggcagcaagcccctgatcagcatgagaggccacgaggacggcggcatcagactggagtgcatcagcagaggctggtaccccaagcccctgaccgtgtggagagacccctacggcggcgtggcccccgccctgaaggaggtgagcatgcccgacgccgacggcctgttcatggtgaccaccgccgtgatcatcagagacaagagcgtgagaaacatgagctgcagcatcaacaacaccctgctgggccagaagaaggagagcgtgatcttcatccccgagagcttcatgcccagcgtgagcccccccatcgccgtgtgcatctactggatcaacaagctgcagaaggagaagaagatcctgagcggcgagaaggagttcgagagagagaccagagagatcgccctgaaggagctggagaaggagagagtgcagaaggaggaggagctgcaggtgaaggagaagctgcaggaggagctgagatggagaagaaccttcctgcacgccgtggacgtggtgctggaccccgacaccgcccaccccgacctgttcctgagcgaggacagaagaagcgtgagaagatgccccttcagacacctgggcgagagcgtgcccgacaaccccgagagattcgacagccagccctgcgtgctgggcagagagagcttcgccagcggcaagcactactgggaggtggaggtggagaacgtgatcgagtggaccgtgggcgtgtgcagagacagcgtggagagaaagggcgaggtgctgctgatcccccagaacggcttctggaccctggagatgcacaagggccagtacagagccgtgagcagccccgacagaatcctgcccctgaaggagagcctgtgcagagtgggcgtgttcctggactacgaggccggcgacgtgagcttctacaacatgagagacagaagccacatctacacctgccccagaagcgccttcagcggccccgacaccagccagagcggcgacccccccgagcccatcgagagcatcccctggagccacagccacgtggacaagccctggagcagccagcagcccccccacaacacccacctgcccgccgccagcttcacccccaccaccgacctgagccccagcttcctgctgctgaccagactgtgcttctag

SEQ ID NO: 74710 - DNA, 1584 bp, synthetic construct
  misc_feature 1..1584: note = Description of Artificial Sequence: Synthetic coding sequence
  source 1..1584: mol_type = other DNA
atggagagcgccgccgccctgcacttcagcagacccgccagcctgctgctgctgctgctgagcctgtgcgccctggtgagcgcccagttcatcgtggtgggccccaccgaccccatcctggccaccgtgggcgagaacaccaccctgagatgccacctgagccccgagaagaacgccgaggacatggaggtgagatggttcagaagccagttcagccccgccgtgttcgtgtacaagggcggcagagagagaaccgaggagcagatggaggagtacagaggcagaaccaccttcgtgagcaaggacatcagcagaggcagcgtggccctggtgatccacaacatcaccgcccaggagaacggcacctacagatgctacttccaggagggcagaagctacgacgaggccatcctgcacctggtggtggccggcctgggcagcaagcccctgatcagcatgagaggccacgaggacggcggcatcagactggagtgcatcagcagaggctggtaccccaagcccctgaccgtgtggagagacccctacggcggcgtggcccccgccctgaaggaggtgagcatgcccgacgccgacggcctgttcatggtgaccaccgccgtgatcatcagagacaagagcgtgagaaacatgagctgcagcatcaacaacaccctgctgggccagaagaaggagagcgtgatcttcatccccgagagcttcatgcccagcgtgagcccctgcgccgtggccctgcccatcatcgtggtgatcctgatgatccccatcgccgtgtgcatctactggatcaacaagctgcagaaggagaagaagatcctgagcggcgagaaggagttcgagagagagaccagagagatcgccctgaaggagctggagaaggagagagtgcagaaggaggaggagctgcaggtgaaggagaagctgcaggaggagctgagatggagaagaaccttcctgcacgccgtggacgtggtgctggaccccgacaccgcccaccccgacctgttcctgagcgaggacagaagaagcgtgagaagatgccccttcagacacctgggcgagagcgtgcccgacaaccccgagagattcgacagccagccctgcgtgctgggcagagagagcttcgccagcggcaagcactactgggaggtggaggtggagaacgtgatcgagtggaccgtgggcgtgtgcagagacagcgtggagagaaagggcgaggtgctgctgatcccccagaacggcttctggaccctggagatgcacaagggccagtacagagccgtgagcagccccgacagaatcctgcccctgaaggagagcctgtgcagagtgggcgtgttcctggactacgaggccggcgacgtgagcttctacaacatgagagacagaagccacatctacacctgccccagaagcgccttcagcgtgcccgtgagacccttcttcagactgggctgcgaggacagccccatcttcatctgccccgccctgaccggcgccaacggcgtgaccgtgcccgaggagggcctgaccctgcacagagtgggcacccaccagagcctgtag

SEQ ID NO: 74711 - DNA, 1005 bp, synthetic construct
  misc_feature 1..1005: note = Description of Artificial Sequence: Synthetic coding sequence
  source 1..1005: mol_type = other DNA
atggagagcgccgccgccctgcacttcagcagacccgccagcctgctgctgctgctgctgagcctgtgcgccctggtgagcgcccagttcatcgtggtgggccccaccgaccccatcctggccaccgtgggcgagaacaccaccctgagatgccacctgagccccgagaagaacgccgaggacatggaggtgagatggttcagaagccagttcagccccgccgtgttcgtgtacaagggcggcagagagagaaccgaggagcagatggaggagtacagaggcagaaccaccttcgtgagcaaggacatcagcagaggcagcgtggccctggtgatccacaacatcaccgcccaggagaacggcacctacagatgctacttccaggagggcagaagctacgacgaggccatcctgcacctggtggtggccggcctgggcagcaagcccctgatcagcatgagaggccacgaggacggcggcatcagactggagtgcatcagcagaggctggtaccccaagcccctgaccgtgtggagagacccctacggcggcgtggcccccgccctgaaggaggtgagcatgcccgacgccgacggcctgttcatggtgaccaccgccgtgatcatcagagacaagagcgtgagaaacatgagctgcagcatcaacaacaccctgctgggccagaagaaggagagcgtgatcttcatccccgagagcttcatgcccagcgtgagcccctgcgccgtggccctgcccatcatcgtggtgatcctgatgatccccatcgccgtgtgcatctactggatcaacaagctgcagaaggagaagaagatcctgagcggcgagaaggagttcgagagagagaccagagagatcgccctgaaggagctggagaaggagagagtgcagaaggaggaggagctgcaggtgaaggagaagctgcaggaggagctgagatggagaagaaccttcctgcacgccgagctgcagttcttcagcaactag

SEQ ID NO: 74712 - DNA, 993 bp, synthetic construct
  misc_feature 1..993: note = Description of Artificial Sequence: Synthetic coding sequence
  source 1..993: mol_type = other DNA
atggagagcgccgccgccctgcacttcagcagacccgccagcctgctgctgctgctgctgagcctgtgcgccctggtgagcgcccagttcatcgtggtgggccccaccgaccccatcctggccaccgtgggcgagaacaccaccctgagatgccacctgagccccgagaagaacgccgaggacatggaggtgagatggttcagaagccagttcagccccgccgtgttcgtgtacaagggcggcagagagagaaccgaggagcagatggaggagtacagaggcagaaccaccttcgtgagcaaggacatcagcagaggcagcgtggccctggtgatccacaacatcaccgcccaggagaacggcacctacagatgctacttccaggagggcagaagctacgacgaggccatcctgcacctggtggtggccggcctgggcagcaagcccctgatcagcatgagaggccacgaggacggcggcatcagactggagtgcatcagcagaggctggtaccccaagcccctgaccgtgtggagagacccctacggcggcgtggcccccgccctgaaggaggtgagcatgcccgacgccgacggcctgttcatggtgaccaccgccgtgatcatcagagacaagagcgtgagaaacatgagctgcagcatcaacaacaccctgctgggccagaagaaggagagcgtgatcttcatccccgagagcttcatgcccagcgtgagcccctgcgccgtggccctgcccatcatcgtggtgatcctgatgatccccatcgccgtgtgcatctactggatcaacaagctgcagaaggagaagaagatcctgagcggcgagaaggagttcgagagagagaccagagagatcgccctgaaggagctggagaaggagagagtgcagaaggaggaggagctgcaggtgaaggagaagctgcaggaggagctgagatggagaagaaccttcctgcacgccggccccgtgtag

SEQ ID NO: 74713 - DNA, 1401 bp, synthetic construct
  misc_feature 1..1401: note = Description of Artificial Sequence: Synthetic coding sequence
  source 1..1401: mol_type = other DNA
atggaggtgagatggttcagaagccagttcagccccgccgtgttcgtgtacaagggcggcagagagagaaccgaggagcagatggaggagtacagaggcagaaccaccttcgtgagcaaggacatcagcagaggcagcgtggccctggtgatccacaacatcaccgcccaggagaacggcacctacagatgctacttccaggagggcagaagctacgacgaggccatcctgcacctggtggtggccggcctgggcagcaagcccctgatcagcatgagaggccacgaggacggcggcatcagactggagtgcatcagcagaggctggtaccccaagcccctgaccgtgtggagagacccctacggcggcgtggcccccgccctgaaggaggtgagcatgcccgacgccgacggcctgttcatggtgaccaccgccgtgatcatcagagacaagagcgtgagaaacatgagctgcagcatcaacaacaccctgctgggccagaagaaggagagcgtgatcttcatccccgagagcttcatgcccagcgtgagcccctgcgccgtggccctgcccatcatcgtggtgatcctgatgatccccatcgccgtgtgcatctactggatcaacaagctgcagaaggagaagaagatcctgagcggcgagaaggagttcgagagagagaccagagagatcgccctgaaggagctggagaaggagagagtgcagaaggaggaggagctgcaggtgaaggagaagctgcaggaggagctgagatggagaagaaccttcctgcacgccgtggacgtggtgctggaccccgacaccgcccaccccgacctgttcctgagcgaggacagaagaagcgtgagaagatgccccttcagacacctgggcgagagcgtgcccgacaaccccgagagattcgacagccagccctgcgtgctgggcagagagagcttcgccagcggcaagcactactgggaggtggaggtggagaacgtgatcgagtggaccgtgggcgtgtgcagagacagcgtggagagaaagggcgaggtgctgctgatcccccagaacggcttctggaccctggagatgcacaagggccagtacagagccgtgagcagccccgacagaatcctgcccctgaaggagagcctgtgcagagtgggcgtgttcctggactacgaggccggcgacgtgagcttctacaacatgagagacagaagccacatctacacctgccccagaagcgccttcagcgtgcccgtgagacccttcttcagactgggctgcgaggacagccccatcttcatctgccccgccctgaccggcgccaacggcgtgaccgtgcccgaggagggcctgaccctgcacagagtgggcacccaccagagcctgtag

SEQ ID NO: 74714 - DNA, 1224 bp, synthetic construct
  misc_feature 1..1224: note = Description of Artificial Sequence: Synthetic coding sequence
  source 1..1224: mol_type = other DNA
atggagcccgccgccgccctgcacttcagcctgcccgccagcctgctgctgctgctgctgctgctgctgctgagcctgtgcgccctggtgagcggcctgggcagcaagcccctgatcgagatcaaggcccaggaggacggcagcatctggctggagtgcatcagcggcggctggtaccccgagcccctgaccgtgtggagagacccctacggcgaggtggtgcccgccctgaaggaggtgagcatcgccgacgccgacggcctgttcatggtgaccaccgccgtgatcatcagagacaagtacgtgagaaacgtgagctgcagcgtgaacaacaccctgctgggccaggagaaggagaccgtgatcttcatccccgagagcttcatgcccagcgccagcccctggatggtggccctggccgtgatcctgaccgccagcccctggatggtgagcatgaccgtgatcctggccgtgttcatcatcttcatggccgtgagcatctgctgcatcaagaagctgcagagagagaagaagatcctgagcggcgagaagaaggtggagcaggaggagaaggagatcgcccagcagctgcaggaggagctgagatggagaagaaccttcctgcacgccgccgacgtggtgctggaccccgacaccgcccaccccgagctgttcctgagcgaggacagaagaagcgtgagaagaggcccctacagacagagagtgcccgacaaccccgagagattcgacagccagccctgcgtgctgggctgggagagcttcgccagcggcaagcactactgggaggtggaggtggagaacgtgatggtgtggaccgtgggcgtgtgcagacacagcgtggagagaaagggcgaggtgctgctgatcccccagaacggcttctggaccctggagatgttcggcaaccagtacagagccctgagcagccccgagagaatcctgcccctgaaggagagcctgtgcagagtgggcgtgttcctggactacgaggccggcgacgtgagcttctacaacatgagagacagaagccacatctacacctgccccagaagcgccttcaccgtgcccgtgagacccttcttcagactgggcagcgacgacagccccatcttcatctgccccgccctgaccggcgccagcggcgtgatggtgcccgaggagggcctgaagctgcacagagtgggcacccaccagagcctgtag

SEQ ID NO: 74715 - DNA, 1572 bp, synthetic construct
  misc_feature 1..1572: note = Description of Artificial Sequence: Synthetic coding sequence
  source 1..1572: mol_type = other DNA
atggagcccgccgccgccctgcacttcagcctgcccgccagcctgctgctgctgctgctgctgctgctgctgagcctgtgcgccctggtgagcgcccagttcaccgtggtgggccccgccaaccccatcctggccatggtgggcgagaacaccaccctgagatgccacctgagccccgagaagaacgccgaggacatggaggtgagatggttcagaagccagttcagccccgccgtgttcgtgtacaagggcggcagagagagaaccgaggagcagatggaggagtacagaggcagaatcaccttcgtgagcaaggacatcaacagaggcagcgtggccctggtgatccacaacgtgaccgcccaggagaacggcatctacagatgctacttccaggagggcagaagctacgacgaggccatcctgagactggtggtggccggcctgggcagcaagcccctgatcgagatcaaggcccaggaggacggcagcatctggctggagtgcatcagcggcggctggtaccccgagcccctgaccgtgtggagagacccctacggcgaggtggtgcccgccctgaaggaggtgagcatcgccgacgccgacggcctgttcatggtgaccaccgccgtgatcatcagagacaagtacgtgagaaacgtgagctgcagcgtgaacaacaccctgctgggccaggagaaggagaccgtgatcttcatccccgagagcttcatgcccagcgccagcccctggatggtggccctggccgtgatcctgaccgccagcccctggatggtgagcatgaccgtgatcctggccgtgttcatcatcttcatggccgtgagcatctgctgcatcaagaagctgcagagagagaagaagatcctgagcggcgagaagaaggtggagcaggaggagaaggagatcgcccagcagctgcaggaggagctgagatggagaagaaccttcctgcacgccgccgacgtggtgctggaccccgacaccgcccaccccgagctgttcctgagcgaggacagaagaagcgtgagaagaggcccctacagacagagagtgcccgacaaccccgagagattcgacagccagccctgcgtgctgggctgggagagcttcgccagcggcaagcactactgggaggtggaggtggagaacgtgatggtgtggaccgtgggcgtgtgcagacacagcgtggagagaaagggcgaggtgctgctgatcccccagaacggcttctggaccctggagatgttcggcaaccagtacagagccctgagcagccccgagagaatcctgcccctgaaggagagcctgtgcagagtgggcgtgttcctggactacgaggccggcgacgtgagcttctacaacatgagagacagaagccacatctacacctgccccagaagcgccttcaccgtgcccgtgagacccttcttcagactgggcagcgacgacagccccatcttcatctgccccgccctgaccggcgccagcggcgtgatggtgcccgaggagggcctgaagctgcacagagtgggcacccaccagagcctgtag

SEQ ID NO: 74716 - DNA, 1572 bp, synthetic construct; identical to SEQ ID NO: 74715
  misc_feature 1..1572: note = Description of Artificial Sequence: Synthetic coding sequence
  source 1..1572: mol_type = other DNA

SEQ ID NO: 74717 - DNA, 1011 bp, synthetic construct
  misc_feature 1..1011: note = Description of Artificial Sequence: Synthetic coding sequence
  source 1..1011: mol_type = other DNA
atggagcccgccgccgccctgcacttcagcctgcccgccagcctgctgctgctgctgctgctgctgctgctgagcctgtgcgccctggtgagcgcccagttcaccgtggtgggccccgccaaccccatcctggccatggtgggcgagaacaccaccctgagatgccacctgagccccgagaagaacgccgaggacatggaggtgagatggttcagaagccagttcagccccgccgtgttcgtgtacaagggcggcagagagagaaccgaggagcagatggaggagtacagaggcagaatcaccttcgtgagcaaggacatcaacagaggcagcgtggccctggtgatccacaacgtgaccgcccaggagaacggcatctacagatgctacttccaggagggcagaagctacgacgaggccatcctgagactggtggtggccggcctgggcagcaagcccctgatcgagatcaaggcccaggaggacggcagcatctggctggagtgcatcagcggcggctggtaccccgagcccctgaccgtgtggagagacccctacggcgaggtggtgcccgccctgaaggaggtgagcatcgccgacgccgacggcctgttcatggtgaccaccgccgtgatcatcagagacaagtacgtgagaaacgtgagctgcagcgtgaacaacaccctgctgggccaggagaaggagaccgtgatcttcatccccgagagcttcatgcccagcgccagcccctggatggtggccctggccgtgatcctgaccgccagcccctggatggtgagcatgaccgtgatcctggccgtgttcatcatcttcatggccgtgagcatctgctgcatcaagaagctgcagagagagaagaagatcctgagcggcgagaagaaggtggagcaggaggagaaggagatcgcccagcagctgcaggaggagctgagatggagaagaaccttcctgcacgccgacgtgaacctgaccggcctgagaaacacctag

SEQ ID NO: 74718 - DNA, 333 bp, synthetic construct
  misc_feature 1..333: note = Description of Artificial Sequence: Synthetic coding sequence
  source 1..333: mol_type = other DNA
atggagcccgccgccgccctgcacttcagcctgcccgccagcctgctgctgctgctgctgctgctgctgctgagcctgtgcgccctggtgagcggcctgggcagcaagcccctgatcgagatcaaggcccaggaggacggcagcatctggctggagtgcatcagcggcggctggtaccccgagcccctgaccgtgtggagagacccctacggcgaggtggtgcccgccctgaaggaggtgagcatcgccgacgccgacggcctgttcatggtgaccaccgccgtgatcatcagagacaagtacgtgagaaacgtgagctgcagcgtgaactag

SEQ ID NO: 74719 - DNA, 555 bp, synthetic construct
  misc_feature 1..555: note = Description of Artificial Sequence: Synthetic coding sequence
  source 1..555: mol_type = other DNA
atggagcccgccgccgccctgcacttcagcctgcccgccagcctgctgctgctgctgctgctgctgctgctgagcctgtgcgccctggtgagcggcctgggcagcaagcccctgatcgagatcaaggcccaggaggacggcagcatctggctggagtgcatcagcggcggctggtaccccgagcccctgaccgtgtggagagacccctacggcgaggtggtgcccgccctgaaggaggtgagcatcgccgacgccgacggcctgttcatggtgaccaccgccgtgatcatcagagacaagtacgtgagaaacgtgagctgcagcgtgaacaacaccctgctgggccaggagaaggagaccgtgatcttcatccccgagagcttcatgcccagcgccagcccctggatggtggccctggccgtgatcctgaccgccagcccctggatggtgagcatgaccgtgatcctggccgtgttcatcatcttcatggccgtgagcatctgctgcatcaagaagctgcagagagagaagaagatcctgagcggcgagaagtag

SEQ ID NO: 74720 - DNA, 720 bp, synthetic construct
  misc_feature 1..720: note = Description of Artificial Sequence: Synthetic coding sequence
  source 1..720: mol_type = other DNA
atggagcccgccgccgccctgcacttcagcctgcccgccagcctgctgctgctgctgctgctgctgctgctgagcctgtgcgccctggtgagcgcccagttcaccgtggtgggccccgccaaccccatcctggccatggtgggcgagaacaccaccctgagatgccacctgagccccgagaagaacgccgaggacatggaggtgagatggttcagaagccagttcagccccgccgtgttcgtgtacaagggcggcagagagagaaccgaggagcagatggaggagtacagaggcagaatcaccttcgtgagcaaggacatcaacagaggcagcgtggccctggtgatccacaacgtgaccgcccaggagaacggcatctacagatgctacttccaggagggcagaagctacgacgaggccatcctgagactggtggtggccggcctgggcagcaagcccctgatcgagatcaaggcccaggaggacggcagcatctggctggagtgcatcagcggcggctggtaccccgagcccctgaccgtgtggagagacccctacggcgaggtggtgcccgccctgaaggaggtgagcatcgccgacgccgacggcctgttcatggtgaccaccgccgtgatcatcagagacaagtacgtgagaaacgtgagctgcagcgtgaacaacaccctgctgggccaggagaaggagaccgtgatcttctag

SEQ ID NO: 74721 - DNA, 291 bp, synthetic construct
  misc_feature 1..291: note = Description of Artificial Sequence: Synthetic coding sequence
  source 1..291: mol_type = other DNA
atggagcccgccgccgccctgcacttcagcctgcccgccagcctgctgctgctgctgctgctgctgctgctgagcctgtgcgccctggtgagcgcccagttcaccgtggtgggccccgccaaccccatcctggccatggtgggcgagaacaccaccctgagatgccacctgagccccgagaagaacgccgaggacatggaggtgagatggttcagaagccagttcagccccgccgtgttcgtgtacaagggcggcagagagagaaccgaggagcagatggaggagtactag

SEQ ID NO: 74722 - DNA, 1542 bp, synthetic construct
  misc_feature 1..1542: note = Description of Artificial Sequence: Synthetic coding sequence
  source 1..1542: mol_type = other DNA
atgaagatggccagcttcctggccttcctgctgctgaacttcagagtgtgcctgctgctgctgcagctgctgatgccccacagcgcccagttcagcgtgctgggccccagcggccccatcctggccatggtgggcgaggacgccgacctgccctgccacctgttccccaccatgagcgccgagaccatggagctgaagtgggtgagcagcagcctgagacaggtggtgaacgtgtacgccgacggcaaggaggtggaggacagacagagcgccccctacagaggcagaaccagcatcctgagagacggcatcaccgccggcaaggccgccctgagaatccacaacgtgaccgccagcgacagcggcaagtacctgtgctacttccaggacggcgacttctacgagaaggccctggtggagctgaaggtggccgccctgggcagcgacctgcacgtggacgtgaagggctacaaggacggcggcatccacctggagtgcagaagcaccggctggtacccccagccccagatccagtggagcaacaacaagggcgagaacatccccaccgtggaggcccccgtggtggccgacggcgtgggcctgtacgccgtggccgccagcgtgatcatgagaggcagcagcggcgagggcgtgagctgcaccatcagaagcagcctgctgggcctggagaagaccgccagcatcagcatcgccgaccccttcttcagaagcgcccagagatggatcgccgccctggccggcaccctgcccgtgctgctgctgctgctgggcggcgccggctacttcctgtggcagcagcaggaggagaagaagacccagttcagaaagaagaagagagagcaggagctgagagagatggcctggagcaccatgaagcaggagcagagcaccagagtgaagctgctggaggagctgagatggagaagcatccagtacgccagcagaggcgagagacacagcgcctacaacgagtggaagaaggccctgttcaagcccgccgacgtgatcctggaccccaagaccgccaaccccatcctgctggtgagcgaggaccagagaagcgtgcagagagccaaggagccccaggacctgcccgacaaccccgagagattcaactggcactactgcgtgctgggctgcgagagcttcatcagcggcagacactactgggaggtggaggtgggcgacagaaaggagtggcacatcggcgtgtgcagcaagaacgtgcagagaaagggctgggtgaagatgacccccgagaacggcttctggaccatgggcctgaccgacggcaacaagtacagaaccctgaccgagcccagaaccaacctgaagctgcccaagccccccaagaaggtgggcgtgttcctggactacgagaccggcgacatcagcttctacaacgccgtggacggcagccacatccacaccttcctggacgtgagcttcagcgaggccctgtaccccgtgttcagaatcctgaccctggagcccaccgccctgaccatctgccccgcctag

SEQ ID NO: 74723 - DNA, 1386 bp, synthetic construct
  misc_feature 1..1386: note = Description of Artificial Sequence: Synthetic coding sequence
  source 1..1386: mol_type = other DNA
atgaagatggccagcttcctggccttcctgctgctgaacttcagagtgtgcctgctgctgctgcagctgctgatgccccacagcgcccagttcagcgtgctgggccccagcggccccatcctggccatggtgggcgaggacgccgacctgccctgccacctgttccccaccatgagcgccgagaccatggagctgaagtgggtgagcagcagcctgagacaggtggtgaacgtgtacgccgacggcaaggaggtggaggacagacagagcgccccctacagaggcagaaccagcatcctgagagacggcatcaccgccggcaaggccgccctgagaatccacaacgtgaccgccagcgacagcggcaagtacctgtgctacttccaggacggcgacttctacgagaaggccctggtggagctgaaggtggccgacggcgtgggcctgtacgccgtggccgccagcgtgatcatgagaggcagcagcggcgagggcgtgagctgcaccatcagaagcagcctgctgggcctggagaagaccgccagcatcagcatcgccgaccccttcttcagaagcgcccagagatggatcgccgccctggccggcaccctgcccgtgctgctgctgctgctgggcggcgccggctacttcctgtggcagcagcaggaggagaagaagacccagttcagaaagaagaagagagagcaggagctgagagagatggcctggagcaccatgaagcaggagcagagcaccagagtgaagctgctggaggagctgagatggagaagcatccagtacgccagcagaggcgagagacacagcgcctacaacgagtggaagaaggccctgttcaagcccgccgacgtgatcctggaccccaagaccgccaaccccatcctgctggtgagcgaggaccagagaagcgtgcagagagccaaggagccccaggacctgcccgacaaccccgagagattcaactggcactactgcgtgctgggctgcgagagcttcatcagcggcagacactactgggaggtggaggtgggcgacagaaaggagtggcacatcggcgtgtgcagcaagaacgtgcagagaaagggctgggtgaagatgacccccgagaacggcttctggaccatgggcctgaccgacggcaacaagtacagaaccctgaccgagcccagaaccaacctgaagctgcccaagccccccaagaaggtgggcgtgttcctggactacgagaccggcgacatcagcttctacaacgccgtggacggcagccacatccacaccttcctggacgtgagcttcagcgaggccctgtaccccgtgttcagaatcctgaccctggagcccaccgccctgaccatctgccccgcctag

SEQ ID NO: 74724 - DNA, 1137 bp, synthetic construct
  misc_feature 1..1137: note = Description of Artificial Sequence: Synthetic coding sequence
  source 1..1137: mol_type = other DNA
atgaagatggccagcttcctggccttcctgctgctgaacttcagagtgtgcctgctgctgctgcagctgctgatgccccacagcgcccagttcagcgtgctgggccccagcggccccatcctggccatggtgggcgaggacgccgacctgccctgccacctgttccccaccatgagcgccgagaccatggagctgaagtgggtgagcagcagcctgagacaggtggtgaacgtgtacgccgacggcaaggaggtggaggacagacagagcgccccctacagaggcagaaccagcatcctgagagacggcatcaccgccggcaaggccgccctgagaatccacaacgtgaccgccagcgacagcggcaagtacctgtgctacttccaggacggcgacttctacgagaaggccctggtggagctgaaggtggccgccctgggcagcgacctgcacgtggacgtgaagggctacaaggacggcggcatccacctggagtgcagaagcaccggctggtacccccagccccagatccagtggagcaacaacaagggcgagaacatccccaccgtggaggcccccgtggtggccgacggcgtgggcctgtacgccgtggccgccagcgtgatcatgagaggcagcagcggcgagggcgtgagctgcaccatcagaagcagcctgctgggcctggagaagaccgccagcatcagcatcgccgaccccttcttcagaagcgcccagagatggatcgccgccctggccggcaccctgcccgtgctgctgctgctgctgggcggcgccggctacttcctgtggcagcagcaggaggagaagaagacccagttcagaaagaagaagagagagcaggagctgagagagatggcctggagcaccatgaagcaggagcagagcaccagagtgaagctgctggaggagctgagatggagaagcatccagtacgccagcagaggcgagagacacagcgcctacaacgagtggaagaaggccctgttcaagcccggcccccccatcggccagacccagcagcagaccagaggccagggcagccccgtggccctgagccaggagagcgcccagagaaccgacagctggggccccgaggagggcggcgagagctag

SEQ ID NO: 74725 - DNA, 132 bp, synthetic construct
  misc_feature 1..132: note = Description of Artificial Sequence: Synthetic coding sequence
  source 1..132: mol_type = other DNA
atgaagatggccagcttcctggccttcctgctgctgaacttcagagtgtgcctgctgctgctgcagctgctgatgccccacagcgcccagttcagcgtgctgggccccagcggccccatcctggccatgtag

SEQ ID NO: 74726 - DNA, 360 bp, synthetic construct
  misc_feature 1..360: note = Description of Artificial Sequence: Synthetic coding sequence
  source 1..360: mol_type = other DNA
atgaagatggccagcttcctggccttcctgctgctgaacttcagagtgtgcctgctgctgctgcagctgctgatgccccacagcgcccagttcagcgtgctgggccccagcggccccatcctggccatggtgggcgaggacgccgacctgccctgccacctgttccccaccatgagcgccgagaccatggagctgaagtgggtgagcagcagcctgagacaggtggtgaacgtgtacgccgacggcaaggaggtggaggacagacagagcgccccctacagaggcagaaccagcatcctgagagacggcatcaccgccggcaaggccgccctgagaatccacaacgtgaccgccagctag

SEQ ID NO: 74727 - DNA, 1059 bp, synthetic construct
  misc_feature 1..1059: note = Description of Artificial Sequence: Synthetic coding sequence
  source 1..1059: mol_type = other DNA
atgaagatggccagcttcctggccttcctgctgctgaacttcagagtgtgcctgctgctgctgcagctgctgatgccccacagcgcccagttcagcgtgctgggccccagcggccccatcctggccatggtgggcgaggacgccgacctgccctgccacctgttccccaccatgagcgccgagaccatggagctgaagtgggtgagcagcagcctgagacaggtggtgaacgtgtacgccgacggcaaggaggtggaggacagacagagcgccccctacagaggcagaaccagcatcctgagagacggcatcaccgccggcaaggccgccctgagaatccacaacgtgaccgccagcgacagcggcaagtacctgtgctacttccaggacggcgacttctacgagaaggccctggtggagctgaaggtggccgccctgggcagcgacctgcacgtggacgtgaagggctacaaggacggcggcatccacctggagtgcagaagcaccggctggtacccccagccccagatccagtggagcaacaacaagggcgagaacatccccaccgtggaggcccccgtggtggccgacggcgtgggcctgtacgccgtggccgccagcgtgatcatgagaggcagcagcggcgagggcgtgagctgcaccatcagaagcagcctgctgggcctggagaagaccgccagcatcagcatcgccgaccccttcttcagaagcgcccagagatggatcgccgccctggccggcaccctgcccgtgctgctgctgctgctgggcggcgccggctacttcctgtggcagcagcaggaggagaagaagacccagttcagaaagaagaagagagagcaggagctgagagagatggcctggagcaccatgaagcaggagcagagcaccagagtgaagctgctggaggagctgagatggagaagcatccagtacgccagcagaggcgagagacacagcgcctacaacgagtggaagaaggccctgttcaagcccggcgaggagatgctgcagatgagactgcacttcgtgaagtag

SEQ ID NO: 74728 - DNA, 279 bp, synthetic construct
  misc_feature 1..279: note = Description of Artificial Sequence: Synthetic coding sequence
  source 1..279: mol_type = other DNA
atgaagatggccagcttcctggccttcctgctgctgaacttcagagtgtgcctgctgctgctgcagctgctgatgccccacagcgcccagttcagcgtgctgggccccagcggccccatcctggccatggtgggcgaggacgccgacctgccctgccacctgttccccaccatgagcgccgagaccatggagctgaagtgggtgagcagcagcctgagacaggtggtgaacgtgtacgccgacggcaaggaggtggaggacagacagagcgccccctag

SEQ ID NO: 74729 - DNA, 1005 bp, synthetic construct
  misc_feature 1..1005: note = Description of Artificial Sequence: Synthetic coding sequence
  source 1..1005: mol_type = other DNA
atgaagatggccagcagcctggccttcctgctgctgaacttccacgtgagcctgctgctggtgcagctgctgaccccctgcagcgcccagttcagcgtgctgggccccagcggccccatcctggccatggtgggcgaggacgccgacctgccctgccacctgttccccaccatgagcgccgagaccatggagctgaagtgggtgagcagcagcctgagacaggtggtgaacgtgtacgccgacggcaaggaggtggaggacagacagagcgccccctacagaggcagaaccagcatcctgagagacggcatcaccgccggcaaggccgccctgagaatccacaacgtgaccgccagcgacagcggcaagtacctgtgctacttccaggacggcgacttctacgagaaggccctggtggagctgaaggtggccgccctgggcagcaacctgcacgtggaggtgaagggctacgaggacggcggcatccacctggagtgcagaagcaccggctggtacccccagccccagatccagtggagcaacgccaagggcgagaacatccccgccgtggaggcccccgtggtggccgacggcgtgggcctgtacgaggtggccgccagcgtgatcatgagaggcggcagcggcgagggcgtgagctgcatcatcagaaacagcctgctgggcctggagaagaccgccagcatcagcatcgccgaccccttcttcagaagcgcccagccctggatcgccgccctggccggcaccctgcccatcctgctgctgctgctggccggcgccagctacttcctgtggagacagcagaaggagatcaccgccctgagcagcgagatcgagagcgagcaggagatgaaggagatgggctacgccgccaccgagagagagatcagcctgagagagagcctgcaggaggagctgaagagaaagaagatccagtacctgaccagaggcgaggagagcagcagcgacaccaacaagagcgcctag

SEQ ID NO: 74730 - DNA, 1005 bp, synthetic construct; identical to SEQ ID NO: 74729
  misc_feature 1..1005: note = Description of Artificial Sequence: Synthetic coding sequence
  source 1..1005: mol_type = other DNA

SEQ ID NO: 74731 - DNA, 936 bp, synthetic construct
  misc_feature 1..936: note = Description of Artificial Sequence: Synthetic coding sequence
  source 1..936: mol_type = other DNA
atgggcatccccagagcccagttcagcgtgctgggccccagcggccccatcctggccatggtgggcgaggacgccgacctgccctgccacctgttccccaccatgagcgccgagaccatggagctgaagtgggtgagcagcagcctgagacaggtggtgaacgtgtacgccgacggcaaggaggtggaggacagacagagcgccccctacagaggcagaaccagcatcctgagagacggcatcaccgccggcaaggccgccctgagaatccacaacgtgaccgccagcgacagcggcaagtacctgtgctacttccaggacggcgacttctacgagaaggccctggtggagctgaaggtggccgccctgggcagcaacctgcacgtggaggtgaagggctacgaggacggcggcatccacctggagtgcagaagcaccggctggtacccccagccccagatccagtggagcaacgccaagggcgagaacatccccgccgtggaggcccccgtggtggccgacggcgtgggcctgtacgaggtggccgccagcgtgatcatgagaggcggcagcggcgagggcgtgagctgcatcatcagaaacagcctgctgggcctggagaagaccgccagcatcagcatcgccgaccccttcttcagaagcgcccagccctggatcgccgccctggccggcaccctgcccatcctgctgctgctgctggccggcgccagctacttcctgtggagacagcagaaggagatcaccgccctgagcagcgagatcgagagcgagcaggagatgaaggagatgggctacgccgccaccgagagagagatcagcctgagagagagcctgcaggaggagctgaagagaaagaagatccagtacctgaccagaggcgaggagagcagcagcgacaccaacaagagcgcctag

SEQ ID NO: 74732 - DNA, 1005 bp, synthetic construct; identical to SEQ ID NO: 74729
  misc_feature 1..1005: note = Description of Artificial Sequence: Synthetic coding sequence
  source 1..1005: mol_type = other DNA

SEQ ID NO: 74733 - DNA, 879 bp, synthetic construct
  misc_feature 1..879: note = Description of Artificial Sequence: Synthetic coding sequence
  source 1..879: mol_type = other DNA
atggtgggcgaggacgccgacctgccctgccacctgttccccaccatgagcgccgagaccatggagctgaagtgggtgagcagcagcctgagacaggtggtgaacgtgtacgccgacggcaaggaggtggaggacagacagagcgccccctacagaggcagaaccagcatcctgagagacggcatcaccgccggcaaggccgccctgagaatccacaacgtgaccgccagcgacagcggcaagtacctgtgctacttccaggacggcgacttctacgagaaggccctggtggagctgaaggtggccgccctgggcagcaacctgcacgtggaggtgaagggctacgaggacggcggcatccacctggagtgcagaagcaccggctggtacccccagccccagatccagtggagcaacgccaagggcgagaacatccccgccgtggaggcccccgtggtggccgacggcgtgggcctgtacgaggtggccgccagcgtgatcatgagaggcggcagcggcgagggcgtgagctgcatcatcagaaacagcctgctgggcctggagaagaccgccagcatcagcatcgccgaccccttcttcagaagcgcccagccctggatcgccgccctggccggcaccctgcccatcctgctgctgctgctggccggcgccagctacttcctgtggagacagcagaaggagatcaccgccctgagcagcgagatcgagagcgagcaggagatgaaggagatgggctacgccgccaccgagagagagatcagcctgagagagagcctgcaggaggagctgaagagaaagaagatccagtacctgaccagaggcgaggagagcagcagcgacaccaacaagagcgcctag

SEQ ID NO: 74734 - DNA, 1005 bp, synthetic construct; identical to SEQ ID NO: 74729
  misc_feature 1..1005: note = Description of Artificial Sequence: Synthetic coding sequence
  source 1..1005: mol_type = other DNA

SEQ ID NO: 74735 - DNA, 960 bp, synthetic construct
  misc_feature 1..960: note = Description of Artificial Sequence: Synthetic coding sequence
  source 1..960: mol_type = other DNA
atgaagatggccagcagcctggccttcctgctgctgaacttccacgtgagcctgctgctggtgcagctgctgaccccctgcagcgcccagttcagcgtgctgggccccagcggccccatcctggccatggtgggcgaggacgccgacctgccctgccacctgttccccaccatgagcgccgagaccatggagctgaagtgggtgagcagcagcctgagacaggtggtgaacgtgtacgccgacggcaaggaggtggaggacagacagagcgccccctacagaggcagaaccagcatcctgagagacggcatcaccgccggcaaggccgccctgagaatccacaacgtgaccgccagcgacagcggcaagtacctgtgctacttccaggacggcgacttctacgagaaggccctggtggagctgaaggtggccgccctgggcagcaacctgcacgtggaggtgaagggctacgaggacggcggcatccacctggagtgcagaagcaccggctggtacccccagccccagatccagtggagcaacgccaagggcgagaacatccccgccgtggaggcccccgtggtggccgacggcgtgggcctgtacgaggtggccgccagcgtgatcatgagaggcggcagcggcgagggcgtgagctgcatcatcagaaacagcctgctgggcctggagaagaccgccagcatcagcatcgccgaccccttcttcagaagcgcccagccctggatcgccgccctggccggcaccctgcccatcctgctgctgctgctggccggcgccagctacttcctgtggagacagcagaaggagatcaccgccctgagcagcgagatcgagagcgagcaggagatgaaggagatgggctacgccgccaccgagagagagatcagcctgagagagagcctgcaggaggagctgaagagaaagaagagcagcacctag

SEQ ID NO: 74736 - DNA, 1755 bp, synthetic construct
  misc_feature 1..1755: note = Description of Artificial Sequence: Synthetic coding sequence
  source 1..1755: mol_type = other DNA
atgaagatggccagcagcctggccttcctgctgctgaacttccacgtgagcctgttcctggtgcagctgctgaccccctgcagcgcccagttcagcgtgctgggccccagcggccccatcctggccatggtgggcgaggacgccgacctgccctgccacctgttccccaccatgagcgccgagaccatggagctgagatgggtgagcagcagcctgagacaggtggtgaacgtgtacgccgacggcaaggaggtggaggacagacagagcgccccctacagaggcagaaccagcatcctgagagacggcatcaccgccggcaaggccgccctgagaatccacaacgtgaccgccagcgacagcggcaagtacctgtgctacttccaggacggcgacttctacgagaaggccctggtggagctgaaggtggccgccctgggcagcgacctgcacatcgaggtgaagggctacgaggacggcggcatccacctggagtgcagaagcaccggctggtacccccagccccagatcaagtggagcgacaccaagggcgagaacatccccgccgtggaggcccccgtggtggccgacggcgtgggcctgtacgccgtggccgccagcgtgatcatgagaggcagcagcggcggcggcgtgagctgcatcatcagaaacagcctgctgggcctggagaagaccgccagcatcagcatcgccgaccccttcttcagaagcgcccagccctggatcgccgccctggccggcaccctgcccatcagcctgctgctgctggccggcgccagctacttcctgtggagacagcagaaggagaagatcgccctgagcagagagaccgagagagagagagagatgaaggagatgggctacgccgccaccgagcaggagatcagcctgagagagaagctgcaggaggagctgaagtggagaaagatccagtacatggccagaggcgagaagagcctggcctaccacgagtggaagatggccctgttcaagcccgccgacgtgatcctggaccccgacaccgccaacgccatcctgctggtgagcgaggaccagagaagcgtgcagagagccgaggagcccagagacctgcccgacaaccccgagagattcgagtggagatactgcgtgctgggctgcgagaacttcaccagcggcagacactactgggaggtggaggtgggcgacagaaaggagtggcacatcggcgtgtgcagcaagaacgtggagagaaagaagggctgggtgaagatgacccccgagaacggctactggaccatgggcctgaccgacggcaacaagtacagagccctgaccgagcccagaaccaacctgaagctgcccgagccccccagaaaggtgggcatcttcctggactacgagaccggcgagatcagcttctacaacgccaccgacggcagccacatctacaccttcccccacgccagcttcagcgagcccctgtaccccgtgttcagaatcctgaccctggagcccaccgccctgaccatctgccccatccccaaggaggtggagagcagccccgaccccgacctggtgcccgaccacagcctggagacccccctgacccccggcctggccaacgagagcggcgagccccaggccgaggtgaccagcctgctgctgcccgcccaccccggcgccgaggtgagccccagcgccaccaccaaccagaaccacaagctgcaggccagaaccgaggccctgtactag

SEQ ID NO: 74737 - DNA, 1629 bp, synthetic construct
  misc_feature 1..1629: note = Description of Artificial Sequence: Synthetic coding sequence
  source 1..1629: mol_type = other DNA
atggtgggcgaggacgccgacctgccctgccacctgttccccaccatgagcgccgagaccatggagctgagatgggtgagcagcagcctgagacaggtggtgaacgtgtacgccgacggcaaggaggtggaggacagacagagcgccccctacagaggcagaaccagcatcctgagagacggcatcaccgccggcaaggccgccctgagaatccacaacgtgaccgccagcgacagcggcaagtacctgtgctacttccaggacggcgacttctacgagaaggccctggtggagctgaaggtggccgccctgggcagcgacctgcacatcgaggtgaagggctacgaggacggcggcatccacctggagtgcagaagcaccggctggtacccccagccccagatcaagtggagcgacaccaagggcgagaacatccccgccgtggaggcccccgtggtggccgacggcgtgggcctgtacgccgtggccgccagcgtgatcatgagaggcagcagcggcggcggcgtgagctgcatcatcagaaacagcctgctgggcctggagaagaccgccagcatcagcatcgccgaccccttcttcagaagcgcccagccctggatcgccgccctggccggcaccctgcccatcagcctgctgctgctggccggcgccagctacttcctgtggagacagcagaaggagaagatcgccctgagcagagagaccgagagagagagagagatgaaggagatgggctacgccgccaccgagcaggagatcagcctgagagagaagctgcaggaggagctgaagtggagaaagatccagtacatggccagaggcgagaagagcctggcctaccacgagtggaagatggccctgttcaagcccgccgacgtgatcctggaccccgacaccgccaacgccatcctgctggtgagcgaggaccagagaagcgtgcagagagccgaggagcccagagacctgcccgacaaccccgagagattcgagtggagatactgcgtgctgggctgcgagaacttcaccagcggcagacactactgggaggtggaggtgggcgacagaaaggagtggcacatcggcgtgtgcagcaagaacgtggagagaaagaagggctgggtgaagatgacccccgagaacggctactggaccatgggcctgaccgacggcaacaagtacagagccctgaccgagcccagaaccaacctgaagctgcccgagccccccagaaaggtgggcatcttcctggactacgagaccggcgagatcagcttctacaacgccaccgacggcagccacatctacaccttcccccacgccagcttcagcgagcccctgtaccccgtgttcagaatcctgaccctggagcccaccgccctgaccatctgccccatccccaaggaggtggagagcagccccgaccccgacctggtgcccgaccacagcctggagacccccctgacccccggcctggccaacgagagcggcgagccccaggccgaggtgaccagcctgctgctgcccgcccaccccggcgccgaggtgagccccagcgccaccaccaaccagaaccacaagctgcaggccagaaccgaggccctgtactag

SEQ ID NO: 74738 - DNA, 417 bp, synthetic construct
  misc_feature 1..417: note = Description of Artificial Sequence: Synthetic coding sequence
  source 1..417: mol_type = other DNA
atgaagatggccagcagcctggccttcctgctgctgaacttccacgtgagcctgttcctggtgcagctgctgaccccctgcagcgcccagttcagcgtgctgggccccagcggccccatcctggccatggtgggcgaggacgccgacctgccctgccacctgttccccaccatgagcgccgagaccatggagctgagatgggtgagcagcagcctgagacaggtggtgaacgtgtacgccgacggcaaggaggtggaggacagacagagcgccccctacagaggcagaaccagcatcctgagagacggcatcaccgccggcaaggccgccctgagaatccacaacgtgaccgccagcgacagcggcaagtacctgtgctacttccaggacggcgacttctacgagaaggccctgtag

SEQ ID NO: 74739 - DNA, 717 bp, synthetic construct
  misc_feature 1..717: note = Description of Artificial Sequence: Synthetic coding sequence
  source 1..717: mol_type = other DNA
atgaagatggccagcagcctggccttcctgctgctgaacttccacgtgagcctgttcctggtgcagctgctgaccccctgcagcgcccagttcagcgtgctgggccccagcggccccatcctggccatggtgggcgaggacgccgacctgccctgccacctgttccccaccatgagcgccgagaccatggagctgagatgggtgagcagcagcctgagacaggtggtgaacgtgtacgccgacggcaaggaggtggaggacagacagagcgccccctacagaggcagaaccagcatcctgagagacggcatcaccgccggcaaggccgccctgagaatccacaacgtgaccgccagcgacagcggcaagtacctgtgctacttccaggacggcgacttctacgagaaggccctggtggagctgaaggtggccgccctgggcagcgacctgcacatcgaggtgaagggctacgaggacggcggcatccacctggagtgcagaagcaccggctggtacccccagccccagatcaagtggagcgacaccaagggcgagaacatccccgccgtggaggcccccgtggtggccgacggcgtgggcctgtacgccgtggccgccagcgtgatcatgagaggcagcagcggcggcggcgtgagctgcatcatcagaaacagcctgctgggcctggagaagaccgccagcatcagcatcgcctag

SEQ ID NO: 74740 - DNA, 1368 bp, synthetic construct
  misc_feature 1..1368: note = Description of Artificial Sequence: Synthetic coding sequence
  source 1..1368: mol_type = other DNA
atggtggacttccccggctacaacctgagcggcgccgtggccagcttcctgttcatcctgctgaccatgaagcagagcgaggacttcagagtgatcggccccgcccaccccatcctggccggcgtgggcgaggacgccctgctgacctgccagctgctgcccaagagaaccaccatgcacgtggaggtgagatggtacagaagcgagcccagcacccccgtgttcgtgcacagagacggcgtggaggtgaccgagatgcagatggaggagtacagaggctgggtggagtggatcgagaacggcatcgccaagggcaacgtggccctgaagatccacaacatccagcccagcgacaacggccagtactggtgccacttccaggacggcaactactgcggcgagaccagcctgctgctgaaggtggccggcctgggcagcgcccccagcatccacatggagggccccggcgagagcggcgtgcagctggtgtgcaccgccagaggctggttccccgagccccaggtgtactgggaggacatcagaggcgagaagctgctggccgtgagcgagcacagaatccaggacaaggacggcctgttctacgccgaggccaccctggtggtgagaaacgccagcgccgagagcgtgagctgcctggtgcacaaccccgtgctgaccgaggagaagggcagcgtgatcagcctgcccgagaagctgcagaccgagctggccagcctgaaggtgaacggccccagccagcccatcctggtgagagtgggcgaggacatccagctgacctgctacctgagccccaaggccaacgcccagagcatggaggtgagatgggacagaagccacagataccccgccgtgcacgtgtacatggacggcgaccacgtggccggcgagcagatggccgagtacagaggcagaaccgtgctggtgagcgacgccatcgacgagggcagactgaccctgcagatcctgagcgccagacccagcgacgacggccagtacagatgcctgttcgagaaggacgacgtgtaccaggaggccagcctggacctgaaggtggtgagcctgggcagcagccccctgatcaccgtggagggccaggaggacggcgagatgcagcccatgtgcagcagcgacggctggttcccccagccccacgtgccctggagagacatggagggcaagaccatccccagcagcagccaggccctgacccagggcagccacggcctgttccacgtgcagaccctgctgagagtgaccaacatcagcgccgtggacgtgacctgcagcatcagcatccccttcctgggcgaggagaagatcgccaccttcagcctgagcggctggtag

SEQ ID NO: 74741 - DNA, 1167 bp, synthetic construct
  misc_feature 1..1167: note = Description of Artificial Sequence: Synthetic coding sequence
  source 1..1167: mol_type = other DNA
atggtggacttccccggctacaacctgagcggcgccgtggccagcttcctgttcatcctgctgaccatgaagcagagcgaggacttcagagtgatcggccccgcccaccccatcctggccggcgtgggcgaggacgccctgctgacctgccagctgctgcccaagagaaccaccatgcacgtggaggtgagatggtacagaagcgagcccagcacccccgtgttcgtgcacagagacggcgtggaggtgaccgagatgcagatggaggagtacagaggctgggtggagtggatcgagaacggcatcgccaagggcaacgtggccctgaagatccacaacatccagcccagcgacaacggccagtactggtgccacttccaggacggcaactactgcggcgagaccagcctgctgctgaaggtggccgagaagctgctggccgtgctgagcagcctgaaggtgaacggccccagccagcccatcctggtgagagtgggcgaggacatccagctgacctgctacctgagccccaaggccaacgcccagagcatggaggtgagatgggacagaagccacagataccccgccgtgcacgtgtacatggacggcgaccacgtggccggcgagcagatggccgagtacagaggcagaaccgtgctggtgagcgacgccatcgacgagggcagactgaccctgcagatcctgagcgccagacccagcgacgacggccagtacagatgcctgttcgagaaggacgacgtgtaccaggaggccagcctggacctgaaggtggtgagcctgggcagcagccccctgatcaccgtggagggccaggaggacggcgagatgcagcccatgtgcagcagcgacggctggttcccccagccccacgtgccctggagagacatggagggcaagaccatccccagcagcagccaggccctgacccagggcagccacggcctgttccacgtgcagaccctgctgagagtgaccaacatcagcgccgtggacgtgacctgcagcatcagcatccccttcctgggcgaggagaagatcgccaccttcagcctgagcgagagcagaatgaccttcctgtggaagaccctgctggtgtggggcctgctgctggccgtggccgtgggcctgcccagaaagagaagctag

SEQ ID NO: 74742 - DNA, 738 bp, synthetic construct
  misc_feature 1..738: note = Description of Artificial Sequence: Synthetic coding sequence
  source 1..738: mol_type = other DNA
atggtggacttccccggctacaacctgagcggcgccgtggccagcttcctgttcatcctgctgaccatgaagcagagcgagaagctgcagaccgagctggccagcctgaaggtgaacggccccagccagcccatcctggtgagagtgggcgaggacatccagctgacctgctacctgagccccaaggccaacgcccagagcatggaggtgagatgggacagaagccacagataccccgccgtgcacgtgtacatggacggcgaccacgtggccggcgagcagatggccgagtacagaggcagaaccgtgctggtgagcgacgccatcgacgagggcagactgaccctgcagatcctgagcgccagacccagcgacgacggccagtacagatgcctgttcgagaaggacgacgtgtaccaggaggccagcctggacctgaaggtggtgagcctgggcagcagccccctgatcaccgtggagggccaggaggacggcgagatgcagcccatgtgcagcagcgacggctggttcccccagccccacgtgccctggagagacatggagggcaagaccatccccagcagcagccaggccctgacccagggcagccacggcctgttccacgtgcagaccctgctgagagtgaccaacatcagcgccgtggacgtgacctgcagcatcagcatccccttcctgggcgaggagaagatcgccaccttcagcctgagcggctggtag

SEQ ID NO: 74743 - DNA, 327 bp, synthetic construct
  misc_feature 1..327: note = Description of Artificial Sequence: Synthetic coding sequence
  source 1..327: mol_type = other DNA
atggtggacttccccggctacaacctgagcggcgccgtggccagcttcctgttcatcctgctgaccatgaagcagagcgacttcagagtgatcggccccgcccaccccatcctggccggcgtgggcgaggacgccctgctgacctgccagctgctgcccaagagaaccaccatgcacgtggaggtgagatggtacagaagcgagcccagcacccccgtgttcgtgcacagagacggcgtggaggtgaccgagatgcagatggaggagtacagaggctgggtggagtggatcgagaacggcatcgccaagggcaacgtggccctgtag

SEQ ID NO: 74744 - DNA, 780 bp, synthetic construct
  misc_feature 1..780: note = Description of Artificial Sequence: Synthetic coding sequence
  source 1..780: mol_type = other DNA
atggtggacttccccggctacaacctgagcggcgccgtggccagcttcctgttcatcctgctgaccatgaagcagagcgaggacttcagagtgatcggccccgcccaccccatcctggccggcgtgggcgaggacgccctgctgacctgccagctgctgcccaagagaaccaccatgcacgtggaggtgagatggtacagaagcgagcccagcacccccgtgttcgtgcacagagacggcgtggaggtgaccgagatgcagatggaggagtacagaggctgggtggagtggatcgagaacggcatcgccaagggcaacgtggccctgaagatccacaacatccagcccagcgacaacggccagtactggtgccacttccaggacggcaactactgcggcgagaccagcctgctgctgaaggtggccggcctgggcagcgcccccagcatccacatggagggccccggcgagagcggcgtgcagctggtgtgcaccgccagaggctggttccccgagccccaggtgtactgggaggacatcagaggcgagaagctgctggccgtgagcgagcacagaatccaggacgaggacggcctgttctacgccgaggccaccctggtggtgagaaacgccagcgccgagagcgtgagctgcctggtgcacaaccccgtgctgaccgaggagaagggcagcgtgatcagcctgcccgagaagctgcagaccgagctgggcaagtacgaggtgctggcccacacctgcggcggcagcctgtgcccctag

SEQ ID NO: 74745 - DNA, 780 bp, synthetic construct
  misc_feature 1..780: note = Description of Artificial Sequence: Synthetic coding sequence
  source 1..780: mol_type = other DNA
atggtggacttccccggctacaacctgagcggcgccgtggccagcttcctgttcatcctgctgaccatgaagcagagcgaggacttcagagtgatcggccccgcccaccccatcctggccggcgtgggcgaggacgccctgctgacctgccagctgctgcccaagagaaccaccatgcacgtggaggtgagatggtacagaagcgagcccagcacccccgtgttcgtgcacagagacggcgtggaggtgaccgagatgcagatggaggagtacagaggctgggtggagtggatcgagaacggcatcgccaagggcaacgtggccctgaagatccacaacatccagcccagcgacaacggccagtactggtgccacttccaggacggcaactactgcggcgagaccagcctgctgctgaaggtggccggcctgggcagcgcccccagcatccacatggagggccccggcgagagcggcgtgcagctggtgtgcaccgccagaggctggttccccgagccccaggtgtactgggaggacatcagaggcgagaagctgctggccgtgagcgagcacagaatccaggacaaggacggcctgttctacgccgaggccaccctggtggtgagaaacgccagcgccgagagcgtgagctgcctggtgcacaaccccgtgctgaccgaggagaagggcagcgtgatcagcctgcccgagaagctgcagaccgagctgggcaagtacgaggtgctggcccacacctgcggcggcagcctgtgcccctag

SEQ ID NO: 74746 - DNA, 636 bp, synthetic construct
  misc_feature 1..636: note = Description of Artificial Sequence: Synthetic coding sequence
  source 1..636: mol_type = other DNA
aaggccaacgcccagagcatggaggtgagatgggacagaagccacagataccccgccgtgcacgtgtacatggacggcgaccacgtggccggcgagcagatggccgagtacagaggcagaaccgtgctggtgagcgacgccatcgacgagggcagactgaccctgcagatcctgagcgccagacccagcgacgacggccagtacagatgcctgttcgagaaggacgacgtgtaccaggaggccagcctggacctgaaggtggtgagcctgggcagcagccccctgatcaccgtggagggccaggaggacggcgagatgcagcccatgtgcagcagcgacggctggttcccccagccccacgtgccctggagagacatggagggcaagaccatccccagcagcagccaggccctgacccagggcagccacggcctgttccacgtgcagaccctgctgagagtgaccaacatcagcgccgtggacgtgacctgcagcatcagcatccccttcctgggcgaggagaagatcgccaccttcagcctgagcgagagcagaatgaccttcctgtggaagaccctgctggtgtggggcctgctgctggccgtggccgtgggcctgcccagaaagagaagctag

SEQ ID NO: 74747 - DNA, 780 bp, synthetic construct; identical to SEQ ID NO: 74745
  misc_feature 1..780: note = Description of Artificial Sequence: Synthetic coding sequence
  source 1..780: mol_type = other DNA

SEQ ID NO: 74748 - DNA, 327 bp, synthetic construct; identical to SEQ ID NO: 74743
  misc_feature 1..327: note = Description of Artificial Sequence: Synthetic coding sequence
  source 1..327: mol_type = other DNA

SEQ ID NO: 74749 - DNA, 327 bp, synthetic construct; identical to SEQ ID NO: 74743
  misc_feature 1..327: note = Description of Artificial Sequence: Synthetic coding sequence
  source 1..327: mol_type = other DNA

SEQ ID NO: 74750 - DNA, 636 bp, synthetic construct
  misc_feature 1..636: note = Description of Artificial Sequence: Synthetic coding sequence
  source 1..636: mol_type = other DNA
aaggccaacgcccagagcatggaggtgagatgggacagaagccacagataccccgccgtgcacgtgtacatggacggcgaccacgtggccggcgagcagatggccgagtacagaggcagaaccgtgctggtgagcgacgccatcgacgagggcagactgaccctgcagatcctgagcgccagacccagcgacgacggccagtacagatgcctgttcgagaaggacgacgtgtaccaggaggccagcctggacctgaaggtggtgggcctgggcagcagccccctgatcaccgtggagggccaggaggacggcgagatgcagcccatgtgcagcagcgacggctggttcccccagccccacgtgccctggagagacatggagggcaagaccatccccagcagcagccaggccctgacccagggcagccacggcctgttccacgtgcagaccctgctgagagtgaccaacatcagcgccgtggacgtgacctgcagcatcagcatccccttcctgggcgaggagaagatcgccaccttcagcctgagcgagagcagaatgaccttcctgtggaagaccctgctggtgtggggcctgctgctggccgtggccgtgggcctgcccagaaagagaagctag

SEQ ID NO: 74751 - DNA, 816 bp, synthetic construct
  misc_feature 1..816: note = Description of Artificial Sequence: Synthetic coding sequence
  source 1..816: mol_type = other DNA
atggtggacttccccggctacaacctgagcggcgccgtggccagcttcctgttcatcctgctgaccatgaagcagagcgaggacttcagagtgatcggccccgcccaccccatcctggccggcgtgggcgaggacgccctgctgacctgccagctgctgcccaagagaaccaccatgcacgtggaggtgagatggtacagaagcgagcccagcacccccgtgttcgtgcacagagacggcgtggaggtgaccgagatgcagatggaggagtacagaggctgggtggagtggatcgagaacggcatcgccaagggcaacgtggccctgaagatccacaacatccagcccagcgacaacggccagtactggtgccacttccaggacggcaactactgcggcgagaccagcctgctgctgaaggtggccgccgtgctgagagacgacatcatcgccagcctgaaggtgaacggccccagccagcccatcctggtgagagtgggcgaggacatccagctgacctgctacctgagccccaaggccaacgcccagagcatggaggtgagatgggacagaagccacagataccccgccgtgcacgtgtacatggacggcgaccacgtggccggcgagcagatggccgagtacagaggcagaaccgtgctggtgagcgacgccatcgacgagggcagactgaccctgcagatcctgagcgccagacccagcgacgacggccagtacagatgcctgttcgagaaggacgacgtgtaccaggaggccagcctggacctgaaggtggtgtgggtgctgccccactag

SEQ ID NO: 74752 - DNA, 327 bp, synthetic construct; identical to SEQ ID NO: 74743
  misc_feature 1..327: note = Description of Artificial Sequence: Synthetic coding sequence
  source 1..327: mol_type = other DNA

SEQ ID NO: 74753 - DNA, 780 bp, synthetic construct; identical to SEQ ID NO: 74744
  misc_feature 1..780: note = Description of Artificial Sequence: Synthetic coding sequence
  source 1..780: mol_type = other DNA

SEQ ID NO: 74754 - DNA, 327 bp, synthetic construct; identical to SEQ ID NO: 74743
  misc_feature 1..327: note = Description of Artificial Sequence: Synthetic coding sequence
  source 1..327: mol_type = other DNA

SEQ ID NO: 74755 - DNA, 636 bp, synthetic construct; identical to SEQ ID NO: 74750
  misc_feature 1..636: note = Description of Artificial Sequence: Synthetic coding sequence
  source 1..636: mol_type = other DNA

SEQ ID NO: 74756 - DNA, 780 bp, synthetic construct; identical to SEQ ID NO: 74744
  misc_feature 1..780: note = Description of Artificial Sequence: Synthetic coding sequence
  source 1..780: mol_type = other DNA

SEQ ID NO: 74757 - DNA, 780 bp, synthetic construct; identical to SEQ ID NO: 74745
  misc_feature 1..780: note = Description of Artificial Sequence: Synthetic coding sequence
  source 1..780: mol_type = other DNA

SEQ ID NO: 74758 - DNA, 327 bp, synthetic construct; identical to SEQ ID NO: 74743
  misc_feature 1..327: note = Description of Artificial Sequence: Synthetic coding sequence
  source 1..327: mol_type = other DNA

SEQ ID NO: 74759 - DNA, 780 bp, synthetic construct; identical to SEQ ID NO: 74745
  misc_feature 1..780: note = Description of Artificial Sequence: Synthetic coding sequence
  source 1..780: mol_type = other DNA

SEQ ID NO: 74760 - DNA, 636 bp, synthetic construct; identical to SEQ ID NO: 74750
  misc_feature 1..636: note = Description of Artificial Sequence: Synthetic coding sequence
  source 1..636: mol_type = other DNA

SEQ ID NO: 74761 - DNA, 636 bp, synthetic construct; identical to SEQ ID NO: 74746
  misc_feature 1..636: note = Description of Artificial Sequence: Synthetic coding sequence
  source 1..636: mol_type = other DNA

SEQ ID NO: 74762 - DNA, 636 bp, synthetic construct; identical to SEQ ID NO: 74746
  misc_feature 1..636: note = Description of Artificial Sequence: Synthetic coding sequence
  source 1..636: mol_type = other DNA

SEQ ID NO: 74763 - DNA, 327 bp, synthetic construct; identical to SEQ ID NO: 74743
  misc_feature 1..327: note = Description of Artificial Sequence: Synthetic coding sequence
  source 1..327: mol_type = other DNA

SEQ ID NO: 74764 - DNA, 636 bp, synthetic construct; identical to SEQ ID NO: 74746
  misc_feature 1..636: note = Description of Artificial Sequence: Synthetic coding sequence
  source 1..636: mol_type = other DNA

SEQ ID NO: 74765 - DNA, 1449 bp, synthetic construct
  misc_feature 1..1449: note = Description of Artificial Sequence: Synthetic coding sequence
  source 1..1449: mol_type = other DNA
atggtggacttccccggctacaacctgagcggcgccgtggccagcttcctgttcatcctgctgaccatgaagcagagcgaggacttcagagtgatcggccccgcccaccccatcctggccggcgtgggcgaggacgccctgctgacctgccagctgctgcccaagagaaccaccatgcacgtggaggtgagatggtacagaagcgagcccagcacccccgtgttcgtgcacagagacggcgtggaggtgaccgagatgcagatggaggagtacagaggctgggtggagtggatcgagaacggcatcgccaagggcaacgtggccctgaagatccacaacatccagcccagcgacaacggccagtactggtgccacttccaggacggcaactactgcggcgagaccagcctgctgctgaaggtggccggcctgggcagcgcccccagcatccacatggagggccccggcgagagcggcgtgcagctggtgtgcaccgccagaggctggttccccgagccccaggtgtactgggaggacatcagaggcgagaagctgctggccgtgagcgagcacagaatccaggacaaggacggcctgttctacgccgaggccaccctggtggtgagaaacgccagcgccgagagcgtgagctgcctggtgcacaaccccgtgctgaccgaggagaagggcagcgtgatcagcctgcccgagaagctgcagaccgagctggccagcctgaaggtgaacggccccagccagcccatcctggtgagagtgggcgaggacatccagctgacctgctacctgagccccaaggccaacgcccagagcatggaggtgagatgggacagaagccacagataccccgccgtgcacgtgtacatggacggcgaccacgtggccggcgagcagatggccgagtacagaggcagaaccgtgctggtgagcgacgccatcgacgagggcagactgaccctgcagatcctgagcgccagacccagcgacgacggccagtacagatgcctgttcgagaaggacgacgtgtaccaggaggccagcctggacctgaaggtggtgagcctgggcagcagccccctgatcaccgtggagggccaggaggacggcgagatgcagcccatgtgcagcagcgacggctggttcccccagccccacgtgccctggagagacatggagggcaagaccatccccagcagcagccaggccctgacccagggcagccacggcctgttccacgtgcagaccctgctgagagtgaccaacatcagcgccgtggacgtgacctgcagcatcagcatccccttcctgggcgaggagaagatcgccaccttcagcctgagcgagagcagaatgaccttcctgtggaagaccctgctggtgtggggcctgctgctggccgtggccgtgggcctgcccagaaagagaagctag

SEQ ID NO: 74766 - DNA, 738 bp, synthetic construct
  misc_feature 1..738: note = Description of Artificial Sequence: Synthetic coding sequence
  source 1..738: mol_type = other DNA
atggtggacttccccggctacaacctgagcggcgccgtggccagcttcctgttcatcctgctgaccatgaagcagagcgacagactggacacccccaaggccagcctgaaggtgaacggccccagccagcccatcctggtgagagtgggcgaggacatccagctgacctgctacctgagccccaaggccaacgcccagagcatggaggtgagatgggacagaagccacagataccccgccgtgcacgtgtacatggacggcgaccacgtggccggcgagcagatggccgagtacagaggcagaaccgtgctggtgagcgacgccatcgacgagggcagactgaccctgcagatcctgagcgccagacccagcgacgacggccagtacagatgcctgttcgagaaggacgacgtgtaccaggaggccagcctggacctgaaggtggtgagcctgggcagcagccccctgatcaccgtggagggccaggaggacggcgagatgcagcccatgtgcagcagcgacggctggttcccccagccccacgtgccctggagagacatggagggcaagaccatccccagcagcagccaggccctgacccagggcagccacggcctgttccacgtgcagaccctgctgagagtgaccaacatcagcgccgtggacgtgacctgcagcatcagcatccccttcctgggcgaggagaagatcgccaccttcagcctgagcggctggtag

SEQ ID NO: 74767 - DNA, 537 bp, synthetic construct
  misc_feature 1..537: note = Description of Artificial Sequence: Synthetic coding sequence
  source 1..537: mol_type = other DNA
atggaggtgagatgggacagaagccacagataccccgccgtgcacgtgtacatggacggcgaccacgtggccggcgagcagatggccgagtacagaggcagaaccgtgctggtgagcgacgccatcgacgagggcagactgaccctgcagatcctgagcgccagacccagcgacgacggccagtacagatgcctgttcgagaaggacgacgtgtaccaggaggccagcctggacctgaaggtggtgagcctgggcagcagccccctgatcaccgtggagggccaggaggacggcgagatgcagcccatgtgcagcagcgacggctggttcccccagccccacgtgccctggagagacatggagggcaagaccatccccagcagcagccaggccctgacccagggcagccacggcctgttccacgtgcagaccctgctgagagtgaccaacatcagcgccgtggacgtgacctgcagcatcagcatccccttcctgggcgaggagaagatcgccaccttcagcctgagcggctggtag

SEQ ID NO: 74768 - DNA, 1167 bp, synthetic construct; identical to SEQ ID NO: 74741
  misc_feature 1..1167: note = Description of Artificial Sequence: Synthetic coding sequence
  source 1..1167: mol_type = other DNA

SEQ ID NO: 74769 - DNA, 1167 bp, synthetic construct
  misc_feature 1..1167: note = Description of Artificial Sequence: Synthetic coding sequence
  source 1..1167: mol_type = other DNA
atggtggacttccccggctacaacctgagcggcgccgtggccagcttcctgttcatcctgctgaccatgaagcagagcgaggacttcagagtgatcggccccgcccaccccatcctggccggcgtgggcgaggacgccctgctgacctgccagctgctgcccaagagaaccaccatgcacgtggaggtgagatggtacagaagcgagcccagcacccccgtgttcgtgcacagagacggcgtggaggtgaccgagatgcagatggaggagtacagaggctgggtggagtggatcgagaacggcatcgccaagggcaacgtggccctgaagatccacaacatccagcccagcgacaacggccagtactggtgccacttccaggacggcaactactgcggcgagaccagcctgctgctgaaggtggccgagaagctgctggccgtgctgagcagcctgaaggtgaacggccccagccagcccatcctggtgagagtgggcgaggacatccagctgacctgctacctgagccccaaggccaacgcccagagcatggaggtgagatgggacagaagccacagataccccgccgtgcacgtgtacatggacggcgaccacgtggccggcgagcagatggccgagtacagaggcagaaccgtgctggtgagcgacgccatcgacgagggcagactgaccctgcagatcctgagcgccagacccagcgacgacggccagtacagatgcctgttcgagaaggacgacgtgtaccaggaggccagcctggacctgaaggtggtgggcctgggcagcagccccctgatcaccgtggagggccaggaggacggcgagatgcagcccatgtgcagcagcgacggctggttcccccagccccacgtgccctggagagacatggagggcaagaccatccccagcagcagccaggccctgacccagggcagccacggcctgttccacgtgcagaccctgctgagagtgaccaacatcagcgccgtggacgtgacctgcagcatcagcatccccttcctgggcgaggagaagatcgccaccttcagcctgagcgagagcagaatgaccttcctgtggaagaccctgctggtgtggggcctgctgctggccgtggccgtgggcctgcccagaaagagaagctag

SEQ ID NO: 74770 - DNA, 1167 bp, synthetic construct; identical to SEQ ID NO: 74741
  misc_feature 1..1167: note = Description of Artificial Sequence: Synthetic coding sequence
  source 1..1167: mol_type = other DNA

SEQ ID NO: 74771 - DNA, 738 bp, synthetic construct
  misc_feature 1..738: note = Description of Artificial Sequence: Synthetic coding sequence
  source 1..738: mol_type = other DNA
atggtggacttccccggctacaacctgagcggcgccgtggccagcttcctgttcatcctgctgaccatgaagcagagcgacagactggacacccccaaggccagcctgaaggtgaacggccccagccagcccatcctggtgagagtgggcgaggacatccagctgacctgctacctgagccccaaggccaacgcccagagcatggaggtgagatgggacagaagccacagataccccgccgtgcacgtgtacatggacggcgaccacgtggccggcgagcagatggccgagtacagaggcagaaccgtgctggtgagcgacgccatcgacgagggcagactgaccctgcagatcctgagcgccagacccagcgacgacggccagtacagatgcctgttcgagaaggacgacgtgtaccaggaggccagcctggacctgaaggtggtgggcctgggcagcagccccctgatcaccgtggagggccaggaggacggcgagatgcagcccatgtgcagcagcgacggctggttcccccagccccacgtgccctggagagacatggagggcaagaccatccccagcagcagccaggccctgacccagggcagccacggcctgttccacgtgcagaccctgctgagagtgaccaacatcagcgccgtggacgtgacctgcagcatcagcatccccttcctgggcgaggagaagatcgccaccttcagcctgagcggctggtag

SEQ ID NO: 74772 - DNA, 738 bp, synthetic construct; identical to SEQ ID NO: 74766
  misc_feature 1..738: note = Description of Artificial Sequence: Synthetic coding sequence
  source 1..738: mol_type = other DNA

SEQ ID NO: 74773 - DNA, 1167 bp, synthetic construct; identical to SEQ ID NO: 74741
  misc_feature 1..1167: note = Description of Artificial Sequence: Synthetic coding sequence
  source 1..1167: mol_type = other DNA

SEQ ID NO: 74774 - DNA, 816 bp, synthetic construct; identical to SEQ ID NO: 74751
  misc_feature 1..816: note = Description of Artificial Sequence: Synthetic coding sequence
  source 1..816: mol_type = other DNA

SEQ ID NO: 74775 - DNA, 738 bp, synthetic construct
  misc_feature 1..738: note = Description of Artificial Sequence: Synthetic coding sequence
  source 1..738: mol_type = other DNA
atggtggacttccccggctacaacctgagcggcgccgtggccagcttcctgttcatcctgctgaccatgaagcagagcgagaagctgcagaccgagctggccagcctgaaggtgaacggccccagccagcccatcctggtgagagtgggcgaggacatccagctgacctgctacctgagccccaaggccaacgcccagagcatggaggtgagatgggacagaagccacagataccccgccgtgcacgtgtacatggacggcgaccacgtggccggcgagcagatggccgagtacagaggcagaaccgtgctggtgagcgacgccatcgacgagggcagactgaccctgcagatcctgagcgccagacccagcgacgacggccagtacagatgcctgttcgagaaggacgacgtgtaccaggaggccagcctggacctgaaggtggtgggcctgggcagcagccccctgatcaccgtggagggccaggaggacggcgagatgcagcccatgtgcagcagcgacggctggttcccccagccccacgtgccctggagagacatggagggcaagaccatccccagcagcagccaggccctgacccagggcagccacggcctgttccacgtgcagaccctgctgagagtgaccaacatcagcgccgtggacgtgacctgcagcatcagcatccccttcctgggcgaggagaagatcgccaccttcagcctgagcggctggtag

SEQ ID NO: 74776 - DNA, 537 bp, synthetic construct
  misc_feature 1..537: note = Description of Artificial Sequence: Synthetic coding sequence
  source 1..537: mol_type = other DNA
atggaggtgagatgggacagaagccacagataccccgccgtgcacgtgtacatggacggcgaccacgtggccggcgagcagatggccgagtacagaggcagaaccgtgctggtgagcgacgccatcgacgagggcagactgaccctgcagatcctgagcgccagacccagcgacgacggccagtacagatgcctgttcgagaaggacgacgtgtaccaggaggccagcctggacctgaaggtggtgggcctgggcagcagccccctgatcaccgtggagggccaggaggacggcgagatgcagcccatgtgcagcagcgacggctggttcccccagccccacgtgccctggagagacatggagggcaagaccatccccagcagcagccaggccctgacccagggcagccacggcctgttccacgtgcagaccctgctgagagtgaccaacatcagcgccgtggacgtgacctgcagcatcagcatccccttcctgggcgaggagaagatcgccaccttcagcctgagcggctggtag

SEQ ID NO: 74777 - DNA, 738 bp, synthetic construct; identical to SEQ ID NO: 74766
  misc_feature 1..738: note = Description of Artificial Sequence: Synthetic coding sequence
  source 1..738: mol_type = other DNA

SEQ ID NO: 74778 - DNA, 1368 bp, synthetic construct
  misc_feature 1..1368: note = Description of Artificial Sequence: Synthetic coding sequence
  source 1..1368: mol_type = other DNA
atggtggacttccccggctacaacctgagcggcgccgtggccagcttcctgttcatcctgctgaccatgaagcagagcgaggacttcagagtgatcggccccgcccaccccatcctggccggcgtgggcgaggacgccctgctgacctgccagctgctgcccaagagaaccaccatgcacgtggaggtgagatggtacagaagcgagcccagcacccccgtgttcgtgcacagagacggcgtggaggtgaccgagatgcagatggaggagtacagaggctgggtggagtggatcgagaacggcatcgccaagggcaacgtggccctgaagatccacaacatccagcccagcgacaacggccagtactggtgccacttccaggacggcaactactgcggcgagaccagcctgctgctgaaggtggccggcctgggcagcgcccccagcatccacatggagggccccggcgagagcggcgtgcagctggtgtgcaccgccagaggctggttccccgagccccaggtgtactgggaggacatcagaggcgagaagctgctggccgtgagcgagcacagaatccaggacgaggacggcctgttctacgccgaggccaccctggtggtgagaaacgccagcgccgagagcgtgagctgcctggtgcacaaccccgtgctgaccgaggagaagggcagcgtgatcagcctgcccgagaagctgcagaccgagctggccagcctgaaggtgaacggccccagccagcccatcctggtgagagtgggcgaggacatccagctgacctgctacctgagccccaaggccaacgcccagagcatggaggtgagatgggacagaagccacagataccccgccgtgcacgtgtacatggacggcgaccacgtggccggcgagcagatggccgagtacagaggcagaaccgtgctggtgagcgacgccatcgacgagggcagactgaccctgcagatcctgagcgccagacccagcgacgacggccagtacagatgcctgttcgagaaggacgacgtgtaccaggaggccagcctggacctgaaggtggtgggcctgggcagcagccccctgatcaccgtggagggccaggaggacggcgagatgcagcccatgtgcagcagcgacggctggttcccccagccccacgtgccctggagagacatggagggcaagaccatccccagcagcagccaggccctgacccagggcagccacggcctgttccacgtgcagaccctgctgagagtgaccaacatcagcgccgtggacgtgacctgcagcatcagcatccccttcctgggcgaggagaagatcgccaccttcagcctgagcggctggtag

SEQ ID NO: 74779 - DNA, 816 bp, synthetic construct; identical to SEQ ID NO: 74751
  misc_feature 1..816: note = Description of Artificial Sequence: Synthetic coding sequence
  source 1..816: mol_type = other DNA

SEQ ID NO: 74780 - DNA, 816 bp, synthetic construct; identical to SEQ ID NO: 74751
  misc_feature 1..816: note = Description of Artificial Sequence: Synthetic coding sequence
  source 1..816: mol_type = other DNA

SEQ ID NO: 74781 - DNA, 738 bp, synthetic construct; identical to SEQ ID NO: 74766
  misc_feature 1..738: note = Description of Artificial Sequence: Synthetic coding sequence
  source 1..738: mol_type = other DNA

SEQ ID NO: 74782 - DNA, 816 bp, synthetic construct; identical to SEQ ID NO: 74751
  misc_feature 1..816: note = Description of Artificial Sequence: Synthetic coding sequence
  source 1..816: mol_type = other DNA

SEQ ID NO: 74783 - DNA, 738 bp, synthetic construct; identical to SEQ ID NO: 74771
  misc_feature 1..738: note = Description of Artificial Sequence: Synthetic coding sequence
  source 1..738: mol_type = other DNA

SEQ ID NO: 74784 - DNA, 738 bp, synthetic construct; identical to SEQ ID NO: 74766
  misc_feature 1..738: note = Description of Artificial Sequence: Synthetic coding sequence
  source 1..738: mol_type = other DNA

SEQ ID NO: 74785 - DNA, 1368 bp, synthetic construct; identical to SEQ ID NO: 74740
  misc_feature 1..1368: note = Description of Artificial Sequence: Synthetic coding sequence
  source 1..1368: mol_type = other DNA

SEQ ID NO: 74786 - DNA, 1368 bp, synthetic construct; identical to SEQ ID NO: 74740
  misc_feature 1..1368: note = Description of Artificial Sequence: Synthetic coding sequence
  source 1..1368: mol_type = other DNA

SEQ ID NO: 74787 - DNA, 537 bp, synthetic construct; identical to SEQ ID NO: 74767
  misc_feature 1..537: note = Description of Artificial Sequence: Synthetic coding sequence
  source 1..537: mol_type = other DNA

SEQ ID NO: 74788 - DNA, 1368 bp, synthetic construct; identical to SEQ ID NO: 74740
  misc_feature 1..1368: note = Description of Artificial Sequence: Synthetic coding sequence
  source 1..1368: mol_type = other DNA

SEQ ID NO: 74789 - DNA, 816 bp, synthetic construct; identical to SEQ ID NO: 74751
  misc_feature 1..816: note = Description of Artificial Sequence: Synthetic coding sequence
  source 1..816: mol_type = other DNA

SEQ ID NO: 74790 - DNA, 1368 bp, synthetic construct; identical to SEQ ID NO: 74778
  misc_feature 1..1368: note = Description of Artificial Sequence: Synthetic coding sequence
  source 1..1368: mol_type = other DNA

SEQ ID NO: 74791 - DNA, 1368 bp, synthetic construct; identical to SEQ ID NO: 74778
  misc_feature 1..1368: note = Description of Artificial Sequence: Synthetic coding sequence
  source 1..1368: mol_type = other DNA

SEQ ID NO: 74792 - DNA, 816 bp, synthetic construct; identical to SEQ ID NO: 74751
  misc_feature 1..816: note = Description of Artificial Sequence: Synthetic coding sequence
  source 1..816: mol_type = other DNA

SEQ ID NO: 74793 - DNA, 537 bp, synthetic construct; identical to SEQ ID NO: 74776
  misc_feature 1..537: note = Description of Artificial Sequence: Synthetic coding sequence
  source 1..537: mol_type = other DNA

SEQ ID NO: 74794 - DNA, 738 bp, synthetic construct; identical to SEQ ID NO: 74775
  misc_feature 1..738: note = Description of Artificial Sequence: Synthetic coding sequence
  source 1..738: mol_type = other DNA

SEQ ID NO: 74795 - DNA, 738 bp, synthetic construct; identical to SEQ ID NO: 74742
  misc_feature 1..738: note = Description of Artificial Sequence: Synthetic coding sequence
  source 1..738: mol_type = other DNA

SEQ ID NO: 74796 - DNA, 1167 bp, synthetic construct; identical to SEQ ID NO: 74741
  misc_feature 1..1167: note = Description of Artificial Sequence: Synthetic coding sequence
  source 1..1167: mol_type = other DNA

SEQ ID NO: 74797 - DNA, 1368 bp, synthetic construct; identical to SEQ ID NO: 74740
  misc_feature 1..1368: note = Description of Artificial Sequence: Synthetic coding sequence
  source 1..1368: mol_type = other DNA

SEQ ID NO: 74798 - DNA, 1167 bp, synthetic construct; identical to SEQ ID NO: 74769
  misc_feature 1..1167: note = Description of Artificial Sequence: Synthetic coding sequence
  source 1..1167: mol_type = other DNA

SEQ ID NO: 74799 - DNA, 738 bp, synthetic construct; identical to SEQ ID NO: 74771
  misc_feature 1..738: note = Description of Artificial Sequence: Synthetic coding sequence
  source 1..738: mol_type = other DNA

SEQ ID NO: 74800 - DNA, 816 bp, synthetic construct; identical to SEQ ID NO: 74751
  misc_feature 1..816: note = Description of Artificial Sequence: Synthetic coding sequence
  source 1..816: mol_type = other DNA

SEQ ID NO: 74801 - DNA, 1167 bp, synthetic construct; identical to SEQ ID NO: 74769
  misc_feature 1..1167: note = Description of Artificial Sequence: Synthetic coding sequence
  source 1..1167: mol_type = other DNA

SEQ ID NO: 74802 - DNA, 1401 bp, synthetic construct
  misc_feature 1..1401: note = Description of Artificial Sequence: Synthetic coding sequence
  source 1..1401: mol_type = other DNA
atggccttcgtgctgatcctggtgctgagcttctacgagctggtgagcggccagtggcaggtgaccggccccggcaagttcgtgcaggccctggtgggcgaggacgccgtgttcagctgcagcctgttccccgagaccagcgccgaggccatggaggtgagattcttcagaaaccagttccacgccgtggtgcacctgtacagagacggcgaggactgggagagcaagcagatgccccagtacagaggcagaaccgagttcgtgaaggacagcatcgccggcggcagagtgagcctgagactgaagaacatcacccccagcgacatcggcctgtacggctgctggttcagcagccagatctacgacgaggaggccacctgggagctgagagtggccgccctgggcagcctgcccctgatcagcatcgtgggctacgtggacggcggcatccagctgctgtgcctgagcagcggctggttcccccagcccaccgccaagtggaagggcccccagggccaggacctgagcagcgacagcagagccaacgccgacggctacagcctgtacgacgtggagatcagcatcatcgtgcaggagaacgccggcagcatcctgtgcagcatccacctggccgagcagagccacgaggtggagagcaaggtgctgatcggcgagaccttcttccagcccagcccctggagactggccagcatcctgctgggcctgctgtgcggcgccctgtgcggcgtggtgatgggcatgatcatcgtgttcttcaagagcaagggcaagatccaggccgagctggactggagaagaaagcacggccaggccgagctgagagacgccagaaagcacgccgtggaggtgaccctggaccccgagaccgcccaccccaagctgtgcgtgagcgacctgaagaccgtgacccacagaaaggccccccaggaggtgccccacagcgagaagagattcaccagaaagagcgtggtggccagccagggcttccaggccggcaagcactactgggaggtggacgtgggccagaacgtgggctggtacgtgggcgtgtgcagagacgacgtggacagaggcaagaacaacgtgaccctgagccccaacaacggctactgggtgctgagactgaccaccgagcacctgtacttcaccttcaacccccacttcatcagcctgccccccagcaccccccccaccagagtgggcgtgttcctggactacgagggcggcaccatcagcttcttcaacaccaacgaccagagcctgatctacaccctgctgacctgccagttcgagggcctgctgagaccctacatccagcacgccatgtacgacgaggagaagggcacccccatcttcatctgccccgtgagctggggctag

SEQ ID NO: 74803 - DNA, 1299 bp, synthetic construct
  misc_feature 1..1299: note = Description of Artificial Sequence: Synthetic coding sequence
  source 1..1299: mol_type = other DNA
atggccttcgtgctgatcctggtgctgagcttctacgagctggtgagcggccagtggcaggtgaccggccccggcaagttcgtgcaggccctggtgggcgaggacgccgtgttcagctgcagcctgttccccgagaccagcgccgaggccatggaggtgagattcttcagaaaccagttccacgccgtggtgcacctgtacagagacggcgaggactgggagagcaagcagatgccccagtacagaggcagaaccgagttcgtgaaggacagcatcgccggcggcagagtgagcctgagactgaagaacatcacccccagcgacatcggcctgtacggctgctggttcagcagccagatctacgacgaggaggccacctgggagctgagagtggccgccctgggcagcctgcccctgatcagcatcgtgggctacgtggacggcggcatccagctgctgtgcctgagcagcgtgcagcccagcccctggagactggccagcatcctgctgggcctgctgtgcggcgccctgtgcggcgtggtgatgggcatgatcatcgtgttcttcaagagcaagggcaagatccaggccgagctgggcatgtgccacgtgctgagcctgccccacatggtgctgcccggccccagcctgatccacagcctgagcctgtggaccaccctggccgccggctggaccggcagcaccgactggagaagaaagcacggccaggccgagctgagagacgccagaaagcacgccgtggaggtgaccctggaccccgagaccgcccaccccaagctgtgcgtgagcgacctgaagaccgtgacccacagaaaggccccccaggaggtgccccacagcgagaagagattcaccagaaagagcgtggtggccagccagggcttccaggccggcaagcactactgggaggtggacgtgggccagaacgtgggctggtacgtgggcgtgtgcagagacgacgtggacagaggcaagaacaacgtgaccctgagccccaacaacggctactgggtgctgagactgaccaccgagcacctgtacttcaccttcaacccccacttcatcagcctgccccccagcaccccccccaccagagtgggcgtgttcctggactacgagggcggcaccatcagcttcttcaacaccaacgaccagagcctgatctacaccctgctgacctgccagttcgagggcctgctgagaccctacatccagcacgccatgtacgacgaggagaagggcacccccatcttcatctgccccgtgagctggggctag

SEQ ID NO: 74804 - DNA, 1809 bp, synthetic construct
  misc_feature 1..1809: note = Description of Artificial Sequence: Synthetic coding sequence
  source 1..1809: mol_type = other DNA
atgcacagcaaggtgaccatcatctgcatcagattcctgttctggttcctgctgctgtgcatgctgatcggcaagagccacaccgaggacgacatcatcatcgccaccaagaacggcaaggtgagaggcatgaacctgaccgtgttcggcggcaccgtgaccgccttcctgggcatcccctacgcccagccccccctgggcagactgagattcaagaagccccagagcctgaccaagtggagcgacatctggaacgccaccaagtacgccaacagctgctgccagaacatcgaccagagcttccccggcttccacggcagcgagatgtggaaccccaacaccgacctgagcgaggactgcctgtacctgaacgtgtggatccccgcccccaagcccaagaacgccaccgtgctgatctggatctacggcggcggcttccagaccggcaccagcagcctgcacgtgtacgacggcaagttcctggccagagtggagagagtgatcgtggtgagcatgaactacagagtgggcgccctgggcttcctggccctgcccggcaaccccgaggcccccggcaacatgggcctgttcgaccagcagctggccctgcagtgggtgcagaagaacatcgccgccttcggcggcaaccccaagagcgtgaccctgttcggcgagagcgccggcgccgccagcgtgagcctgcacctgctgagccccggcagccacagcctgttcaccagagccatcctgcagagcggcagcttcaacgccccctgggccgtgaccagcctgtacgaggccagaaacagaaccctgaacctggccaagctgaccggctgcagcagagagaacgagaccgagatcatcaagtgcctgagaaacaaggacccccaggagatcctgctgaacgaggccttcgtggtgccctacggcacccccctgagcgtgaacttcggccccaccgtggacggcgacttcctgaccgacatgcccgacatcctgctggagctgggccagttcaagaagacccagatcctggtgggcgtgaacaaggacgagggcaccgccttcctggtgtacggcgcccccggcttcagcaaggacaacaacagcatcatcaccagaaaggagttccaggagggcctgaagatcttcttccccggcgtgagcgagttcggcaaggagagcatcctgttccactacaccgactgggtggacgaccagagacccgagaactacagagaggccctgggcgacgtggtgggcgactacaacttcatctgccccgccctggagttcaccaagaagttcagcgagtggggcaacaacgccttcttctactacttcgagcacagaagcagcaagctgccctggcccgagtggatgggcgtgatgcacggctacgagatcgagttcgtgttcggcctgcccctggagagaagagacaactacaccaaggccgaggagatcctgagcagaagcatcgtgaagagatgggccaacttcgccaagtacggcaaccccaacgagacccagaacaacagcaccagctggcccgtgttcaagagcaccgagcagaagtacctgaccctgaacaccgagagcaccagaatcatgaccaagctgagagcccagcagtgcagattctggaccagcttcttccccaaggtgctggagatgaccggcaacatcgacgaggccgagtgggagtggaaggccggcttccacagatggaacaactacatgatggactggaagaaccagttcaacgactacaccagcaagaaggagagctgcgtgggcctgtag

SEQ ID NO: 74805 - DNA, 399 bp, synthetic construct
  misc_feature 1..399: note = Description of Artificial Sequence: Synthetic coding sequence
  source 1..399: mol_type = other DNA
gccgtgcagttcaccggctggagcagcagctgcatcctgcacttccccgaggtgctgcacgacttccacagcctgcagaccctgcccagcctgctgcagagaatcggcaaccccaacgagacccagaacaacagcaccagctggcccgtgttcaagagcaccgagcagaagtacctgaccctgaacaccgagagcaccagaatcatgaccaagctgagagcccagcagtgcagattctggaccagcttcttccccaaggtgctggagatgaccggcaacatcgacgaggccgagtgggagtggaaggccggcttccacagatggaacaactacatgatggactggaagaaccagttcaacgactacaccagcaagaaggagagctgcgtgggcctgtag

SEQ ID NO: 74806 - DNA, 195 bp, synthetic construct
  misc_feature 1..195: note = Description of Artificial Sequence: Synthetic coding sequence
  source 1..195: mol_type = other DNA
atgaccaagctgagagcccagcagtgcagattctggaccagcttcttccccaaggtgctggagatgaccggcaacatcgacgaggccgagtgggagtggaaggccggcttccacagatggaacaactacatgatggactggaagaaccagttcaacgactacaccagcaagaaggagagctgcgtgggcctgtag

SEQ ID NO: 74807 - DNA, 1431 bp, synthetic construct
  misc_feature 1..1431: note = Description of Artificial Sequence: Synthetic coding sequence
  source 1..1431: mol_type = other DNA
atggccagcagaatcggcctgagaatgcagctgatgagagagcaggcccagcaggaggagcagagagagagaatgcagcagcaggccgtgatgcactacatgcagcagcagcagcagcagcagcagcagcagctgggcggcccccccacccccgccatcaacacccccgtgcacttccagagccccccccccgtgcccggcgaggtgctgaaggtgcagagctacctggagaaccccaccagctaccacctgcagcagagccagcaccagaaggtgagagagtacctgagcgagacctacggcaacaagttcgccgcccacatcagccccgcccagggcagccccaagcccccccccgccgccagccccggcgtgagagccggccacgtgctgagcagcagcgccggcaacagcgcccccaacagccccatggccatgctgcacatcggcagcaaccccgagagagagctggacgacgtgatcgacaacatcatgagactggacgacgtgctgggctacatcaaccccgagatgcagatgcccaacaccctgcccctgagcagcagccacctgaacgtgtacagcagcgacccccaggtgaccgccagcctggtgggcgtgaccagcagcagctgccccgccgacctgacccagaagagagagctgaccgacgccgagagcagagccctggccaaggagagacagaagaaggacaaccacaacctgatcgagagaagaagaagattcaacatcaacgacagaatcaaggagctgggcatgctgatccccaaggccaacgacctggacgtgagatggaacaagggcaccatcctgaaggccagcgtggactacatcagaagaatgcagaaggacctgcagaagagcagagagctggagaaccacagcagaagactggagatgaccaacaagcagctgtggctgagaatccaggagctggagatgcaggccagagtgcacggcctgcccaccaccagccccagcggcatgaacatggccgagctggcccagcaggtggtgaagcaggagctgcccagcgaggagggccccggcgaggccctgatgctgggcgccgaggtgcccgaccccgagcccctgcccgccctgcccccccaggcccccctgcccctgcccacccagccccccagccccttccaccacctggacttcagccacagcctgagcttcggcggcagagaggacgagggcccccccggctaccccgagcccctggcccccggccacggcagccccttccccagcctgagcaagaaggacctggacctgatgctgctggacgacagcctgctgcccctggccagcgaccccctgctgagcaccatgagccccgaggccagcaaggccagcagcagaagaagcagcttcagcatggaggagggcgacgtgctgtag

SEQ ID NO: 74808 - DNA, 426 bp, synthetic construct
  misc_feature 1..426: note = Description of Artificial Sequence: Synthetic coding sequence
  source 1..426: mol_type = other DNA
atggccggcgaggagatcaacgaggactaccccgtggagatccacgagtacctgagcgccttcgagaacagcatcggcgccgtggacgagatgctgaagaccatgatgagcgtgagcagaaacgagctgctgcagaagctggaccccctggagcaggccaaggtggacctggtgagcgcctacaccctgaacagcatgttctgggtgtacctggccacccagggcgtgaaccccaaggagcaccccgtgaagcaggagctggagagaatcagagtgtacatgaacagagtgaaggagatcaccgacaagaagaaggccggcaagctggacagaggcgccgccagcagattcgtgaagaacgccctgtgggagcccaagagcaagaacgccagcaaggtggccaacaagggcaagagcaagagctag

SEQ ID NO: 74809 - DNA, 543 bp, synthetic construct
  misc_feature 1..543: note = Description of Artificial Sequence: Synthetic coding sequence
  source 1..543: mol_type = other DNA
atgcccagccccagcgtgagcaccagcgccgccagcgtgctggagggcgtgtgcggcagagccagaagcacctacagaacccccgaggagggcgaggagcagagctggagcgccatcatggccggcgaggagatcaacgaggactaccccgtggagatccacgagtacctgagcgccttcgagaacagcatcggcgccgtggacgagatgctgaagaccatgatgagcgtgagcagaaacgagctgctgcagaagctggaccccctggagcaggccaaggtggacctggtgagcgcctacaccctgaacagcatgttctgggtgtacctggccacccagggcgtgaaccccaaggagcaccccgtgaagcaggagctggagagaatcagagtgtacatgaacagagtgaaggagatcaccgacaagaagaaggccggcaagctggacagaggcgccgccagcagattcgtgaagaacgccctgtgggagcccaagagcaagaacgccagcaaggtggccaacaagggcaagagcaagagctag

SEQ ID NO: 74810 - DNA, 426 bp, synthetic construct; identical to SEQ ID NO: 74808
  misc_feature 1..426: note = Description of Artificial Sequence: Synthetic coding sequence
  source 1..426: mol_type = other DNA

SEQ ID NO: 74811 - DNA, 426 bp, synthetic construct; identical to SEQ ID NO: 74808
  misc_feature 1..426: note = Description of Artificial Sequence: Synthetic coding sequence
  source 1..426: mol_type = other DNA

SEQ ID NO: 74812 - DNA, 957 bp, synthetic construct
  misc_feature 1..957: note = Description of Artificial Sequence: Synthetic coding sequence
  source 1..957: mol_type = other DNA
atgctgagcgagagcagcagcttcctgaagggcgtgatgctgggcagcatcttctgcgccctgatcaccatgctgggccacatcagaatcggccacggcaacagaatgcaccaccacgagcaccaccacctgcaggcccccaacaaggaggacatcctgaagatcagcgaggacgagagaatggagctgagcaagagcttcagagtgtactgcatcatcctggtgaagcccaaggacgtgagcctgtgggccgccgtgaaggagacctggaccaagcactgcgacaaggccgagttcttcagcagcgagaacgtgaaggtgttcgagagcatcaacatggacaccaacgacatgtggctgatgatgagaaaggcctacaagtacgccttcgacaagtacagagaccagtacaactggttcttcctggccagacccaccaccttcgccatcatcgagaacctgaagtacttcctgctgaagaaggaccccagccagcccttctacctgggccacaccatcaagagcggcgacctggagtacgtgggcatggagggcggcatcgtgctgagcgtggagagcatgaagagactgaacagcctgctgaacatccccgagaagtgccccgagcagggcggcatgatctggaagatcagcgaggacaagcagctggccgtgtgcctgaagtacgccggcgtgttcgccgagaacgccgaggacgccgacggcaaggacgtgttcaacaccaagagcgtgggcctgagcatcaaggaggccatgacctaccaccccaaccaggtggtggagggctgctgcagcgacatggccgtgaccttcaacggcctgacccccaaccagatgcacgtgatgatgtacggcgtgtacagactgagagccttcggccacatcttcaacgacgccctggtgttcctgccccccaacggcagcgacaacgactag

SEQ ID NO: 74813 - DNA, 957 bp, synthetic construct; identical to SEQ ID NO: 74812
  misc_feature 1..957: note = Description of Artificial Sequence: Synthetic coding sequence
  source 1..957: mol_type = other DNA

SEQ ID NO: 74814 - DNA, 732 bp, synthetic construct
  misc_feature 1..732: note = Description of Artificial Sequence: Synthetic coding sequence
  source 1..732: mol_type = other DNA
atgagacccctgctggtgctgctgctgctgggcctggccgccggcagcccccccctggacgacaacaagatccccagcctgtgccccggccaccccggcctgcccggcacccccggccaccacggcagccagggcctgcccggcagagacggcagagacggcagagacggcgcccccggcgcccccggcgagaagggcgagggcggcagacccggcctgcccggccccagaggcgaccccggccccagaggcgaggccggccccgccggccccaccggccccgccggcgagtgcagcgtgccccccagaagcgccttcagcgccaagagaagcgagagcagagtgcccccccccagcgacgcccccctgcccttcgacagagtgctggtgaacgagcagggccactacgacgccgtgaccggcaagttcacctgccaggtgcccggcgtgtactacttcgccgtgcacgccaccgtgtacagagccagcctgcagttcgacctggtgaagaacggcgagagcatcgccagcttcttccagttcttcggcggctggcccaagcccgccagcctgagcggcggcgccatggtgagactggagcccgaggaccaggtgtgggtgcaggtgggcgtgggcgactacatcggcatctacgccagcatcaagaccgacagcaccttcagcggcttcctggtgtacagcgactggcacagcagccccgtgttcgcctag

SEQ ID NO: 74815 - DNA, 732 bp, synthetic construct; identical to SEQ ID NO: 74814
  misc_feature 1..732: note = Description of Artificial Sequence: Synthetic coding sequence
  source 1..732: mol_type = other DNA

SEQ ID NO: 74816 - DNA, 759 bp, synthetic construct
  misc_feature 1..759: note = Description of Artificial Sequence: Synthetic coding sequence
  source 1..759: mol_type = other DNA
atggccgcccccgccctgctgctgctggccctgctgctgcccgtgggcgcctggcccggcctgcccagaagaccctgcgtgcactgctgcagacccgcctggccccccggcccctacgccagagtgagcgacagagacctgtggagaggcgacctgtggagaggcctgcccagagtgagacccaccatcgacatcgagatcctgaagggcgagaagggcgaggccggcgtgagaggcagagccggcagaagcggcaaggagggcccccccggcgccagaggcctgcagggcagaagaggccagaagggccaggtgggcccccccggcgccgcctgcagaagagcctacgccgccttcagcgtgggcagaagagagggcctgcacagcagcgaccacttccaggccgtgcccttcgacaccgagctggtgaacctggacggcgccttcgacctggccgccggcagattcctgtgcaccgtgcccggcgtgtacttcctgagcctgaacgtgcacacctggaactacaaggagacctacctgcacatcatgctgaacagaagacccgccgccgtgctgtacgcccagcccagcgagagaagcgtgatgcaggcccagagcctgatgctgctgctggccgccggcgacgccgtgtgggtgagaatgttccagagagacagagacaacgccatctacggcgagcacggcgacctgtacatcaccttcagcggccacctggtgaagcccgccgccgagctgtag

SEQ ID NO: 74817 - DNA, 1002 bp, synthetic construct
  misc_feature 1..1002: note = Description of Artificial Sequence: Synthetic coding sequence
  source 1..1002: mol_type = other DNA
atgagaatctggtggctgctgctggccatcgagatctgcaccggcaacatcaacagccaggacacctgcagacagggccaccccggcatccccggcaaccccggccacaacggcctgcccggcagagacggcagagacggcgccaagggcgacaagggcgacgccggcgagcccggcagacccggcagccccggcaaggacggcaccagcggcgagaagggcgagagaggcgccgacggcaaggtggaggccaagggcatcaagggcgaccagggcagcagaggcagccccggcaagcacggccccaagggcctggccggccccatgggcgagaagggcctgagaggcgagaccggcccccagggccagaagggcaacaagggcgacgtgggccccaccggccccgagggccccagaggcaacatcggccccctgggccccaccggcctgcccggccccatgggccccatcggcaagcccggccccaagggcgaggccggccccaccggcccccagggcgagcccggcgtgagaggcatcagaggctggaagggcgacagaggcgagaagggcaagatcggcgagaccctggtgctgcccaagagcgccttcaccgtgggcctgaccgtgctgagcaagttccccagcagcgacatgcccatcaagttcgacaagatcctgtacaacgagttcaaccactacgacaccgccgccggcaagttcacctgccacatcgccggcgtgtactacttcacctaccacatcaccgtgttcagcagaaacgtgcaggtgagcctggtgaagaacggcgtgaagatcctgcacaccaaggacgcctacatgagcagcgaggaccaggccagcggcggcatcgtgctgcagctgaagctgggcgacgaggtgtggctgcaggtgaccggcggcgagagattcaacggcctgttcgccgacgaggacgacgacaccaccttcaccggcttcctgctgttcagcagcccctag

SEQ ID NO: 74818 - DNA, 1002 bp, synthetic construct; identical to SEQ ID NO: 74817
  misc_feature 1..1002: note = Description of Artificial Sequence: Synthetic coding sequence
  source 1..1002: mol_type = other DNA

SEQ ID NO: 74819 - DNA, 300 bp, synthetic construct
  misc_feature 1..300: note = Description of Artificial Sequence: Synthetic coding sequence
  source 1..300: mol_type = other DNA
atgagaatctggtggctgctgctggccatcgagatctgcaccggcaacatcaacagccaggacacctgcagacagggccaccccggcatccccggcaaccccggccacaacggcctgcccggcagagacggcagagacggcgccaagggcgacaagggcgacgccggcgagcccggctgccccggcagccccggcaaggacggcaccagcggcgagaagggcgagagaggcgccgacggcaaggtggaggccaagggcatcaagggcatgttcagatgcctgtggagcaagaccgagtag

SEQ ID NO: 74820 - DNA, 1002 bp, synthetic construct
  misc_feature 1..1002: note = Description of Artificial Sequence: Synthetic coding sequence
  source 1..1002: mol_type = other DNA
atgagaatctggtggctgctgctggccatcgagatctgcaccggcaacatcaacagccaggacacctgcagacagggccaccccggcatccccggcaaccccggccacaacggcctgcccggcagagacggcagagacggcgccaagggcgacaagggcgacgccggcgagcccggctgccccggcagccccggcaaggacggcaccagcggcgagaagggcgagagaggcgccgacggcaaggtggaggccaagggcatcaagggcgaccagggcagcagaggcagccccggcaagcacggccccaagggcctggccggccccatgggcgagaagggcctgagaggcgagaccggcccccagggccagaagggcaacaagggcgacgtgggccccaccggccccgagggccccagaggcaacatcggccccctgggccccaccggcctgcccggccccatgggccccatcggcaagcccggccccaagggcgaggccggccccaccggcccccagggcgagcccggcgtgagaggcatcagaggctggaagggcgacagaggcgagaagggcaagatcggcgagaccctggtgctgcccaagagcgccttcaccgtgggcctgaccgtgctgagcaagttccccagcagcgacgtgcccatcaagttcgacaagatcctgtacaacgagttcaaccactacgacaccgccgtgggcaagttcacctgccacatcgccggcgtgtactacttcacctaccacatcaccgtgttcagcagaaacgtgcaggtgagcctggtgaagaacggcgtgaagatcctgcacaccagagacgcctacgtgagcagcgaggaccaggccagcggcagcatcgtgctgcagctgaagctgggcgacgagatgtggctgcaggtgaccggcggcgagagattcaacggcctgttcgccgacgaggacgacgacaccaccttcaccggcttcctgctgttcagcagccagtag

SEQ ID NO: 74821 - DNA, 1002 bp, synthetic construct; identical to SEQ ID NO: 74820
  misc_feature 1..1002: note = Description of Artificial Sequence: Synthetic coding sequence
  source 1..1002: mol_type = other DNA

SEQ ID NO: 74822 - DNA, 150 bp, synthetic construct
  misc_feature 1..150: note = Description of Artificial Sequence: Synthetic coding sequence
  source 1..150: mol_type = other DNA
gtgggccccaccggccccgagggccccagaggcaacatcggccccctgggccccaccggcctgcccggccccatgggccccatcggcaagcccggccccaagggcgaggccggccccaccggcccccaggtgttccccttctgcatctag

SEQ ID NO: 74823 - DNA, 1110 bp, synthetic construct
  misc_feature 1..1110: note = Description of Artificial Sequence: Synthetic coding sequence
  source 1..1110: mol_type = other DNA
atgtggtgcctggagagactgagactgggccccgagtgcctgagaagaagcggcgactggctgctgcccggcagagccagaggcgccaagagcagaaccaccgccgcctgcgccaacgtgctgacccccgacagaatccccgagttctgcatcccccccagactgatgcccagactggccctggccgccctgagaaacagctgggtggaggaggccggcatggacgagggcgccggcagaaccgactgggaccccagaagccaggccgccctgagcctgccccacctgcccagagtgagaaccgcctacggcttctgcgccctgctggagagcccccacaccagaagaaaggagagcctgctgctgggcggcccccccgcccccagacccagagcccacacctacggcggcggcggcggccccgacgccctgctgggcaccctgagagtgcccagagcccccggccccgccacccccgccgcccccggctgccccagacccccccaggacgccctggccagaagacccagaggctgcagactgctgagagtgcccgacggcctgctgagcagagccctgagagccggcagaagcagaagactgaccagagtgagaagcgtgagcagcggcaacgaggacaaggagagaagagccggcagccagagccccgccagagcccccagcaccagcccccccagcagcagagtgcccttccccgagagactggaggccgagggcaccgtggccctgggcagagccggcgacgccctgagactggccgccgagtactgccccggcaccggcagactgagactgagactgctgagagccgagagccccgccggcggcgcccccggccccagagccgtgagctgcagactgagcctggtgctgagaccccccggcaccgccctgagacagtgcagcaccgtggtgggcagaagcagaaaggccagcttcgaccaggacttctgcttcgacggcctgagcgaggacgaggtgagaagactggccgtgagagtgaaggccagagacgagggcagaggcagagagagaggcagactgctgggccagggcgagctgagcctgggcgccctgctgctgctgtag

SEQ ID NO: 74824 - DNA, 1095 bp, synthetic construct
  misc_feature 1..1095: note = Description of Artificial Sequence: Synthetic coding sequence
  source 1..1095: mol_type = other DNA
atgagactgctggagaagctgtgcagcagcgccgccggcagcagcgcccccaagcccgccttcgccaaggtgctgacccccaacagaatccccgagttctgcatcccccccagactgcccgccccctgcaccctggagagccccatcagagccgccgccgtgcccagaagatgcgccgccgagagcgacctgtggcccagagccgccgacgaggacgccggcagaaccgactgggaccccagaagccaggccgccctgagcctgccccacctgcccagagtgagaaccacctacggcttctgcgccctgctggagagcccccacaccagaagaaaggagagcctgctgctgggcggcccccccgcccccagacccagagcccacagctgcggcggcggcggcggccccgacgcccccctgggcaccctgtgcggccccagaggccccggccccgccacccccgccgcccccggcggccccagactgccccaggacgccctggccgccggccccagaagatgcagactgctgagagtgcccgacggcctgctgagcagagccctgagagccggcagaagcagaagactggccagagtgagaagcgtgagcagcggcaacgaggacgaggagagaagagccggcagcgagagccccgccagagcccccagcagcagccccctgagcagcagagcccccctgcccgagagactggaggccaagggcaccgtggccctgggcagagccggcgacgccctgagactggccgccgagtactgccccggcaccagaagactgagactgagactgctgagagccgagagcctgttcggcggcgcccccggccccagagccgtgagatgcagactgagcctggtgctgagaccccccggcaccgccagatggcagtgcagcgccgtggtgggcagaagcagaaaggccagcttcgaccaggacttctgcttcgacggcctgagcgaggacgaggtgagaagactggccgtgagagtgaaggccagagacgagggcagaggcagagacagaggcagactgctgggccagggcgagctgagcctgggcgccctgctgctgctgtag

SEQ ID NO: 74825 - DNA, 1266 bp, synthetic construct
  misc_feature 1..1266: note = Description of Artificial Sequence: Synthetic coding sequence
  source 1..1266: mol_type = other DNA
atgagaaagaccaacatgtggttcctggagagactgagaggcagcggcgagaacggcgccgccagaggcgtgggcagcgaggccggcgacaaggccagcaagggccccctgtacagcaacgtgctgacccccgacaagatccccgacttcttcatcccccccaagctgcccagcggccccgccgagggcgagggccaggccgccctgggccccagcaccagcgagcagaacctggccagcgccgcccccagacagacccccagaagccccagactgcccgccaagctggccgccgagagcaagagcctgctgaaggccgccaccagacacgtgatccagatcgagagcgccgaggactggctgagcgaggaggccaccgacgccgacccccaggcccagggcgccatgagcctgcccagcgtgcccaaggcccagaccagctacggcttcgccatgctggccgagagcccccacaccagaagaaaggagagcctgttccacagcgagcacggcgccctggcccaggtgggcagccccggcgccggcagaagaagagccgccgccaaggccaacggcggcgacggcggccccagagaggccggcggcgccctgatgagccccggcagatacttcagcggcggcgagagcgacaccggcagcagcgccgagagcagccccttcggcagccccctgctgagcagaagcgtgagcctgctgaagggcttcgcccaggacagccaggccaaggtgagccagctgagacacagcgtgggcagacacggcagcctgagcgccgacgacagcacccccgacgccagccccggcagcagaagaagactgaccagaagagccccccccgagcccggccccgagagcggccaggccagaggcgagcacaccgtgcacgtgggccccagaggcagcgtgagactgctggccgagtacgaggccggccaggccagactgagagtgcacctgctggccgccgagggcctgtacgacagactgtgcgacgccagaagcatcaactgctgcgtgggcctgtgcctggtgcccggcaagctgcagaagcagagaagcaccatcgtgaagaacagcagaagacccgtgttcaacgaggacttcttcttcgacggcctgggccccgccagcgtgagaaagctggccctgagaatcaaggtggtgaacaagggcagcagcctgaagagagacaccctgctgggcgagaaggagctgcccctgaccagcctgctgcccttcctgtag

SEQ ID NO: 74826 - DNA, 3945 bp, synthetic construct
  misc_feature 1..3945: note = Description of Artificial Sequence: Synthetic coding sequence
  source 1..3945: mol_type = other DNA
atgctggaccccagcagcagcgaggaggagagcgacgagatcgtggaggaggagagcggcaaggaggtgctgggcagcgcccccagcggcgccagactgagccccagcagaaccagcgagggcagcgccggcagcgccggcctgggcggcggcggcgccggcgccggcgccggcgtgggcgccggcggcggcggcggcagcggcgccagcagcggcggcggcgccggcggcctgcagcccagcagcagagccggcggcggcagacccagcagccccagccccagcgtggtgagcgagaaggagaaggaggagctggagagactgcagaaggaggaggaggagagaaagaagagactgcagctgtacgtgttcgtgatgagatgcatcgcctaccccttcaacgccaagcagcccaccgacatggccagaagacagcagaagatcagcaagcagcagctgcagaccgtgaaggacagattccaggccttcctgaacggcgagacccagatcatggccgacgaggccttcatgaacgccgtgcagagctactacgaggtgttcctgaagagcgacagagtggccagaatggtgcagagcggcggctgcagcgccaacgacagcagagaggtgttcaagaagcacatcgagaagagagtgagaagcctgcccgagatcgacggcctgagcaaggagaccgtgctgagcagctggatggccaagttcgacgccatctacagaggcgaggaggaccccagaaagcagcaggccagaatgaccgccagcgccgccagcgagctgatcctgagcaaggagcagctgtacgagatgttccagaacatcctgggcatcaagaagttcgagcaccagctgctgtacaacgcctgccagctggacaaccccgacgagcaggccgcccagatcagaagagagctggacggcagactgcagatggccgaccagatcgccagagagagaaagttccccaagttcgtgagcaaggagatggagaacatgtacatcgaggagctgaagagcagcgtgaacctgctgatggccaacctggagagcatgcccgtgagcaagggcggcgagttcaagctgcagaagctgaagagaagccacaacgccagcatcatcgacatgggcgaggagagcgagaaccagctgagcaagagcgacgtggtgctgagcttcagcctggaggtggtgatcatggaggtgcagggcctgaagagcctggcccccaacagaatcgtgtactgcaccatggaggtggagggcggcgagaagctgcagaccgaccaggccgaggccagcaagcccacctggggcacccagggcgacttcagcaccacccacgccctgcccgccgtgaaggtgaagctgttcaccgagagcaccggcgtgctggccctggaggacaaggagctgggcagagtgatcctgcaccccacccccaacagccccaagcagagcgagtggcacaagatgaccgtgagcaagaactgccccgaccaggacctgaagatcaagctggccgtgagaatggacaagccccagaacatgaagcacagcggctacctgtgggccatcggcaagaacgtgtggaagagatggaagaagagattcttcgtgctggtgcaggtgagccagtacaccttcgccatgtgcagctacagagagaagaaggccgagccccaggagctgctgcagctggacggctacaccgtggactacaccgacccccagcccggcctggagggcggcagagccttcttcaacgccgtgaaggagggcgacaccgtgatcttcgccagcgacgacgagcaggacagaatcctgtgggtgcaggccatgtacagagccaccggccagagccacaagcccgtgccccccacccaggtgcagaagctgaacgccaagggcggcaacgtgccccagctggacgcccccatcagccagttctacgccgacagagcccagaagcacggcatggacgagttcatcagcagcaacccctgcaacttcgaccacgccagcctgttcgagatggtgcagagactgaccctggaccacagactgaacgacagctacagctgcctgggctggttcagccccggccaggtgttcgtgctggacgagtactgcgccagaaacggcgtgagaggctgccacagacacctgtgctacctgagagacctgctggagagagccgagaacggcgccatgatcgaccccaccctgctgcactacagcttcgccttctgcgccagccacgtgcacggcaacagacccgacggcatcggcaccgtgaccgtggaggagaaggagagattcgaggagatcaaggagagactgagagtgctgctggagaaccagatcacccacttcagatactgcttccccttcggcagacccgagggcgccctgaaggccaccctgagcctgctggagagagtgctgatgaaggacatcgtgacccccgtgccccaggaggaggtgaagaccgtgatcagaaagtgcctggagcaggccgccctggtgaactacagcagactgagcgagtacgccaagatcgagggcaagaagagagagatgtacgagcaccccgtgttctgcctggccagccaggtgatggacctgaccatccagaacgtgggcagactgatcacccccgccaagaagctggaggacaccatcagactggccgagctggtgatcgaggtgctgcagcagaacgaggagcaccacgccgaggccttcgcctggtggagcgacctgatggtggagcacgccgagaccttcctgagcctgttcgccgtggacatggacgccgccctggaggtgcagccccccgacacctgggacagcttccccctgttccagctgctgaacgacttcctgagaaccgactacaacctgtgcaacggcaagttccacaagcacctgcaggacctgttcgcccccctggtggtgagatacgtggacctgatggagagcagcatcgcccagagcatccacagaggcttcgagagagagagctgggagcccgtgaacaacggcagcggcaccagcgaggacctgttctggaagctggacgccctgcagaccttcatcagagacctgcactggcccgaggaggagttcggcaagcacctggagcagagactgaagctgatggccagcgacatgatcgagagctgcgtgaagagaaccagaatcgccttcgaggtgaagctgcagaagaccagcagaagcaccgacttcagagtgccccagagcatctgcaccatgttcaacgtgatggtggacgccaaggcccagagcaccaagctgtgcagcatggagatgggccaggagcaccagtaccacagcaagatcgacgagctgatcgaggagaccgtgaaggagatgatcaccctgctggtggccaagttcgtgaccatcctggagggcgtgctggccaagctgagcagatacgacgagggcaccctgttcagcagcttcctgagcttcaccgtgaaggccgccagcaagtacgtggacgtgcccaagcccggcatggacgtggccgacgcctacgtgaccttcgtgagacacagccaggacgtgctgagagacaaggtgaacgaggagatgtacatcgagagactgttcgaccagtggtacaacagcagcatgaacgtgatctgcacctggctgaccgacagaatggacctgcagctgcacatctaccagctgaagaccctgatcagaatggtgaagaagacctacagagacttcagactgcagggcgtgctggacagcaccctgaacagcaagacctacgagaccatcagaaacagactgaccgtggaggaggccaccgccagcgtgagcgagggcggcggcctgcagggcatcagcatgaaggacagcgacgaggaggacgaggaggacgactag

SEQ ID NO: 74827 - DNA, 3825 bp, synthetic construct
  misc_feature 1..3825: note = Description of Artificial Sequence: Synthetic coding sequence
  source 1..3825: mol_type = other DNA
atgctggaccccagcagcagcgaggaggagagcgacgagatcgtggaggaggagagcggcaaggaggtgctgggcagcgcccccagcggcgccagactgagccccagcagaaccagcgagggcagcgccggcagcgccggcctgggcggcggcggcgccggcgccggcgccggcgtgggcgccggcggcggcggcggcagcggcgccagcagcggcggcggcgccggcggcctgcagcccagcagcagagccggcggcggcagacccagcagccccagccccagcgtggtgagcgagaaggagaaggaggagctggagagactgcagaaggaggaggaggagagaaagaagagactgcagctgtacgtgttcgtgatgagatgcatcgcctaccccttcaacgccaagcagcccaccgacatggccagaagacagcagaagatcagcaagcagcagctgcagaccgtgaaggacagattccaggccttcctgaacggcgagacccagatcatggccgacgaggccttcatgaacgccgtgcagagctactacgaggtgttcctgaagagcgacagagtggccagaatggtgcagagcggcggctgcagcgccaacgacagcagagaggtgttcaagaagcacatcgagaagagagtgagaagcctgcccgagatcgacggcctgagcaaggagaccgtgctgagcagctggatggccaagttcgacgccatctacagaggcgaggaggaccccagaaagcagcaggccagaatgaccgccagcgccgccagcgagctgatcctgagcaaggagcagctgtacgagatgttccagaacatcctgggcatcaagaagttcgagcaccagctgctgtacaacgcctgccagctggacaaccccgacgagcaggccgcccagatcagaagagagctggacggcagactgcagatggccgaccagatcgccagagagagaaagttccccaagttcgtgagcaaggagatggagaacatgtacatcgaggagctgaagagcagcgtgaacctgctgatggccaacctggagagcatgcccgtgagcaagggcggcgagttcaagctgcagaagctgaagagaagccacaacgccagcatcatcgacatgggcgaggagagcgagaaccagctgagcaagagcgacgtggtgctgagcttcagcctggaggtggtgatcatggaggtgcagggcctgaagagcctggcccccaacagaatcgtgtactgcaccatggaggtggagggcggcgagaagctgcagaccgaccaggccgaggccagcaagcccacctggggcacccagggcgacttcagcaccacccacgccctgcccgccgtgaaggtgaagctgttcaccgagagcaccggcgtgctggccctggaggacaaggagctgggcagagtgatcctgcaccccacccccaacagccccaagcagagcgagtggcacaagatgaccgtgagcaagaactgccccgaccaggacctgaagatcaagctggccgtgagaatggacaagccccagaacatgaagcacagcggctacctgtgggccatcggcaagaacgtgtggaagagatggaagaagagattcttcgtgctggtgcaggtgagccagtacaccttcgccatgtgcagctacagagagaagaaggccgagccccaggagctgctgcagctggacggctacaccgtggactacaccgacccccagcccggcctggagggcggcagagccttcttcaacgccgtgaaggagggcgacaccgtgatcttcgccagcgacgacgagcaggacagaatcctgtgggtgcaggccatgtacagagccaccggccagagccacaagcccgtgccccccacccaggtgcagaagctgaacgccaagggcggcaacgtgccccagctggacgcccccatcagccagttctacgccgacagagcccagaagcacggcatggacgagttcatcagcagcaacccctgcaacttcgaccacgccagcctgttcgagatgggctggttcagccccggccaggtgttcgtgctggacgagtactgcgccagaaacggcgtgagaggctgccacagacacctgtgctacctgagagacctgctggagagagccgagaacggcgccatgatcgaccccaccctgctgcactacagcttcgccttctgcgccagccacgtgcacggcaacagacccgacggcatcggcaccgtgaccgtggaggagaaggagagattcgaggagatcaaggagagactgagagtgctgctggagaaccagatcacccacttcagatactgcttccccttcggcagacccgagggcgccctgaaggccaccctgagcctgctggagagagtgctgatgaaggacatcgtgacccccgtgccccaggaggaggtgaagaccgtgatcagaaagtgcctggagcaggccgccctggtgaactacagcagactgagcgagtacgccaagatcgaggagaacgtgggcagactgatcacccccgccaagaagctggaggacaccatcagactggccgagctggtgatcgaggtgctgcagcagaacgaggagcaccacgccgaggccttcgcctggtggagcgacctgatggtggagcacgccgagaccttcctgagcctgttcgccgtggacatggacgccgccctggaggtgcagccccccgacacctgggacagcttccccctgttccagctgctgaacgacttcctgagaaccgactacaacctgtgcaacggcaagttccacaagcacctgcaggacctgttcgcccccctggtggtgagatacgtggacctgatggagagcagcatcgcccagagcatccacagaggcttcgagagagagagctgggagcccgtgaacaacggcagcggcaccagcgaggacctgttctggaagctggacgccctgcagaccttcatcagagacctgcactggcccgaggaggagttcggcaagcacctggagcagagactgaagctgatggccagcgacatgatcgagagctgcgtgaagagaaccagaatcgccttcgaggtgaagctgcagaagaccagcagaagcaccgacttcagagtgccccagagcatctgcaccatgttcaacgtgatggtggacgccaaggcccagagcaccaagctgtgcagcatggagatgggccaggagcaccagtaccacagcaagatcgacgagctgatcgaggagaccgtgaaggagatgatcaccctgctggtggccaagttcgtgaccatcctggagggcgtgctggccaagctgagcagatacgacgagggcaccctgttcagcagcttcctgagcttcaccgtgaaggccgccagcaagtacgtggacgtgcccaagcccggcatggacgtggccgacgcctacgtgaccttcgtgagacacagccaggacgtgctgagagacaaggtgaacgaggagatgtacatcgagagactgttcgaccagtggtacaacagcagcatgaacgtgatctgcacctggctgaccgacagaatggacctgcagctgcacatctaccagctgaagaccctgatcagaatggtgaagaagacctacagagacttcagactgcagggcgtgctggacagcaccctgaacagcaagacctacgagaccatcagaaacagactgaccgtggaggaggccaccgccagcgtgagcgagggcggcggcctgcagggcatcagcatgaaggacagcgacgaggaggacgaggaggacgactag

SEQ ID NO: 74828 - DNA, 4080 bp, synthetic construct
  misc_feature 1..4080: note = Description of Artificial Sequence: Synthetic coding sequence
  source 1..4080: mol_type = other DNA
atgctggaccccagcagcagcgaggaggagagcgacgagatcgtggaggaggagagcggcaaggaggtgctgggcagcgcccccagcggcgccagactgagccccagcagaaccagcgagggcagcgccggcagcgccggcctgggcggcggcggcgccggcgccggcgccggcgtgggcgccggcggcggcggcggcagcggcgccagcagcggcggcggcgccggcggcctgcagcccagcagcagagccggcggcggcagacccagcagccccagccccagcgtggtgagcgagaaggagaaggaggagctggagagactgcagaaggaggaggaggagagaaagaagagactgcagctgtacgtgttcgtgatgagatgcatcgcctaccccttcaacgccaagcagcccaccgacatggccagaagacagcagaagatcagcaagcagcagctgcagaccgtgaaggacagattccaggccttcctgaacggcgagacccagatcatggccgacgaggccttcatgaacgccgtgcagagctactacgaggtgttcctgaagagcgacagagtggccagaatggtgcagagcggcggctgcagcgccaacgacagcagagaggtgttcaagaagcacatcgagaagagagtgagaagcctgcccgagatcgacggcctgagcaaggagaccgtgctgagcagctggatggccaagttcgacgccatctacagaggcgaggaggaccccagaaagcagcaggccagaatgaccgccagcgccgccagcgagctgatcctgagcaaggagcagctgtacgagatgttccagaacatcctgggcatcaagaagttcgagcaccagctgctgtacaacgcctgccagctggacaaccccgacgagcaggccgcccagatcagaagagagctggacggcagactgcagatggccgaccagatcgccagagagagaaagttccccaagttcgtgagcaaggagatggagaacatgtacatcgaggagctgaagagcagcgtgaacctgctgatggccaacctggagagcatgcccgtgagcaagggcggcgagttcaagctgcagaagctgaagagaagccacaacgccagcatcatcgacatgggcgaggagagcgagaaccagctgagcaagagcgacgtggtgctgagcttcagcctggaggtggtgatcatggaggtgcagggcctgaagagcctggcccccaacagaatcgtgtactgcaccatggaggtggagggcggcgagaagctgcagaccgaccaggccgaggccagcaagcccacctggggcacccagggcgacttcagcaccacccacgccctgcccgccgtgaaggtgaagctgttcaccgagagcaccggcgtgctggccctggaggacaaggagctgggcagagtgatcctgcaccccacccccaacagccccaagcagagcgagtggcacaagatgaccgtgagcaagaactgccccgaccaggacctgaagatcaagctggccgtgagaatggacaagccccagaacatgaagcacagcggctacctgtgggccatcggcaagaacgtgtggaagagatggaagaagagattcttcgtgctggtgcaggtgagccagtacaccttcgccatgtgcagctacagagagaagaaggccgagccccaggagctgctgcagctggacggctacaccgtggactacaccgacccccagcccggcctggagggcggcagagccttcttcaacgccgtgaaggagggcgacaccgtgatcttcgccagcgacgacgagcaggacagaatcctgtgggtgcaggccatgtacagagccaccggccagagccacaagcccgtgccccccacccaggtgcagaagctgaacgccaagggcggcaacgtgccccagctggacgcccccatcagccagttctacgccgacagagcccagaagcacggcatggacgagttcatcagcagcaacccctgcaacttcgaccacgccagcctgttcgagatggtgcagagactgaccctggaccacagactgaacgacagctacagctgcctgggctggttcagccccggccaggtgttcgtgctggacgagtactgcgccagaaacggcgtgagaggctgccacagacacctgtgctacctgagagacctgctggagagagccgagaacggcgccatgatcgaccccaccctgctgcactacagcttcgccttctgcgccagccacgtgcacggcaacagacccgacggcatcggcaccgtgaccgtggaggagaaggagagattcgaggagatcaaggagagactgagagtgctgctggagaaccagatcacccacttcagatactgcttccccttcggcagacccgagggcgccctgaaggccaccctgagcctgctggagagagtgctgatgaaggacatcgtgacccccgtgccccaggaggaggtgaagaccgtgatcagaaagtgcctggagcaggccgccctggtgaactacagcagactgagcgagtacgccaagatcgaggccaacagctgcaccaccgagaacgtgggcagactgatcacccccgccaagaagctggaggacaccatcagactggccgagctggtgatcgaggtgctgcagcagaacgaggagcaccacgccgagccccacgtggacaagggcgaggccttcgcctggtggagcgacctgatggtggagcacgccgagaccttcctgagcctgttcgccgtggacatggacgccgccctggaggtgcagccccccgacacctgggacagcttccccctgttccagctgctgaacgacttcctgagaaccgactacaacctgtgcaacggcaagttccacaagcacctgcaggacctgttcgcccccctggtggtgagatacgtggacctgatggagagcagcatcgcccagagcatccacagaggcttcgagagagagagctgggagcccgtgaagagcctgaccagcaacctgcccaacgtgaacctgcccaacgtgaacctgcccaaggtgcccaacctgcccgtgaacatccccctgggcatcccccagatgcccaccttcagcgcccccagctggatggccgccatctacgacgccgacaacggcagcggcaccagcgaggacctgttctggaagctggacgccctgcagaccttcatcagagacctgcactggcccgaggaggagttcggcaagcacctggagcagagactgaagctgatggccagcgacatgatcgagagctgcgtgaagagaaccagaatcgccttcgaggtgaagctgcagaagaccagcagaagcaccgacttcagagtgccccagagcatctgcaccatgttcaacgtgatggtggacgccaaggcccagagcaccaagctgtgcagcatggagatgggccaggagaagtacaagaagatgagacaccagtaccacagcaagatcgacgagctgatcgaggagaccgtgaaggagatgatcaccctgctggtggccaagttcgtgaccatcctggagggcgtgctggccaagctgagcagatacgacgagggcaccctgttcagcagcttcctgagcttcaccgtgaaggccgccagcaagtacgtggacgtgcccaagcccggcatggacgtggccgacgcctacgtgaccttcgtgagacacagccaggacgtgctgagagacaaggtgaacgaggagatgtacatcgagagactgttcgaccagtggtacaacagcagcatgaacgtgatctgcacctggctgaccgacagaatggacctgcagctgcacatctaccagctgaagaccctgatcagaatggtgaagaagacctacagagacttcagactgcagggcgtgctggacagcaccctgaacagcaagacctacgagaccatcagaaacagactgaccgtggaggaggccaccgccagcgtgagcgagggcggcggcctgcagggcatcagcatgaaggacagcgacgaggaggacgaggaggacgactag

SEQ ID NO: 74829 - DNA, 4062 bp, synthetic construct
  misc_feature 1..4062: note = Description of Artificial Sequence: Synthetic coding sequence
  source 1..4062: mol_type = other DNA
atgctggaccccagcagcagcgaggaggagagcgacgagatcgtggaggaggagagcggcaaggaggtgctgggcagcgcccccagcggcgccagactgagccccagcagaaccagcgagggcagcgccggcagcgccggcctgggcggcggcggcgccggcgccggcgccggcgtgggcgccggcggcggcggcggcagcggcgccagcagcggcggcggcgccggcggcctgcagcccagcagcagagccggcggcggcagacccagcagccccagccccagcgtggtgagcgagaaggagaaggaggagctggagagactgcagaaggaggaggaggagagaaagaagagactgcagctgtacgtgttcgtgatgagatgcatcgcctaccccttcaacgccaagcagcccaccgacatggccagaagacagcagaagatcagcaagcagcagctgcagaccgtgaaggacagattccaggccttcctgaacggcgagacccagatcatggccgacgaggccttcatgaacgccgtgcagagctactacgaggtgttcctgaagagcgacagagtggccagaatggtgcagagcggcggctgcagcgccaacgacagcagagaggtgttcaagaagcacatcgagaagagagtgagaagcctgcccgagatcgacggcctgagcaaggagaccgtgctgagcagctggatggccaagttcgacgccatctacagaggcgaggaggaccccagaaagcagcaggccagaatgaccgccagcgccgccagcgagctgatcctgagcaaggagcagctgtacgagatgttccagaacatcctgggcatcaagaagttcgagcaccagctgctgtacaacgcctgccagctggacaaccccgacgagcaggccgcccagatcagaagagagctggacggcagactgcagatggccgaccagatcgccagagagagaaagttccccaagttcgtgagcaaggagatggagaacatgtacatcgaggagctgaagagcagcgtgaacctgctgatggccaacctggagagcatgcccgtgagcaagggcggcgagttcaagctgcagaagctgaagagaagccacaacgccagcatcatcgacatgggcgaggagagcgagaaccagctgagcaagagcgacgtggtgctgagcttcagcctggaggtggtgatcatggaggtgcagggcctgaagagcctggcccccaacagaatcgtgtactgcaccatggaggtggagggcggcgagaagctgcagaccgaccaggccgaggccagcaagcccacctggggcacccagggcgacttcagcaccacccacgccctgcccgccgtgaaggtgaagctgttcaccgagagcaccggcgtgctggccctggaggacaaggagctgggcagagtgatcctgcaccccacccccaacagccccaagcagagcgagtggcacaagatgaccgtgagcaagaactgccccgaccaggacctgaagatcaagctggccgtgagaatggacaagccccagaacatgaagcacagcggctacctgtgggccatcggcaagaacgtgtggaagagatggaagaagagattcttcgtgctggtgcaggtgagccagtacaccttcgccatgtgcagctacagagagaagaaggccgagccccaggagctgctgcagctggacggctacaccgtggactacaccgacccccagcccggcctggagggcggcagagccttcttcaacgccgtgaaggagggcgacaccgtgatcttcgccagcgacgacgagcaggacagaatcctgtgggtgcaggccatgtacagagccaccggccagagccacaagcccgtgccccccacccaggtgcagaagctgaacgccaagggcggcaacgtgccccagctggacgcccccatcagccagttctacgccgacagagcccagaagcacggcatggacgagttcatcagcagcaacccctgcaacttcgaccacgccagcctgttcgagatggtgcagagactgaccctggaccacagactgaacgacagctacagctgcctgggctggttcagccccggccaggtgttcgtgctggacgagtactgcgccagaaacggcgtgagaggctgccacagacacctgtgctacctgagagacctgctggagagagccgagaacggcgccatgatcgaccccaccctgctgcactacagcttcgccttctgcgccagccacgtgcacggcaacagacccgacggcatcggcaccgtgaccgtggaggagaaggagagattcgaggagatcaaggagagactgagagtgctgctggagaaccagatcacccacttcagatactgcttccccttcggcagacccgagggcgccctgaaggccaccctgagcctgctggagagagtgctgatgaaggacatcgtgacccccgtgccccaggaggaggtgaagaccgtgatcagaaagtgcctggagcaggccgccctggtgaactacagcagactgagcgagtacgccaagatcgaggagaaccagaaggacgccgagaacgtgggcagactgatcacccccgccaagaagctggaggacaccatcagactggccgagctggtgatcgaggtgctgcagcagaacgaggagcaccacgccgagccccacgtggacaagggcgaggccttcgcctggtggagcgacctgatggtggagcacgccgagaccttcctgagcctgttcgccgtggacatggacgccgccctggaggtgcagccccccgacacctgggacagcttccccctgttccagctgctgaacgacttcctgagaaccgactacaacctgtgcaacggcaagttccacaagcacctgcaggacctgttcgcccccctggtggtgagatacgtggacctgatggagagcagcatcgcccagagcatccacagaggcttcgagagagagagctgggagcccgtgaagagcctgaccagcaacctgcccaacgtgaacctgcccaacgtgaacctgcccaaggtgcccaacctgcccgtgaacatccccctgggcatcccccagatgcccaccttcagcgcccccagctggatggccgccatctacgacgccgacaacggcagcggcaccagcgaggacctgttctggaagctggacgccctgcagaccttcatcagagacctgcactggcccgaggaggagttcggcaagcacctggagcagagactgaagctgatggccagcgacatgatcgagagctgcgtgaagagaaccagaatcgccttcgaggtgaagctgcagaagaccagcagaagcaccgacttcagagtgccccagagcatctgcaccatgttcaacgtgatggtggacgccaaggcccagagcaccaagctgtgcagcatggagatgggccaggagcaccagtaccacagcaagatcgacgagctgatcgaggagaccgtgaaggagatgatcaccctgctggtggccaagttcgtgaccatcctggagggcgtgctggccaagctgagcagatacgacgagggcaccctgttcagcagcttcctgagcttcaccgtgaaggccgccagcaagtacgtggacgtgcccaagcccggcatggacgtggccgacgcctacgtgaccttcgtgagacacagccaggacgtgctgagagacaaggtgaacgaggagatgtacatcgagagactgttcgaccagtggtacaacagcagcatgaacgtgatctgcacctggctgaccgacagaatggacctgcagctgcacatctaccagctgaagaccctgatcagaatggtgaagaagacctacagagacttcagactgcagggcgtgctggacagcaccctgaacagcaagacctacgagaccatcagaaacagactgaccgtggaggaggccaccgccagcgtgagcgagggcggcggcctgcagggcatcagcatgaaggacagcgacgaggaggacgaggaggacgactag

SEQ ID NO: 74830 - DNA, 1038 bp, synthetic construct
  misc_feature 1..1038: note = Description of Artificial Sequence: Synthetic coding sequence
  source 1..1038: mol_type = other DNA
tgactgcccaacgtgaacctgcccaacgtgaacctgcccaaggtgcccaacctgcccgtgaacatccccctgggcatcccccagatgcccaccttcagcgcccccagctggatggccgccatctacgacgccgacaacggcagcggcaccagcgaggacctgttctggaagctggacgccctgcagaccttcatcagagacctgcactggcccgaggaggagttcggcaagcacctggagcagagactgaagctgatggccagcgacatgatcgagagctgcgtgaagagaaccagaatcgccttcgaggtgaagctgcagaagaccagcagaagcaccgacttcagagtgccccagagcatctgcaccatgttcaacgtgatggtggacgccaaggcccagagcaccaagctgtgcagcatggagatgggccaggagttcgccaagatgtggcaccagtaccacagcaagatcgacgagctgatcgaggagaccgtgaaggagatgatcaccctgctggtggccaagttcgtgaccatcctggagggcgtgctggccaagctgagcagatacgacgagggcaccctgttcagcagcttcctgagcttcaccgtgaaggccgccagcaagtacgtggacgtgcccaagcccggcatggacgtggccgacgcctacgtgaccttcgtgagacacagccaggacgtgctgagagacaaggtgaacgaggagatgtacatcgagagactgttcgaccagtggtacaacagcagcatgaacgtgatctgcacctggctgaccgacagaatggacctgcagctgcacatctaccagctgaagaccctgatcagaatggtgaagaagacctacagagacttcagactgcagggcgtgctggacagcaccctgaacagcaagacctacgagaccatcagaaacagactgaccgtggaggaggccaccgccagcgtgagcgagggcggcggcctgcagggcatcagcatgaaggacagcgacgaggaggacgaggaggacgactag

SEQ ID NO: 74831 - DNA, 3768 bp, synthetic construct
  misc_feature 1..3768: note = Description of Artificial Sequence: Synthetic coding sequence
  source 1..3768: mol_type = other DNA
atgctggaccccagcagcagcgaggaggagagcgacgagggcctggaggaggagagcagagacgtgctggtggccgccggcagcagccagagagccccccccgcccccaccagagagggcagaagagacgcccccggcagagccggcggcggcggcgccgccagaagcgtgagccccagccccagcgtgctgagcgagggcagagacgagccccagagacagctggacgacgagcaggagagaagaatcagactgcagctgtacgtgttcgtggtgagatgcatcgcctaccccttcaacgccaagcagcccaccgacatggccagaagacagcagaagctgaacaagcagcagctgcagctgctgaaggagagattccaggccttcctgaacggcgagacccagatcgtggccgacgaggccttctgcaacgccgtgagaagctactacgaggtgttcctgaagagcgacagagtggccagaatggtgcagagcggcggctgcagcgccaacgacttcagagaggtgttcaagaagaacatcgagaagagagtgagaagcctgcccgagatcgacggcctgagcaaggagaccgtgctgagcagctggatcgccaagtacgacgccatctacagaggcgaggaggacctgtgcaagcagcccaacagaatggccctgagcgccgtgagcgagctgatcctgagcaaggagcagctgtacgagatgttccagcagatcctgggcatcaagaagctggagcaccagctgctgtacaacgcctgccagctggacaacgccgacgagcaggccgcccagatcagaagagagctggacggcagactgcagctggccgacaagatggccaaggagagaaagttccccaagttcatcgccaaggacatggagaacatgtacatcgaggagctgagaagcagcgtgaacctgctgatggccaacctggagagcctgcccgtgagcaagggcggccccgagttcaagctgcagaagctgaagagaagccagaacagcgccttcctggacatcggcgacgagaacgagatccagctgagcaagagcgacgtggtgctgagcttcaccctggagatcgtgatcatggaggtgcagggcctgaagagcgtggcccccaacagaatcgtgtactgcaccatggaggtggagggcgagaagctgcagaccgaccaggccgaggccagcagaccccagtggggcacccagggcgacttcaccaccacccaccccagacccgtggtgaaggtgaagctgttcaccgagagcaccggcgtgctggccctggaggacaaggagctgggcagagtgatcctgtaccccaccagcaacagcagcaagagcgccgagctgcacagaatggtggtgcccaagaacagccaggacagcgacctgaagatcaagctggccgtgagaatggacaagcccgcccacatgaagcacagcggctacctgtacgccctgggccagaaggtgtggaagagatggaagaagagatacttcgtgctggtgcaggtgagccagtacaccttcgccatgtgcagctacagagagaagaagagcgagccccaggagctgatgcagctggagggctacaccgtggactacaccgacccccaccccggcctgcagggcggctgcatgttcttcaacgccgtgaaggagggcgacaccgtgatcttcgccagcgacgacgagcaggacagaatcctgtgggtgcaggccatgtacagagccaccggccagagctacaagcccgtgcccgccatccagacccagaagctgaaccccaagggcggcaccctgcacgccgacgcccagctgtacgccgacagattccagaagcacggcatggacgagttcatcagcgccaacccctgcaagctggaccacgccttcctgttcagaatcctgcagagacagaccctggaccacagactgaacgacagctacagctgcctgggctggttcagccccggccaggtgttcgtgctggacgagtactgcgccagatacggcgtgagaggctgccacagacacctgtgctacctggccgagctgatggagcacagcgagaacggcgccgtgatcgaccccaccctgctgcactacagcttcgccttctgcgccagccacgtgcacggcaacagacccgacggcatcggcaccgtgagcgtggaggagaaggagagattcgaggagatcaaggagagactgagcagcctgctggagaaccagatcagccacttcagatactgcttccccttcggcagacccgagggcgccctgaaggccaccctgagcctgctggagagagtgctgatgaaggacatcgccacccccatccccgccgaggaggtgaagaaggtggtgagaaagtgcctggagaaggccgccctgatcaactacaccagactgaccgagtacgccaagatcgaggagaccatgaaccaggccagccccgccagaaagctggaggagatcctgcacctggccgagctgtgcatcgaggtgctgcagcagaacgaggagcaccacgccgaggccttcgcctggtggcccgacctgctggccgagcacgccgagaagttctgggccctgttcaccgtggacatggacaccgccctggaggcccagccccaggacagctgggacagcttccccctgttccagctgctgaacaacttcctgagaaacgacaccctgctgtgcaacggcaagttccacaagcacctgcaggagatcttcgtgcccctggtggtgagatacgtggacctgatggagagcagcatcgcccagagcatccacagaggcttcgagcaggagacctggcagcccgtgaacaacggcagcgccaccagcgaggacctgttctggaagctggacgccctgcagatgttcgtgttcgacctgcactggcccgagcaggagttcgcccaccacctggagcagagactgaagctgatggccagcgacatgctggaggcctgcgtgaagagaaccagaaccgccttcgagctgaagctgcagaaggccagcaagaccaccgacctgagaatccccgccagcgtgtgcaccatgttcaacgtgctggtggacgccaagaagcagagcaccaagctgtgcgccctggacggcggccaggaggtgtgcagaatcttccagcagtaccacagcaagatcgacgacctgatcgacaacagcgtgaaggagatcatcagcctgctggtgagcaagttcgtgagcgtgctggagggcgtgctgagcaagctgagcagatacgacgagggcaccttcttcagcagcatcctgagcttcaccgtgaaggccgccgccaagtacgtggacgtgcccaagcccggcatggacctggccgacacctacatcatgttcgtgagacagaaccaggacatcctgagagagaaggtgaacgaggagatgtacatcgagaagctgttcgaccagtggtacagcagcagcatgaaggtgatctgcgtgtggctgaccgacagactggacctgcagctgcacatctaccagctgaagaccctgatcaagatcgtgaagaagacctacagagacttcagactgcagggcgtgctggagggcaccctgaacagcaagacctacgacaccgtgcacagaagactgaccgtggaggaggccaccgccagcgtgagcgagggcggcggcctgcagggcatcaccatgaaggacagcgacgaggaggaggagggctag

SEQ ID NO: 74832 - DNA, 3885 bp, synthetic construct
  misc_feature 1..3885: note = Description of Artificial Sequence: Synthetic coding sequence
  source 1..3885: mol_type = other DNA
atgctggaccccagcagcagcgaggaggagagcgacgagggcctggaggaggagagcagagacgtgctggtggccgccggcagcagccagagagccccccccgcccccaccagagagggcagaagagacgcccccggcagagccggcggcggcggcgccgccagaagcgtgagccccagccccagcgtgctgagcgagggcagagacgagccccagagacagctggacgacgagcaggagagaagaatcagactgcagctgtacgtgttcgtggtgagatgcatcgcctaccccttcaacgccaagcagcccaccgacatggccagaagacagcagaagctgaacaagcagcagctgcagctgctgaaggagagattccaggccttcctgaacggcgagacccagatcgtggccgacgaggccttctgcaacgccgtgagaagctactacgaggtgttcctgaagagcgacagagtggccagaatggtgcagagcggcggctgcagcgccaacgacttcagagaggtgttcaagaagaacatcgagaagagagtgagaagcctgcccgagatcgacggcctgagcaaggagaccgtgctgagcagctggatcgccaagtacgacgccatctacagaggcgaggaggacctgtgcaagcagcccaacagaatggccctgagcgccgtgagcgagctgatcctgagcaaggagcagctgtacgagatgttccagcagatcctgggcatcaagaagctggagcaccagctgctgtacaacgcctgccagctggacaacgccgacgagcaggccgcccagatcagaagagagctggacggcagactgcagctggccgacaagatggccaaggagagaaagttccccaagttcatcgccaaggacatggagaacatgtacatcgaggagctgagaagcagcgtgaacctgctgatggccaacctggagagcctgcccgtgagcaagggcggccccgagttcaagctgcagaagctgaagagaagccagaacagcgccttcctggacatcggcgacgagaacgagatccagctgagcaagagcgacgtggtgctgagcttcaccctggagatcgtgatcatggaggtgcagggcctgaagagcgtggcccccaacagaatcgtgtactgcaccatggaggtggagggcgagaagctgcagaccgaccaggccgaggccagcagaccccagtggggcacccagggcgacttcaccaccacccaccccagacccgtggtgaaggtgaagctgttcaccgagagcaccggcgtgctggccctggaggacaaggagctgggcagagtgatcctgtaccccaccagcaacagcagcaagagcgccgagctgcacagaatggtggtgcccaagaacagccaggacagcgacctgaagatcaagctggccgtgagaatggacaagcccgcccacatgaagcacagcggctacctgtacgccctgggccagaaggtgtggaagagatggaagaagagatacttcgtgctggtgcaggtgagccagtacaccttcgccatgtgcagctacagagagaagaagagcgagccccaggagctgatgcagctggagggctacaccgtggactacaccgacccccaccccggcctgcagggcggctgcatgttcttcaacgccgtgaaggagggcgacaccgtgatcttcgccagcgacgacgagcaggacagaatcctgtgggtgcaggccatgtacagagccaccggccagagctacaagcccgtgcccgccatccagacccagaagctgaaccccaagggcggcaccctgcacgccgacgcccagctgagcgagttcaccgacgccgacagattccagaagcacggcatggacgagttcatcagcgccaacccctgcaagctggaccacgccttcctgttcagaatcctgcagagacagaccctggaccacagactgaacgacagctacagctgcctgggctggttcagccccggccaggtgttcgtgctggacgagtactgcgccagatacggcgtgagaggctgccacagacacctgtgctacctggccgagctgatggagcacagcgagaacggcgccgtgatcgaccccaccctgctgcactacagcttcgccttctgcgccagccacgtgcacggcaacagacccgacggcatcggcaccgtgagcgtggaggagaaggagagattcgaggagatcaaggagagactgagcagcctgctggagaaccagatcagccacttcagatactgcttccccttcggcagacccgagggcgccctgaaggccaccctgagcctgctggagagagtgctgatgaaggacatcgccacccccatccccgccgaggaggtgaagaaggtggtgagaaagtgcctggagaaggccgccctgatcaactacaccagactgaccgagtacgccaagatcgaggagaccatgaaccaggccagccccgccagaaagctggaggagatcctgcacctggccgagctgtgcatcgaggtgctgcagcagaacgaggagcaccacgccgaggccttcgcctggtggcccgacctgctggccgagcacgccgagaagttctgggccctgttcaccgtggacatggacaccgccctggaggcccagccccaggacagctgggacagcttccccctgttccagctgctgaacaacttcctgagaaacgacaccctgctgtgcaacggcaagttccacaagcacctgcaggagatcttcgtgcccctggtggtgagatacgtggacctgatggagagcagcatcgcccagagcatccacagaggcttcgagcaggagacctggcagcccgtgaagaacatcgccaacagcctgcccaacgtggccctgcccaaggtgcccagcctgcccctgaacctgccccagatccccaacatcagcaccgccagctggatgcccagcctgtacgagagcaccaacggcagcgccaccagcgaggacctgttctggaagctggacgccctgcagatgttcgtgttcgacctgcactggcccgagcaggagttcgcccaccacctggagcagagactgaagctgatggccagcgacatgctggaggcctgcgtgaagagaaccagaaccgccttcgagctgaagctgcagaaggccagcaagaccaccgacctgagaatccccgccagcgtgtgcaccatgttcaacgtgctggtggacgccaagaagcagagcaccaagctgtgcgccctggacggcggccaggagcagcagtaccacagcaagatcgacgacctgatcgacaacagcgtgaaggagatcatcagcctgctggtgagcaagttcgtgagcgtgctggagggcgtgctgagcaagctgagcagatacgacgagggcaccttcttcagcagcatcctgagcttcaccgtgaaggccgccgccaagtacgtggacgtgcccaagcccggcatggacctggccgacacctacatcatgttcgtgagacagaaccaggacatcctgagagagaaggtgaacgaggagatgtacatcgagaagctgttcgaccagtggtacagcagcagcatgaaggtgatctgcgtgtggctgaccgacagactggacctgcagctgcacatctaccagctgaagaccctgatcaagatcgtgaagaagacctacagagacttcagactgcagggcgtgctggagggcaccctgaacagcaagacctacgacaccgtgcacagaagactgaccgtggaggaggccaccgccagcgtgagcgagggcggcggcctgcagggcatcaccatgaaggacagcgacgaggaggaggagggctag

SEQ ID NO: 74833 - DNA, 1410 bp, synthetic construct
  misc_feature 1..1410: note = Description of Artificial Sequence: Synthetic coding sequence
  source 1..1410: mol_type = other DNA
atgaaccaggccagccccgccagaaagctggaggagatcctgcacctggccgagctgtgcatcgaggtgctgcagcagaacgaggagcaccacgccgagctgagacacgccttcgcctggtggcccgacctgctggccgagcacgccgagaagttctgggccctgttcaccgtggacatggacaccgccctggaggcccagccccaggacagctgggacagcttccccctgttccagctgctgaacaacttcctgagaaacgacaccctgctgtgcaacggcaagttccacaagcacctgcaggagatcttcgtgcccctggtggtgagatacgtggacctgatggagagcagcatcgcccagagcatccacagaggcttcgagcaggagacctggcagcccgtgaagaacatcgccaacagcctgcccaacgtggccctgcccaaggtgcccagcctgcccctgaacctgccccagatccccaacatcagcaccgccagctggatgcccagcctgtacgagagcaccaacggcagcgccaccagcgaggacctgttctggaagctggacgccctgcagatgttcgtgttcgacctgcactggcccgagcaggagttcgcccaccacctggagcagagactgaagctgatggccagcgacatgctggaggcctgcgtgaagagaaccagaaccgccttcgagctgaagctgcagaaggccagcaagaccaccgacctgagaatccccgccagcgtgtgcaccatgttcaacgtgctggtggacgccaagaagcagagcaccaagctgtgcgccctggacggcggccaggagcagcagtaccacagcaagatcgacgacctgatcgacaacagcgtgaaggagatcatcagcctgctggtgagcaagttcgtgagcgtgctggagggcgtgctgagcaagctgagcagatacgacgagggcaccttcttcagcagcatcctgagcttcaccgtgaaggccgccgccaagtacgtggacgtgcccaagcccggcatggacctggccgacacctacatcatgttcgtgagacagaaccaggacatcctgagagagaaggtgaacgaggagatgtacatcgagaagctgttcgaccagtggtacagcagcagcatgaaggtgatctgcgtgtggctgaccgacagactggacctgcagctgcacatctaccagctgaagaccctgatcaagatcgtgaagaagacctacagagacttcagactgcagggcgtgctggagggcaccctgaacagcaagacctacgacaccgtgcacagaagactgaccgtggaggaggccaccgccagcgtgagcgagggcggcggcctgcagggcatcaccatgaaggacagcgacgaggaggaggagggctag

SEQ ID NO: 74834 - DNA, 2700 bp, synthetic construct
  misc_feature 1..2700: note = Description of Artificial Sequence: Synthetic coding sequence
  source 1..2700: mol_type = other DNA
tgagagatccagctgagcaagagcgacgtggtgctgagcttcaccctggagatcgtgatcatggaggtgcagggcctgaagagcgtggcccccaacagaatcgtgtactgcaccatggaggtggagggcgagaagctgcagaccgaccaggccgaggccagcagaccccagtggggcacccagggcgacttcaccaccacccaccccagacccgtggtgaaggtgaagctgttcaccgagagcaccggcgtgctggccctggaggacaaggagctgggcagagtgatcctgtaccccaccagcaacagcagcaagagcgccgagctgcacagaatggtggtgcccaagaacagccaggacagcgacctgaagatcaagctggccgtgagaatggacaagcccgcccacatgaagcacagcggctacctgtacgccctgggccagaaggtgtggaagagatggaagaagagatacttcgtgctggtgcaggtgagccagtacaccttcgccatgtgcagctacagagagaagaagagcgagccccaggagctgatgcagctggagggctacaccgtggactacaccgacccccaccccggcctgcagggcggctgcatgttcttcaacgccgtgaaggagggcgacaccgtgatcttcgccagcgacgacgagcaggacagaatcctgtgggtgcaggccatgtacagagccaccggccagagctacaagcccgtgcccgccatccagacccagaagctgaaccccaagggcggcaccctgcacgccgacgcccagctgtacgccgacagattccagaagcacggcatggacgagttcatcagcgccaacccctgcaagctggaccacgccttcctgttcagaatcctgcagagacagaccctggaccacagactgaacgacagctacagctgcctgggctggttcagccccggccaggtgttcgtgctggacgagtactgcgccagatacggcgtgagaggctgccacagacacctgtgctacctggccgagctgatggagcacagcgagaacggcgccgtgatcgaccccaccctgctgcactacagcttcgccttctgcgccagccacgtgcacggcaacagacccgacggcatcggcaccgtgagcgtggaggagaaggagagattcgaggagatcaaggagagactgagcagcctgctggagaaccagatcagccacttcagatactgcttccccttcggcagacccgagggcgccctgaaggccaccctgagcctgctggagagagtgctgatgaaggacatcgccacccccatccccgccgaggaggtgaagaaggtggtgagaaagtgcctggagaaggccgccctgatcaactacaccagactgaccgagtacgccaagatcgaggagaccatgaaccaggccagccccgccagaaagctggaggagatcctgcacctggccgagctgtgcatcgaggtgctgcagcagaacgaggagcaccacgccgaggccttcgcctggtggcccgacctgctggccgagcacgccgagaagttctgggccctgttcaccgtggacatggacaccgccctggaggcccagccccaggacagctgggacagcttccccctgttccagctgctgaacaacttcctgagaaacgacaccctgctgtgcaacggcaagttccacaagcacctgcaggagatcttcgtgcccctggtggtgagatacgtggacctgatggagagcagcatcgcccagagcatccacagaggcttcgagcaggagacctggcagcccgtgaacaacggcagcgccaccagcgaggacctgttctggaagctggacgccctgcagatgttcgtgttcgacctgcactggcccgagcaggagttcgcccaccacctggagcagagactgaagctgatggccagcgacatgctggaggcctgcgtgaagagaaccagaaccgccttcgagctgaagctgcagaaggccagcaagaccaccgacctgagaatccccgccagcgtgtgcaccatgttcaacgtgctggtggacgccaagaagcagagcaccaagctgtgcgccctggacggcggccaggagcagcagtaccacagcaagatcgacgacctgatcgacaacagcgtgaaggagatcatcagcctgctggtgagcaagttcgtgagcgtgctggagggcgtgctgagcaagctgagcagatacgacgagggcaccttcttcagcagcatcctgagcttcaccgtgaaggccgccgccaagtacgtggacgtgcccaagcccggcatggacctggccgacacctacatcatgttcgtgagacagaaccaggacatcctgagagagaaggtgaacgaggagatgtacatcgagaagctgttcgaccagtggtacagcagcagcatgaaggtgatctgcgtgtggctgaccgacagactggacctgcagctgcacatctaccagctgaagaccctgatcaagatcgtgaagaagacctacagagacttcagactgcagggcgtgctggagggcaccctgaacagcaagacctacgacaccgtgcacagaagactgaccgtggaggaggccaccgccagcgtgagcgagggcggcggcctgcagggcatcaccatgaaggacagcgacgaggaggaggagggctag

SEQ ID NO: 74835 - DNA, 3768 bp, synthetic construct
  misc_feature 1..3768: note = Description of Artificial Sequence: Synthetic coding sequence
  source 1..3768: mol_type = other DNA
atgctggaccccagcagcagcgaggaggagagcgacgagggcctggaggaggagagcagagacgtgctggtggccgccggcagcagccagagagccccccccgcccccaccagagagggcagaagagacgcccccggcagagccggcggcggcggcgccgccagaagcgtgagccccagccccagcgtgctgagcgagggcagagacgagccccagagacagctggacgacgagcaggagagaagaatcagactgcagctgtacgtgttcgtggtgagatgcatcgcctaccccttcaacgccaagcagcccaccgacatggccagaagacagcagaagctgaacaagcagcagctgcagctgctgaaggagagattccaggccttcctgaacggcgagacccagatcgtggccgacgaggccttctgcaacgccgtgagaagctactacgaggtgttcctgaagagcgacagagtggccagaatggtgcagagcggcggctgcagcgccaacgacttcagagaggtgttcaagaagaacatcgagaagagagtgagaagcctgcccgagatcgacggcctgagcaaggagaccgtgctgagcagctggatcgccaagtacgacgccatctacagaggcgaggaggacctgtgcaagcagcccaacagaatggccctgagcgccgtgagcgagctgatcctgagcaaggagcagctgtacgagatgttccagcagatcctgggcatcaagaagctggagcaccagctgctgtacaacgcctgccagctggacaacgccgacgagcaggccgcccagatcagaagagagctggacggcagactgcagctggccgacaagatggccaaggagagaaagttccccaagttcatcgccaaggacatggagaacatgtacatcgaggagctgagaagcagcgtgaacctgctgatggccaacctggagagcctgcccgtgagcaagggcggccccgagttcaagctgcagaagctgaagagaagccagaacagcgccttcctggacatcggcgacgagaacgagatccagctgagcaagagcgacgtggtgctgagcttcaccctggagatcgtgatcatggaggtgcagggcctgaagagcgtggcccccaacagaatcgtgtactgcaccatggaggtggagggcgagaagctgcagaccgaccaggccgaggccagcagaccccagtggggcacccagggcgacttcaccaccacccaccccagacccgtggtgaaggtgaagctgttcaccgagagcaccggcgtgctggccctggaggacaaggagctgggcagagtgatcctgtaccccaccagcaacagcagcaagagcgccgagctgcacagaatggtggtgcccaagaacagccaggacagcgacctgaagatcaagctggccgtgagaatggacaagcccgcccacatgaagcacagcggctacctgtacgccctgggccagaaggtgtggaagagatggaagaagagatacttcgtgctggtgcaggtgagccagtacaccttcgccatgtgcagctacagagagaagaagagcgagccccaggagctgatgcagctggagggctacaccgtggactacaccgacccccaccccggcctgcagggcggctgcatgttcttcaacgccgtgaaggagggcgacaccgtgatcttcgccagcgacgacgagcaggacagaatcctgtgggtgcaggccatgtacagagccaccggccagagctacaagcccgtgcccgccatccagacccagaagctgaaccccaagggcggcaccctgcacgccgacgcccagctgtacgccgacagattccagaagcacggcatggacgagttcatcagcgccaacccctgcaagctggaccacgccttcctgttcagaatcctgcagagacagaccctggaccacagactgaacgacagctacagctgcctgggctggttcagccccggccaggtgttcgtgctggacgagtactgcgccagatacggcgtgagaggctgccacagacacctgtgctacctggccgagctgatggagcacagcgagaacggcgccgtgatcgaccccaccctgctgcactacagcttcgccttctgcgccagccacgtgcacggcaacagacccgacggcatcggcaccgtgagcgtggaggagaaggagagattcgaggagatcaaggagagactgagcagcctgctggagaaccagatcagccacttcagatactgcttccccttcggcagacccgagggcgccctgaaggccaccctgagcctgctggagagagtgctgatgaaggacatcgccacccccatccccgccgaggaggtgaagaaggtggtgagaaagtgcctggagaaggccgccctgatcaactacaccagactgaccgagtacgccaagatcgaggagaccatgaaccaggccagccccgccagaaagctggaggagatcctgcacctggccgagctgtgcatcgaggtgctgcagcagaacgaggagcaccacgccgaggccttcgcctggtggcccgacctgctggccgagcacgccgagaagttctgggccctgttcaccgtggacatggacaccgccctggaggcccagccccaggacagctgggacagcttccccctgttccagctgctgaacaacttcctgagaaacgacaccctgctgtgcaacggcaagttccacaagcacctgcaggagatcttcgtgcccctggtggtgagatacgtggacctgatggagagcagcatcgcccagagcatccacagaggcttcgagcaggagacctggcagcccgtgaacaacggcagcgccaccagcgaggacctgttctggaagctggacgccctgcagatgttcgtgttcgacctgcactggcccgagcaggagttcgcccaccacctggagcagagactgaagctgatggccagcgacatgctggaggcctgcgtgaagagaaccagaaccgccttcgagctgaagctgcagaaggccagcaagaccaccgacctgagaatccccgccagcgtgtgcaccatgttcaacgtgctggtggacgccaagaagcagagcaccaagctgtgcgccctggacggcggccaggagttcggcagccagtggcagcagtaccacagcaagatcgacgacctgatcgacaacagcgtgaaggagatcatcagcctgctggtgagcaagttcgtgagcgtgctggagggcgtgctgagcaagctgagcagatacgacgagggcaccttcttcagcagcatcctgagcttcaccgtgaaggccgccgccaagtacgtggacgtgcccaagcccggcatggacctggccgacacctacatcatgttcgtgagacagaaccaggacatcctgagagagaaggtgaacgaggagatgtacatcgagaagctgttcgaccagtggtacagcagcagcatgaaggtgatctgcgtgtggctgaccgacagactggacctgcagctgcacatctaccagctgaagaccctgatcaagatcgtgaagaagacctacagagacttcagactgcagggcgtgctggagggcaccctgaacagcaagacctacgacaccgtgcacagaagactgaccgtggaggaggccaccgccagcgtgagcgagggcggcggcctgcagggcatcaccatgaaggacagcgacgaggaggaggagggctag

SEQ ID NO: 74836 - DNA, 3906 bp, synthetic construct
  misc_feature 1..3906: note = Description of Artificial Sequence: Synthetic coding sequence
  source 1..3906: mol_type = other DNA
atgctggaccccagcagcagcgaggaggagagcgacgagggcctggaggaggagagcagagacgtgctggtggccgccggcagcagccagagagccccccccgcccccaccagagagggcagaagagacgcccccggcagagccggcggcggcggcgccgccagaagcgtgagccccagccccagcgtgctgagcgagggcagagacgagccccagagacagctggacgacgagcaggagagaagaatcagactgcagctgtacgtgttcgtggtgagatgcatcgcctaccccttcaacgccaagcagcccaccgacatggccagaagacagcagaagctgaacaagcagcagctgcagctgctgaaggagagattccaggccttcctgaacggcgagacccagatcgtggccgacgaggccttctgcaacgccgtgagaagctactacgaggtgttcctgaagagcgacagagtggccagaatggtgcagagcggcggctgcagcgccaacgacttcagagaggtgttcaagaagaacatcgagaagagagtgagaagcctgcccgagatcgacggcctgagcaaggagaccgtgctgagcagctggatcgccaagtacgacgccatctacagaggcgaggaggacctgtgcaagcagcccaacagaatggccctgagcgccgtgagcgagctgatcctgagcaaggagcagctgtacgagatgttccagcagatcctgggcatcaagaagctggagcaccagctgctgtacaacgcctgccagctggacaacgccgacgagcaggccgcccagatcagaagagagctggacggcagactgcagctggccgacaagatggccaaggagagaaagttccccaagttcatcgccaaggacatggagaacatgtacatcgaggagctgagaagcagcgtgaacctgctgatggccaacctggagagcctgcccgtgagcaagggcggccccgagttcaagctgcagaagctgaagagaagccagaacagcgccttcctggacatcggcgacgagaacgagatccagctgagcaagagcgacgtggtgctgagcttcaccctggagatcgtgatcatggaggtgcagggcctgaagagcgtggcccccaacagaatcgtgtactgcaccatggaggtggagggcgagaagctgcagaccgaccaggccgaggccagcagaccccagtggggcacccagggcgacttcaccaccacccaccccagacccgtggtgaaggtgaagctgttcaccgagagcaccggcgtgctggccctggaggacaaggagctgggcagagtgatcctgtaccccaccagcaacagcagcaagagcgccgagctgcacagaatggtggtgcccaagaacagccaggacagcgacctgaagatcaagctggccgtgagaatggacaagcccgcccacatgaagcacagcggctacctgtacgccctgggccagaaggtgtggaagagatggaagaagagatacttcgtgctggtgcaggtgagccagtacaccttcgccatgtgcagctacagagagaagaagagcgagccccaggagctgatgcagctggagggctacaccgtggactacaccgacccccaccccggcctgcagggcggctgcatgttcttcaacgccgtgaaggagggcgacaccgtgatcttcgccagcgacgacgagcaggacagaatcctgtgggtgcaggccatgtacagagccaccggccagagctacaagcccgtgcccgccatccagacccagaagctgaaccccaagggcggcaccctgcacgccgacgcccagctgagcgagttcaccgacgccgacagattccagaagcacggcatggacgagttcatcagcgccaacccctgcaagctggaccacgccttcctgttcagaatcctgcagagacagaccctggaccacagactgaacgacagctacagctgcctgggctggttcagccccggccaggtgttcgtgctggacgagtactgcgccagatacggcgtgagaggctgccacagacacctgtgctacctggccgagctgatggagcacagcgagaacggcgccgtgatcgaccccaccctgctgcactacagcttcgccttctgcgccagccacgtgcacggcaacagacccgacggcatcggcaccgtgagcgtggaggagaaggagagattcgaggagatcaaggagagactgagcagcctgctggagaaccagatcagccacttcagatactgcttccccttcggcagacccgagggcgccctgaaggccaccctgagcctgctggagagagtgctgatgaaggacatcgccacccccatccccgccgaggaggtgaagaaggtggtgagaaagtgcctggagaaggccgccctgatcaactacaccagactgaccgagtacgccaagatcgagggccccgccgagaaggagaccgagaccatgaaccaggccagccccgccagaaagctggaggagatcctgcacctggccgagctgtgcatcgaggtgctgcagcagaacgaggagcaccacgccgaggccttcgcctggtggcccgacctgctggccgagcacgccgagaagttctgggccctgttcaccgtggacatggacaccgccctggaggcccagccccaggacagctgggacagcttccccctgttccagctgctgaacaacttcctgagaaacgacaccctgctgtgcaacggcaagttccacaagcacctgcaggagatcttcgtgcccctggtggtgagatacgtggacctgatggagagcagcatcgcccagagcatccacagaggcttcgagcaggagacctggcagcccgtgaagaacatcgccaacagcctgcccaacgtggccctgcccaaggtgcccagcctgcccctgaacctgccccagatccccaacatcagcaccgccagctggatgcccagcctgtacgagagcaccaacggcagcgccaccagcgaggacctgttctggaagctggacgccctgcagatgttcgtgttcgacctgcactggcccgagcaggagttcgcccaccacctggagcagagactgaagctgatggccagcgacatgctggaggcctgcgtgaagagaaccagaaccgccttcgagctgaagctgcagaaggccagcaagaccaccgacctgagaatccccgccagcgtgtgcaccatgttcaacgtgctggtggacgccaagaagcagagcaccaagctgtgcgccctggacggcggccaggagcagcagtaccacagcaagatcgacgacctgatcgacaacagcgtgaaggagatcatcagcctgctggtgagcaagttcgtgagcgtgctggagggcgtgctgagcaagctgagcagatacgacgagggcaccttcttcagcagcatcctgagcttcaccgtgaaggccgccgccaagtacgtggacgtgcccaagcccggcatggacctggccgacacctacatcatgttcgtgagacagaaccaggacatcctgagagagaaggtgaacgaggagatgtacatcgagaagctgttcgaccagtggtacagcagcagcatgaaggtgatctgcgtgtggctgaccgacagactggacctgcagctgcacatctaccagctgaagaccctgatcaagatcgtgaagaagacctacagagacttcagactgcagggcgtgctggagggcaccctgaacagcaagacctacgacaccgtgcacagaagactgaccgtggaggaggccaccgccagcgtgagcgagggcggcggcctgcagggcatcaccatgaaggacagcgacgaggaggaggagggctag

SEQ ID NO: 74837 - DNA, 3891 bp, synthetic construct
  misc_feature 1..3891: note = Description of Artificial Sequence: Synthetic coding sequence
  source 1..3891: mol_type = other DNA
atgctggaccccagcagcagcgaggaggagagcgacgagggcctggaggaggagagcagagacgtgctggtggccgccggcagcagccagagagccccccccgcccccaccagagagggcagaagagacgcccccggcagagccggcggcggcggcgccgccagaagcgtgagccccagccccagcgtgctgagcgagggcagagacgagccccagagacagctggacgacgagcaggagagaagaatcagactgcagctgtacgtgttcgtggtgagatgcatcgcctaccccttcaacgccaagcagcccaccgacatggccagaagacagcagaagctgaacaagcagcagctgcagctgctgaaggagagattccaggccttcctgaacggcgagacccagatcgtggccgacgaggccttctgcaacgccgtgagaagctactacgaggtgttcctgaagagcgacagagtggccagaatggtgcagagcggcggctgcagcgccaacgacttcagagaggtgttcaagaagaacatcgagaagagagtgagaagcctgcccgagatcgacggcctgagcaaggagaccgtgctgagcagctggatcgccaagtacgacgccatctacagaggcgaggaggacctgtgcaagcagcccaacagaatggccctgagcgccgtgagcgagctgatcctgagcaaggagcagctgtacgagatgttccagcagatcctgggcatcaagaagctggagcaccagctgctgtacaacgcctgccagctggacaacgccgacgagcaggccgcccagatcagaagagagctggacggcagactgcagctggccgacaagatggccaaggagagaaagttccccaagttcatcgccaaggacatggagaacatgtacatcgaggagctgagaagcagcgtgaacctgctgatggccaacctggagagcctgcccgtgagcaagggcggccccgagttcaagctgcagaagctgaagagaagccagaacagcgccttcctggacatcggcgacgagaacgagatccagctgagcaagagcgacgtggtgctgagcttcaccctggagatcgtgatcatggaggtgcagggcctgaagagcgtggcccccaacagaatcgtgtactgcaccatggaggtggagggcgagaagctgcagaccgaccaggccgaggccagcagaccccagtggggcacccagggcgacttcaccaccacccaccccagacccgtggtgaaggtgaagctgttcaccgagagcaccggcgtgctggccctggaggacaaggagctgggcagagtgatcctgtaccccaccagcaacagcagcaagagcgccgagctgcacagaatggtggtgcccaagaacagccaggacagcgacctgaagatcaagctggccgtgagaatggacaagcccgcccacatgaagcacagcggctacctgtacgccctgggccagaaggtgtggaagagatggaagaagagatacttcgtgctggtgcaggtgagccagtacaccttcgccatgtgcagctacagagagaagaagagcgagccccaggagctgatgcagctggagggctacaccgtggactacaccgacccccaccccggcctgcagggcggctgcatgttcttcaacgccgtgaaggagggcgacaccgtgatcttcgccagcgacgacgagcaggacagaatcctgtgggtgcaggccatgtacagagccaccggccagagctacaagcccgtgcccgccatccagacccagaagctgaaccccaagggcggcaccctgcacgccgacgcccagctgagcggcaaggacgccgacagattccagaagcacggcatggacgagttcatcagcgccaacccctgcaagctggaccacgccttcctgttcagaatcctgcagagacagaccctggaccacagactgaacgacagctacagctgcctgggctggttcagccccggccaggtgttcgtgctggacgagtactgcgccagatacggcgtgagaggctgccacagacacctgtgctacctggccgagctgatggagcacagcgagaacggcgccgtgatcgaccccaccctgctgcactacagcttcgccttctgcgccagccacgtgcacggcaacagacccgacggcatcggcaccgtgagcgtggaggagaaggagagattcgaggagatcaaggagagactgagcagcctgctggagaaccagatcagccacttcagatactgcttccccttcggcagacccgagggcgccctgaaggccaccctgagcctgctggagagagtgctgatgaaggacatcgccacccccatccccgccgaggaggtgaagaaggtggtgagaaagtgcctggagaaggccgccctgatcaactacaccagactgaccgagtacgccaagatcgaggagaccatgaaccaggccagccccgccagaaagctggaggagatcctgcacctggccgagctgtgcatcgaggtgctgcagcagaacgaggagcaccacgccgagggcagagaggccttcgcctggtggcccgacctgctggccgagcacgccgagaagttctgggccctgttcaccgtggacatggacaccgccctggaggcccagccccaggacagctgggacagcttccccctgttccagctgctgaacaacttcctgagaaacgacaccctgctgtgcaacggcaagttccacaagcacctgcaggagatcttcgtgcccctggtggtgagatacgtggacctgatggagagcagcatcgcccagagcatccacagaggcttcgagcaggagacctggcagcccgtgaagaacatcgccaacagcctgcccaacgtggccctgcccaaggtgcccagcctgcccctgaacctgccccagatccccaacatcagcaccgccagctggatgcccagcctgtacgagagcaccaacggcagcgccaccagcgaggacctgttctggaagctggacgccctgcagatgttcgtgttcgacctgcactggcccgagcaggagttcgcccaccacctggagcagagactgaagctgatggccagcgacatgctggaggcctgcgtgaagagaaccagaaccgccttcgagctgaagctgcagaaggccagcaagaccaccgacctgagaatccccgccagcgtgtgcaccatgttcaacgtgctggtggacgccaagaagcagagcaccaagctgtgcgccctggacggcggccaggagcagcagtaccacagcaagatcgacgacctgatcgacaacagcgtgaaggagatcatcagcctgctggtgagcaagttcgtgagcgtgctggagggcgtgctgagcaagctgagcagatacgacgagggcaccttcttcagcagcatcctgagcttcaccgtgaaggccgccgccaagtacgtggacgtgcccaagcccggcatggacctggccgacacctacatcatgttcgtgagacagaaccaggacatcctgagagagaaggtgaacgaggagatgtacatcgagaagctgttcgaccagtggtacagcagcagcatgaaggtgatctgcgtgtggctgaccgacagactggacctgcagctgcacatctaccagctgaagaccctgatcaagatcgtgaagaagacctacagagacttcagactgcagggcgtgctggagggcaccctgaacagcaagacctacgacaccgtgcacagaagactgaccgtggaggaggccaccgccagcgtgagcgagggcggcggcctgcagggcatcaccatgaaggacagcgacgaggaggaggagggctag

SEQ ID NO: 74838 - DNA, 1473 bp, synthetic construct
  misc_feature 1..1473: note = Description of Artificial Sequence: Synthetic coding sequence
  source 1..1473: mol_type = other DNA
tgatacaccagactgaccgagtacgccaagatcgagggccccgccgagaaggagaccgagaccatgaaccaggccagccccgccagaaagctggaggagatcctgcacctggccgagctgtgcatcgaggtgctgcagcagaacgaggagcaccacgccgagggcagagaggccttcgcctggtggcccgacctgctggccgagcacgccgagaagttctgggccctgttcaccgtggacatggacaccgccctggaggcccagccccaggacagctgggacagcttccccctgttccagctgctgaacaacttcctgagaaacgacaccctgctgtgcaacggcaagttccacaagcacctgcaggagatcttcgtgcccctggtggtgagatacgtggacctgatggagagcagcatcgcccagagcatccacagaggcttcgagcaggagacctggcagcccgtgaagaacatcgccaacagcctgcccaacgtggccctgcccaaggtgcccagcctgcccctgaacctgccccagatccccaacatcagcaccgccagctggatgcccagcctgtacgagagcaccaacggcagcgccaccagcgaggacctgttctggaagctggacgccctgcagatgttcgtgttcgacctgcactggcccgagcaggagttcgcccaccacctggagcagagactgaagctgatggccagcgacatgctggaggcctgcgtgaagagaaccagaaccgccttcgagctgaagctgcagaaggccagcaagaccaccgacctgagaatccccgccagcgtgtgcaccatgttcaacgtgctggtggacgccaagaagcagagcaccaagctgtgcgccctggacggcggccaggagcagcagtaccacagcaagatcgacgacctgatcgacaacagcgtgaaggagatcatcagcctgctggtgagcaagttcgtgagcgtgctggagggcgtgctgagcaagctgagcagatacgacgagggcaccttcttcagcagcatcctgagcttcaccgtgaaggccgccgccaagtacgtggacgtgcccaagcccggcatggacctggccgacacctacatcatgttcgtgagacagaaccaggacatcctgagagagaaggtgaacgaggagatgtacatcgagaagctgttcgaccagtggtacagcagcagcatgaaggtgatctgcgtgtggctgaccgacagactggacctgcagctgcacatctaccagctgaagaccctgatcaagatcgtgaagaagacctacagagacttcagactgcagggcgtgctggagggcaccctgaacagcaagacctacgacaccgtgcacagaagactgaccgtggaggaggccaccgccagcgtgagcgagggcggcggcctgcagggcatcaccatgaaggacagcgacgaggaggaggagggctag

SEQ ID NO: 74839 - DNA, 3669 bp, synthetic construct
  misc_feature 1..3669: note = Description of Artificial Sequence: Synthetic coding sequence
  source 1..3669: mol_type = other DNA
atgctggaccccagcagcagcgaggaggagagcgacgagggcctggaggaggagagcagagacgtgctggtggccgccggcagcagccagagagccccccccgcccccaccagagagggccagctggacgacgagcaggagagaagaatcagactgcagctgtacgtgttcgtggtgagatgcatcgcctaccccttcaacgccaagcagcccaccgacatggccagaagacagcagaagctgaacaagcagcagctgcagctgctgaaggagagattccaggccttcctgaacggcgagacccagatcgtggccgacgaggccttctgcaacgccgtgagaagctactacgaggtgttcctgaagagcgacagagtggccagaatggtgcagagcggcggctgcagcgccaacgacttcagagaggtgttcaagaagaacatcgagaagagagtgagaagcctgcccgagatcgacggcctgagcaaggagaccgtgctgagcagctggatcgccaagtacgacgccatctacagaggcgaggaggacctgtgcaagcagcccaacagaatggccctgagcgccgtgagcgagctgatcctgagcaaggagcagctgtacgagatgttccagcagatcctgggcatcaagaagctggagcaccagctgctgtacaacgcctgccagctggacaacgccgacgagcaggccgcccagatcagaagagagctggacggcagactgcagctggccgacaagatggccaaggagagaaagttccccaagttcatcgccaaggacatggagaacatgtacatcgaggagctgagaagcagcgtgaacctgctgatggccaacctggagagcctgcccgtgagcaagggcggccccgagttcaagctgcagaagctgaagagaagccagaacagcgccttcctggacatcggcgacgagaacgagatccagctgagcaagagcgacgtggtgctgagcttcaccctggagatcgtgatcatggaggtgcagggcctgaagagcgtggcccccaacagaatcgtgtactgcaccatggaggtggagggcgagaagctgcagaccgaccaggccgaggccagcagaccccagtggggcacccagggcgacttcaccaccacccaccccagacccgtggtgaaggtgaagctgttcaccgagagcaccggcgtgctggccctggaggacaaggagctgggcagagtgatcctgtaccccaccagcaacagcagcaagagcgccgagctgcacagaatggtggtgcccaagaacagccaggacagcgacctgaagatcaagctggccgtgagaatggacaagcccgcccacatgaagcacagcggctacctgtacgccctgggccagaaggtgtggaagagatggaagaagagatacttcgtgctggtgcaggtgagccagtacaccttcgccatgtgcagctacagagagaagaagagcgagccccaggagctgatgcagctggagggctacaccgtggactacaccgacccccaccccggcctgcagggcggctgcatgttcttcaacgccgtgaaggagggcgacaccgtgatcttcgccagcgacgacgagcaggacagaatcctgtgggtgcaggccatgtacagagccaccggccagagctacaagcccgtgcccgccatccagacccagaagctgaaccccaagggcggcaccctgcacgccgacgcccagctgtacgccgacagattccagaagcacggcatggacgagttcatcagcgccaacccctgcaagctggaccacgccttcctgttcagaatcctgcagagacagaccctggaccacagactgaacgacagctacagctgcctgggctggttcagccccggccaggtgttcgtgctggacgagtactgcgccagatacggcgtgagaggctgccacagacacctgtgctacctggccgagctgatggagcacagcgagaacggcgccgtgatcgaccccaccctgctgcactacagcttcgccttctgcgccagccacgtgcacggcaacagacccgacggcatcggcaccgtgagcgtggaggagaaggagagattcgaggagatcaaggagagactgagcagcctgctggagaaccagatcagccacttcagatactgcttccccttcggcagacccgagggcgccctgaaggccaccctgagcctgctggagagagtgctgatgaaggacatcgccacccccatccccgccgaggaggtgaagaaggtggtgagaaagtgcctggagaaggccgccctgatcaactacaccagactgaccgagtacgccaagatcgaggagaccatgaaccaggccagccccgccagaaagctggaggagatcctgcacctggccgagctgtgcatcgaggtgctgcagcagaacgaggagcaccacgccgaggccttcgcctggtggcccgacctgctggccgagcacgccgagaagttctgggccctgttcaccgtggacatggacaccgccctggaggcccagccccaggacagctgggacagcttccccctgttccagctgctgaacaacttcctgagaaacgacaccctgctgtgcaacggcaagttccacaagcacctgcaggagatcttcgtgcccctggtggtgagatacgtggacctgatggagagcagcatcgcccagagcatccacagaggcttcgagcaggagacctggcagcccgtgaacaacggcagcgccaccagcgaggacctgttctggaagctggacgccctgcagatgttcgtgttcgacctgcactggcccgagcaggagttcgcccaccacctggagcagagactgaagctgatggccagcgacatgctggaggcctgcgtgaagagaaccagaaccgccttcgagctgaagctgcagaaggccagcaagaccaccgacctgagaatccccgccagcgtgtgcaccatgttcaacgtgctggtggacgccaagaagcagagcaccaagctgtgcgccctggacggcggccaggagttcggcagccagtggcagcagtaccacagcaagatcgacgacctgatcgacaacagcgtgaaggagatcatcagcctgctggtgagcaagttcgtgagcgtgctggagggcgtgctgagcaagctgagcagatacgacgagggcaccttcttcagcagcatcctgagcttcaccgtgaaggccgccgccaagtacgtggacgtgcccaagcccggcatggacctggccgacacctacatcatgttcgtgagacagaaccaggacatcctgagagagaaggtgaacgaggagatgtacatcgagaagctgttcgaccagtggtacagcagcagcatgaaggtgatctgcgtgtggctgaccgacagactggacctgcagctgcacatctaccagctgaagaccctgatcaagatcgtgaagaagacctacagagacttcagactgcagggcgtgctggagggcaccctgaacagcaagacctacgacaccgtgcacagaagactgaccgtggaggaggccaccgccagcgtgagcgagggcggcggcctgcagggcatcaccatgaaggacagcgacgaggaggaggagggctag

SEQ ID NO: 74840 - DNA, 2367 bp, synthetic construct
  misc_feature 1..2367: note = Description of Artificial Sequence: Synthetic coding sequence
  source 1..2367: mol_type = other DNA
atgaccatccaccagttcctgctgctgttcctgttctgggtgtgcctgccccacttctgcagccccgagatcatgttcagaagaacccccgtgccccagcagagaatcctgagcagcagagtgcccagaagcgacggcaagatcctgcacagacagaagagaggctggatgtggaaccagttcttcctgctggaggagtacaccggcagcgactaccagtacgtgggcaagctgcacagcgaccaggacaagggcgacggcagcctgaagtacatcctgagcggcgacggcgccggcaccctgttcatcatcgacgagaagaccggcgacatccacgccaccagaagaatcgacagagaggagaaggccttctacaccctgagagcccaggccatcaacagaagaaccctgagacccgtggagcccgagagcgagttcgtgatcaagatccacgacatcaacgacaacgagcccaccttccccgaggagatctacaccgccagcgtgcccgagatgagcgtggtgggcaccagcgtggtgcaggtgaccgccaccgacgccgacgaccccagctacggcaacagcgccagagtgatctacagcatcctgcagggccagccctacttcagcgtggagcccgagaccggcatcatcagaaccgccctgcccaacatgaacagagagaacagagagcagtaccaggtggtgatccaggccaaggacatgggcggccagatgggcggcctgagcggcaccaccaccgtgaacatcaccctgaccgacgtgaacgacaacccccccagattcccccagaacaccatccacctgagagtgctggagagcagccccgtgggcaccgccatcggcagcgtgaaggccaccgacgccgacaccggcaagaacgccgaggtggagtacagaatcatcgacggcgacggcaccgacatgttcgacatcgtgaccgagaaggacacccaggagggcatcatcaccgtgaagaagcccctggactacgagagcagaagactgtacaccctgaaggtggaggccgagaacacccacgtggaccccagattctactacctgggccccttcaaggacaccaccatcgtgaagatcagcatcgaggacgtggacgagccccccgtgttcagcagaagcagctacctgttcgaggtgcacgaggacatcgaggtgggcaccatcatcggcaccgtgatggccagagaccccgacagcatcagcagccccatcagattcagcctggacagacacaccgacctggacagaatcttcaacatccacagcggcaacggcagcctgtacaccagcaagcccctggacagagagctgagccagtggcacaacctgaccgtgatcgccgccgagatcaacaaccccaaggagaccaccagagtggccgtgttcgtgagaatcctggacgtgaacgacaacgccccccagttcgccgtgttctacgacaccttcgtgtgcgagaacgccagacccggccagctgatccagaccatcagcgccgtggacaaggacgaccccctgggcggccagaagttcttcttcagcctggccgccgtgaaccccaacttcaccgtgcaggacaacgaggacaacaccgccagaatcctgaccagaaagaacggcttcaacagacacgagatcagcacctacctgctgcccgtggtgatcagcgacaacgactaccccatccagagcagcaccggcaccctgaccatcagagtgtgcgcctgcgacagccagggcaacatgcagagctgcagcgccgaggccctgctgctgcccgccggcctgagcaccggcgccctgatcgccatcctgctgtgcatcatcatcctgctggtgatcgtggtgctgttcgccgccctgaagagacagagaaagaaggagcccctgatcctgagcaaggaggacatcagagacaacatcgtgagctacaacgacgagggcggcggcgaggaggacacccaggccttcgacatcggcaccctgagaaaccccgccgccatcgaggagaagaagctgagaagagacatcatccccgagaccctgttcatccccagaagaacccccaccgcccccgacaacaccgacgtgagagacttcatcaacgagagactgaaggagcacgacctggaccccaccgcccccccctacgacagcctggccacctacgcctacgagggcaacgacagcatcgccgagagcctgagcagcctggagagcggcaccaccgagggcgaccagaactacgactacctgagagagtggggccccagattcaacaagctggccgagatgtacggcggcggcgagagcgacaaggacagctag

SEQ ID NO: 74841 - DNA, 2385 bp, synthetic construct
  misc_feature 1..2385: note = Description of Artificial Sequence: Synthetic coding sequence
  source 1..2385: mol_type = other DNA
atgctgaccagaaactgcctgagcctgctgctgtgggtgctgttcgacggcggcctgctgacccccctgcagccccagccccagcagaccctggccaccgagcccagagagaacgtgatccacctgcccggccagagaagccacttccagagagtgaagagaggctgggtgtggaaccagttcttcgtgctggaggagtacgtgggcagcgagccccagtacgtgggcaagctgcacagcgacctggacaagggcgagggcaccgtgaagtacaccctgagcggcgacggcgccggcaccgtgttcaccatcgacgagaccaccggcgacatccacgccatcagaagcctggacagagaggagaagcccttctacaccctgagagcccaggccgtggacatcgagaccagaaagcccctggagcccgagagcgagttcatcatcaaggtgcaggacatcaacgacaacgagcccaagttcctggacggcccctacgtggccaccgtgcccgagatgagccccgtgggcgcctacgtgctgcaggtgaaggccaccgacgccgacgaccccacctacggcaacagcgccagagtggtgtacagcatcctgcagggccagccctacttcagcatcgaccccaagaccggcgtgatcagaaccgccctgcccaacatggacagagaggtgaaggagcagtaccaggtgctgatccaggccaaggacatgggcggccagctgggcggcctggccggcaccaccatcgtgaacatcaccctgaccgacgtgaacgacaacccccccagattccccaagagcatcttccacctgaaggtgcccgagagcagccccatcggcagcgccatcggcagaatcagagccgtggaccccgacttcggccagaacgccgagatcgagtacaacatcgtgcccggcgacggcggcaacctgttcgacatcgtgaccgacgaggacacccaggagggcgtgatcaagctgaagaagcccctggacttcgagaccaagaaggcctacaccttcaaggtggaggccagcaacctgcacctggaccacagattccacagcgccggccccttcaaggacaccgccaccgtgaagatcagcgtgctggacgtggacgagccccccgtgttcagcaagcccctgtacaccatggaggtgtacgaggacacccccgtgggcaccatcatcggcgccgtgaccgcccaggacctggacgtgggcagcagcgccgtgagatacttcatcgactggaagagcgacggcgacagctacttcaccatcgacggcaacgagggcaccatcgccaccaacgagctgctggacagagagagcaccgcccagtacaacttcagcatcatcgccagcaaggtgagcaaccccctgctgaccagcaaggtgaacatcctgatcaacgtgctggacgtgaacgagttcccccccgagatcagcgtgccctacgagaccgccgtgtgcgagaacgccaagcccggccagatcatccagatcgtgagcgccgccgacagagacctgagccccgccggccagcagttcagcttcagactgagccccgaggccgccatcaagcccaacttcaccgtgagagacttcagaaacaacaccgccggcatcgagaccagaagaaacggctacagcagaagacagcaggagctgtacttcctgcccgtggtgatcgaggacagcagctaccccgtgcagagcagcaccaacaccatgaccatcagagtgtgcagatgcgacagcgacggcaccatcctgagctgcaacgtggaggccatcttcctgcccgtgggcctgagcaccggcgccctgatcgccatcctgctgtgcatcgtgatcctgctggccatcgtggtgctgtacgtggccctgagaagacagaagaagaaggacaccctgatgaccagcaaggaggacatcagagacaacgtgatccactacgacgacgagggcggcggcgaggaggacacccaggccttcgacatcggcgccctgagaaaccccaaggtgatcgaggagaacaagatcagaagagacatcaagcccgacagcctgtgcctgcccagacagagaccccccatggaggacaacaccgacatcagagacttcatccaccagagactgcaggagaacgacgtggaccccaccgcccccccctacgacagcctggccacctacgcctacgagggcagcggcagcgtggccgagagcctgagcagcatcgacagcctgaccaccgaggccgaccaggactacgactacctgaccgactggggccccagattcaaggtgctggccgacatgttcggcgaggaggagagctacaaccccgacaaggtgacctag

SEQ ID NO: 74842 - DNA, 2385 bp, synthetic construct; identical to SEQ ID NO: 74841
  misc_feature 1..2385: note = Description of Artificial Sequence: Synthetic coding sequence
  source 1..2385: mol_type = other DNA

SEQ ID NO: 74843 - DNA, 2265 bp, synthetic construct
  misc_feature 1..2265: note = Description of Artificial Sequence: Synthetic coding sequence
  source 1..2265: mol_type = other DNA
atgctgaccagaaactgcctgagcctgctgctgtgggtgctgttcgacggcggcctgctgacccccctgcagccccagccccagcagaccctggccaccgagcccagagagaacgtgatccacctgcccggccagagaagccacttccagagagtgaagagaggctgggtgtggaaccagttcttcgtgctggaggagtacgtgggcagcgagccccagtacgtgggcaagctgcacagcgacctggacaagggcgagggcaccgtgaagtacaccctgagcggcgacggcgccggcaccgtgttcaccatcgacgagaccaccggcgacatccacgccatcagaagcctggacagagaggagaagcccttctacaccctgagagcccaggccgtggacatcgagaccagaaagcccctggagcccgagagcgagttcatcatcaaggtgcaggacatcaacgacaacgagcccaagttcctggacggcccctacgtggccaccgtgcccgagatgagccccgtgggcgtgatcagaaccgccctgcccaacatggacagagaggtgaaggagcagtaccaggtgctgatccaggccaaggacatgggcggccagctgggcggcctggccggcaccaccatcgtgaacatcaccctgaccgacgtgaacgacaacccccccagattccccaagagcatcttccacctgaaggtgcccgagagcagccccatcggcagcgccatcggcagaatcagagccgtggaccccgacttcggccagaacgccgagatcgagtacaacatcgtgcccggcgacggcggcaacctgttcgacatcgtgaccgacgaggacacccaggagggcgtgatcaagctgaagaagcccctggacttcgagaccaagaaggcctacaccttcaaggtggaggccagcaacctgcacctggaccacagattccacagcgccggccccttcaaggacaccgccaccgtgaagatcagcgtgctggacgtggacgagccccccgtgttcagcaagcccctgtacaccatggaggtgtacgaggacacccccgtgggcaccatcatcggcgccgtgaccgcccaggacctggacgtgggcagcagcgccgtgagatacttcatcgactggaagagcgacggcgacagctacttcaccatcgacggcaacgagggcaccatcgccaccaacgagctgctggacagagagagcaccgcccagtacaacttcagcatcatcgccagcaaggtgagcaaccccctgctgaccagcaaggtgaacatcctgatcaacgtgctggacgtgaacgagttcccccccgagatcagcgtgccctacgagaccgccgtgtgcgagaacgccaagcccggccagatcatccagatcgtgagcgccgccgacagagacctgagccccgccggccagcagttcagcttcagactgagccccgaggccgccatcaagcccaacttcaccgtgagagacttcagaaacaacaccgccggcatcgagaccagaagaaacggctacagcagaagacagcaggagctgtacttcctgcccgtggtgatcgaggacagcagctaccccgtgcagagcagcaccaacaccatgaccatcagagtgtgcagatgcgacagcgacggcaccatcctgagctgcaacgtggaggccatcttcctgcccgtgggcctgagcaccggcgccctgatcgccatcctgctgtgcatcgtgatcctgctggccatcgtggtgctgtacgtggccctgagaagacagaagaagaaggacaccctgatgaccagcaaggaggacatcagagacaacgtgatccactacgacgacgagggcggcggcgaggaggacacccaggccttcgacatcggcgccctgagaaaccccaaggtgatcgaggagaacaagatcagaagagacatcaagcccgacagcctgtgcctgcccagacagagaccccccatggaggacaacaccgacatcagagacttcatccaccagagactgcaggagaacgacgtggaccccaccgcccccccctacgacagcctggccacctacgcctacgagggcagcggcagcgtggccgagagcctgagcagcatcgacagcctgaccaccgaggccgaccaggactacgactacctgaccgactggggccccagattcaaggtgctggccgacatgttcggcgaggaggagagctacaaccccgacaaggtgacctag

SEQ ID NO: 74844 - DNA, 2445 bp, synthetic construct
  misc_feature 1..2445: note = Description of Artificial Sequence: Synthetic coding sequence
  source 1..2445: mol_type = other DNA
atggacgccgccttcctgctggtgctgggcctgctggcccagagcctgtgcctgagcctgggcgtgcccggctggagaagacccaccaccctgtacccctggagaagagcccccgccctgagcagagtgagaagagcctgggtgatcccccccatcagcgtgagcgagaaccacaagagactgccctaccccctggtgcagatcaagagcgacaagcagcagctgggcagcgtgatctacagcatccagggccccggcgtggacgaggagcccagaggcgtgttcagcatcgacaagttcaccggcaaggtgttcctgaacgccatgctggacagagagaagaccgacagattcagactgagagccttcgccctggacctgggcggcagcaccctggaggaccccaccgacctggagatcgtggtggtggaccagaacgacaacagacccgccttcctgcaggaggccttcaccggcagagtgctggagggcgccgtgcccggcacctacgtgaccagagccgaggccaccgacgccgacgaccccgagaccgacaacgccgccctgagattcagcatcctgcagcagggcagccccgagctgttcagcatcgacgagctgaccggcgagatcagaaccgtgcaggtgggcctggacagagaggtggtggccgtgtacaacctgaccctgcaggtggccgacatgagcggcgacggcctgaccgccaccgccagcgccatcatcaccctggacgacatcaacgacaacgcccccgagttcaccagagacgagttcttcatggaggccatcgaggccgtgagcggcgtggacgtgggcagactggaggtggaggacagagacctgcccggcagccccaactgggtggccagattcaccatcctggagggcgaccccgacggccagttcaccatcagaaccgaccccaagaccaacgagggcgtgctgagcatcgtgaaggccctggactacgagagctgcgagcactacgagctgaaggtgagcgtgcagaacgaggcccccctgcaggccgccgccctgagagccgagagaggccaggccaaggtgagagtgcacgtgcaggacaccaacgagccccccgtgttccaggagaaccccctgagaaccagcctggccgagggcgccccccccggcaccctggtggccaccttcagcgccagagaccccgacaccgagcagctgcagagactgagctacagcaaggactacgaccccgaggactggctgcaggtggacgccgccaccggcagaatccagacccagcacgtgctgagccccgccagccccttcctgaagggcggctggtacagagccatcgtgctggcccaggacgacgccagccagcccagaaccgccaccggcaccctgagcatcgagatcctggaggtgaacgaccacgcccccgtgctggccccccccccccccggcagcctgtgcagcgagccccaccagggccccggcctgctgctgggcgccaccgacgaggacctgcccccccacggcgcccccttccacttccagctgagccccagactgcccgagctgggcagaaactggagcctgagccaggtgaacgtgagccacgccagactgagacccagacaccaggtgcccgagggcctgcacagactgagcctgctgctgagagacagcggccagcccccccagcagagagagcagcccctgaacgtgaccgtgtgcagatgcggcaaggacggcgtgtgcctgcccggcgccgccgccctgctggccggcggcaccggcctgagcctgggcgccctggtgatcgtgctggccagcgccctgctgctgctggtgctggtgctgctggtggccctgagagccagattctggaagcagagcagaggcaagggcctgctgcacggcccccaggacgacctgagagacaacgtgctgaactacgacgagcagggcggcggcgaggaggaccaggacgcctacgacatcagccagctgagacaccccaccgccctgagcctgcccctgggccccccccccctgagaagagacgccccccagggcagactgcacccccagccccccagagtgctgcccaccagccccctggacatcgccgacttcatcaacgacggcctggaggccgccgacagcgaccccagcgtgcccccctacgacaccgccctgatctacgactacgagggcgacggcagcgtggccggcaccctgagcagcatcctgagcagccagggcgacgaggaccaggactacgactacctgagagactggggccccagattcgccagactggccgacatgtacggccacccctgcggcctggagtacggcgccagatgggaccaccaggccagagagggcctgagccccggcgccctgctgcccagacacagaggcagaaccgcctag

SEQ ID NO: 74845 - DNA, 2373 bp, synthetic construct
  misc_feature 1..2373: note = Description of Artificial Sequence: Synthetic coding sequence
  source 1..2373: mol_type = other DNA
atggtgcccgcctggctgtggctgctgtgcgtgagcgtgccccaggccctgcccaaggcccagcccgccgagctgagcgtggaggtgcccgagaactacggcggcaacttccccctgtacctgaccaagctgcccctgcccagagagggcgccgagggccagatcgtgctgagcggcgacagcggcaaggccaccgagggccccttcgccatggaccccgacagcggcttcctgctggtgaccagagccctggacagagaggagcaggccgagtaccagctgcaggtgaccctggagatgcaggacggccacgtgctgtggggcccccagcccgtgctggtgcacgtgaaggacgagaacgaccaggtgccccacttcagccaggccatctacagagccagactgagcagaggcaccagacccggcatccccttcctgttcctggaggccagcgacagagacgagcccggcaccgccaacagcgacctgagattccacatcctgagccaggcccccgcccagcccagccccgacatgttccagctggagcccagactgggcgccctggccctgagccccaagggcagcaccagcctggaccacgccctggagagaacctaccagctgctggtgcaggtgaaggacatgggcgaccaggccagcggccaccaggccaccgccaccgtggaggtgagcatcatcgagagcacctgggtgagcctggagcccatccacctggccgagaacctgaaggtgctgtacccccaccacatggcccaggtgcactggagcggcggcgacgtgcactaccacctggagagccacccccccggccccttcgaggtgaacgccgagggcaacctgtacgtgaccagagagctggacagagaggcccaggccgagtacctgctgcaggtgagagcccagaacagccacggcgaggactacgccgcccccctggagctgcacgtgctggtgatggacgagaacgacaacgtgcccatctgcccccccagagaccccaccgtgagcatccccgagctgagcccccccggcaccgaggtgaccagactgagcgccgaggacgccgacgcccccggcagccccaacagccacgtggtgtaccagctgctgagccccgagcccgaggacggcgtggagggcagagccttccaggtggaccccaccagcggcagcgtgaccctgggcgtgctgcccctgagagccggccagaacatcctgctgctggtgctggccatggacctggccggcgccgagggcggcttcagcagcacctgcgaggtggaggtggccgtgaccgacatcaacgaccacgcccccgagttcatcaccagccagatcggccccatcagcctgcccgaggacgtggagcccggcaccctggtggccatgctgaccgccatcgacgccgacctggagcccgccttcagactgatggacttcgccatcgagagaggcgacaccgagggcaccttcggcctggactgggagcccgacagcggccacgtgagactgagactgtgcaagaacctgagctacgaggccgcccccagccacgaggtggtggtggtggtgcagagcgtggccaagctggtgggccccggccccggccccggcgccaccgccaccgtgaccgtgctggtggagagagtgatgcccccccccaagctggaccaggagagctacgaggccagcgtgcccatcagcgcccccgccggcagcttcctgctgaccatccagcccagcgaccccatcagcagaaccctgagattcagcctggtgaacgacagcgagggctggctgtgcatcgagaagttcagcggcgaggtgcacaccgcccagagcctgcagggcgcccagcccggcgacacctacaccgtgctggtggaggcccaggacaccgaccacggcctgatcgtgagcggccccagcaaggaccccgacctggccagcggccacggcccctacagcttcaccctgggccccaaccccaccgtgcagagagactggagactgcagaccctgaacggcagccacgcctacctgaccctggccctgcactgggtggagcccagagagcacatcatccccgtggtggtgagccacaacgcccagatgtggcagctgctggtgagagtgatcgtgtgcagatgcaacgtggagggccagtgcatgagaaaggtgggcagaatgaagggcatgcccaccaagctgagcgccgtgggcatcctggtgggcaccctggtggccatcggcatcttcctgatcctgatcttcacccactggaccatgagcagaaagaaggaccccgaccagcccgccgacagcgtgcccctgaaggccaccgtgtag

SEQ ID NO: 74846 - DNA, 2199 bp, synthetic construct
  misc_feature 1..2199: note = Description of Artificial Sequence: Synthetic coding sequence
  source 1..2199: mol_type = other DNA
atggtgcccgcctggctgtggctgctgtgcgtgagcgtgccccaggccctgcccaaggcccagcccgccgagctgagcgtggaggtgcccgagaactacggcggcaacttccccctgtacctgaccaagctgcccctgcccagagagggcgccgagggccagatcgtgctgagcggcgacagcggcaaggccaccgagggccccttcgccatggaccccgacagcggcttcctgctggtgaccagagccctggacagagaggagcaggccgagtaccagctgcaggtgaccctggagatgcaggacggccacgtgctgtggggcccccagcccgtgctggtgcacgtgaaggacgagaacgaccaggccagcggccaccaggccaccgccaccgtggaggtgagcatcatcgagagcacctgggtgagcctggagcccatccacctggccgagaacctgaaggtgctgtacccccaccacatggcccaggtgcactggagcggcggcgacgtgcactaccacctggagagccacccccccggccccttcgaggtgaacgccgagggcaacctgtacgtgaccagagagctggacagagaggcccaggccgagtacctgctgcaggtgagagcccagaacagccacggcgaggactacgccgcccccctggagctgcacgtgctggtgatggacgagaacgacaacgtgcccatctgcccccccagagaccccaccgtgagcatccccgagctgagcccccccggcaccgaggtgaccagactgagcgccgaggacgccgacgcccccggcagccccaacagccacgtggtgtaccagctgctgagccccgagcccgaggacggcgtggagggcagagccttccaggtggaccccaccagcggcagcgtgaccctgggcgtgctgcccctgagagccggccagaacatcctgctgctggtgctggccatggacctggccggcgccgagggcggcttcagcagcacctgcgaggtggaggtggccgtgaccgacatcaacgaccacgcccccgagttcatcaccagccagatcggccccatcagcctgcccgaggacgtggagcccggcaccctggtggccatgctgaccgccatcgacgccgacctggagcccgccttcagactgatggacttcgccatcgagagaggcgacaccgagggcaccttcggcctggactgggagcccgacagcggccacgtgagactgagactgtgcaagaacctgagctacgaggccgcccccagccacgaggtggtggtggtggtgcagagcgtggccaagctggtgggccccggccccggccccggcgccaccgccaccgtgaccgtgctggtggagagagtgatgcccccccccaagctggaccaggagagctacgaggccagcgtgcccatcagcgcccccgccggcagcttcctgctgaccatccagcccagcgaccccatcagcagaaccctgagattcagcctggtgaacgacagcgagggctggctgtgcatcgagaagttcagcggcgaggtgcacaccgcccagagcctgcagggcgcccagcccggcgacacctacaccgtgctggtggaggcccaggacaccgacgagcccagactgagcgccagcgcccccctggtgatccacttcctgaaggccccccccgcccccgccctgaccctggcccccgtgcccagccagtacctgtgcacccccagacaggaccacggcctgatcgtgagcggccccagcaaggaccccgacctggccagcggccacggcccctacagcttcaccctgggccccaaccccaccgtgcagagagactggagactgcagaccctgaacggcagccacgcctacctgaccctggccctgcactgggtggagcccagagagcacatcatccccgtggtggtgagccacaacgcccagatgtggcagctgctggtgagagtgatcgtgtgcagatgcaacgtggagggccagtgcatgagaaaggtgggcagaatgaagggcatgcccaccaagctgagcgccgtgggcatcctggtgggcaccctggtggccatcggcatcttcctgatcctgatcttcacccactggaccatgagcagaaagaaggaccccgaccagcccgccgacagcgtgcccctgaaggccaccgtgtag

SEQ ID NO: 74847 - DNA, 2490 bp, synthetic construct
  misc_feature 1..2490: note = Description of Artificial Sequence: Synthetic coding sequence
  source 1..2490: mol_type = other DNA
atggtgcccgcctggctgtggctgctgtgcgtgagcgtgccccaggccctgcccaaggcccagcccgccgagctgagcgtggaggtgcccgagaactacggcggcaacttccccctgtacctgaccaagctgcccctgcccagagagggcgccgagggccagatcgtgctgagcggcgacagcggcaaggccaccgagggccccttcgccatggaccccgacagcggcttcctgctggtgaccagagccctggacagagaggagcaggccgagtaccagctgcaggtgaccctggagatgcaggacggccacgtgctgtggggcccccagcccgtgctggtgcacgtgaaggacgagaacgaccaggtgccccacttcagccaggccatctacagagccagactgagcagaggcaccagacccggcatccccttcctgttcctggaggccagcgacagagacgagcccggcaccgccaacagcgacctgagattccacatcctgagccaggcccccgcccagcccagccccgacatgttccagctggagcccagactgggcgccctggccctgagccccaagggcagcaccagcctggaccacgccctggagagaacctaccagctgctggtgcaggtgaaggacatgggcgaccaggccagcggccaccaggccaccgccaccgtggaggtgagcatcatcgagagcacctgggtgagcctggagcccatccacctggccgagaacctgaaggtgctgtacccccaccacatggcccaggtgcactggagcggcggcgacgtgcactaccacctggagagccacccccccggccccttcgaggtgaacgccgagggcaacctgtacgtgaccagagagctggacagagaggcccaggccgagtacctgctgcaggtgagagcccagaacagccacggcgaggactacgccgcccccctggagctgcacgtgctggtgatggacgagaacgacaacgtgcccatctgcccccccagagaccccaccgtgagcatccccgagctgagcccccccggcaccgaggtgaccagactgagcgccgaggacgccgacgcccccggcagccccaacagccacgtggtgtaccagctgctgagccccgagcccgaggacggcgtggagggcagagccttccaggtggaccccaccagcggcagcgtgaccctgggcgtgctgcccctgagagccggccagaacatcctgctgctggtgctggccatggacctggccggcgccgagggcggcttcagcagcacctgcgaggtggaggtggccgtgaccgacatcaacgaccacgcccccgagttcatcaccagccagatcggccccatcagcctgcccgaggacgtggagcccggcaccctggtggccatgctgaccgccatcgacgccgacctggagcccgccttcagactgatggacttcgccatcgagagaggcgacaccgagggcaccttcggcctggactgggagcccgacagcggccacgtgagactgagactgtgcaagaacctgagctacgaggccgcccccagccacgaggtggtggtggtggtgcagagcgtggccaagctggtgggccccggccccggccccggcgccaccgccaccgtgaccgtgctggtggagagagtgatgcccccccccaagctggaccaggagagctacgaggccagcgtgcccatcagcgcccccgccggcagcttcctgctgaccatccagcccagcgaccccatcagcagaaccctgagattcagcctggtgaacgacagcgagggctggctgtgcatcgagaagttcagcggcgaggtgcacaccgcccagagcctgcagggcgcccagcccggcgacacctacaccgtgctggtggaggcccaggacaccgacgagcccagactgagcgccagcgcccccctggtgatccacttcctgaaggccccccccgcccccgccctgaccctggcccccgtgcccagccagtacctgtgcacccccagacaggaccacggcctgatcgtgagcggccccagcaaggaccccgacctggccagcggccacggcccctacagcttcaccctgggccccaaccccaccgtgcagagagactggagactgcagaccctgaacggcagccacgcctacctgaccctggccctgcactgggtggagcccagagagcacatcatccccgtggtggtgagccacaacgcccagatgtggcagctgctggtgagagtgatcgtgtgcagatgcaacgtggagggccagtgcatgagaaaggtgggcagaatgaagggcatgcccaccaagctgagcgccgtgggcatcctggtgggcaccctggtggccatcggcatcttcctgatcctgatcttcacccactggaccatgagcagaaagaaggaccccgaccagcccgccgacagcgtgcccctgaaggccaccgtgtag

SEQ ID NO: 74848 - DNA, 2424 bp, synthetic construct
  misc_feature 1..2424: note = Description of Artificial Sequence: Synthetic coding sequence
  source 1..2424: mol_type = other DNA
atggtgcccgcctggctgtggctgctgtgcgtgagcgtgccccaggccctgcccaaggcccagcccgccgagctgagcgtggaggtgcccgagaactacggcggcaacttccccctgtacctgaccaagctgcccctgcccagagagggcgccgagggccagatcgtgctgagcggcgacagcggcaaggccaccgagggccccttcgccatggaccccgacagcggcttcctgctggtgaccagagccctggacagagaggagcaggccgagtaccagctgcaggtgaccctggagatgcaggacggccacgtgctgtggggcccccagcccgtgctggtgcacgtgaaggacgagaacgaccaggtgccccacttcagccaggccatctacagagccagactgagcagaggcaccagacccggcatccccttcctgttcctggaggccagcgacagagacgagcccggcaccgccaacagcgacctgagattccacatcctgagccaggcccccgcccagcccagccccgacatgttccagctggagcccagactgggcgccctggccctgagccccaagggcagcaccagcctggaccacgccctggagagaacctaccagctgctggtgcaggtgaaggacatgggcgaccaggccagcggccaccaggccaccgccaccgtggaggtgagcatcatcgagagcacctgggtgagcctggagcccatccacctggccgagaacctgaaggtgctgtacccccaccacatggcccaggtgcactggagcggcggcgacgtgcactaccacctggagagccacccccccggccccttcgaggtgaacgccgagggcaacctgtacgtgaccagagagctggacagagaggcccaggccgagtacctgctgcaggtgagagcccagaacagccacggcgaggactacgccgcccccctggagctgcacgtgctggtgatggacgagaacgacaacgtgcccatctgcccccccagagaccccaccgtgagcatccccgagctgagcccccccggcaccgaggtgaccagactgagcgccgaggacgccgacgcccccggcagccccaacagccacgtggtgtaccagctgctgagccccgagcccgaggacggcgtggagggcagagccttccaggtggaccccaccagcggcagcgtgaccctgggcgtgctgcccctgagagccggccagaacatcctgctgctggtgctggccatggacctggccggcgccgagggcggcttcagcagcacctgcgaggtggaggtggccgtgaccgacatcaacgaccacgcccccgagttcatcaccagccagatcggccccatcagcctgcccgaggacgtggagcccggcaccctggtggccatgctgaccgccatcgacgccgacctggagcccgccttcagactgatggacttcgccatcgagagaggcgacaccgagggcaccttcggcctggactgggagcccgacagcggccacgtgagactgagactgtgcaagaacctgagctacgaggccgcccccagccacgaggtggtggtggtggtgcagagcgtggccaagctggtgggccccggccccggccccggcgccaccgccaccgtgaccgtgctggtggagagagtgatgcccccccccaagctggaccaggagagctacgaggccagcgtgcccatcagcgcccccgccggcagcttcctgctgaccatccagcccagcgaccccatcagcagaaccctgagattcagcctggtgaacgacagcgagggctggctgtgcatcgagaagttcagcggcgaggtgcacaccgcccagagcctgcagggcgcccagcccggcgacacctacaccgtgctggtggaggcccaggacaccgccctgaccctggcccccgtgcccagccagtacctgtgcacccccagacaggaccacggcctgatcgtgagcggccccagcaaggaccccgacctggccagcggccacggcccctacagcttcaccctgggccccaaccccaccgtgcagagagactggagactgcagaccctgaacggcagccacgcctacctgaccctggccctgcactgggtggagcccagagagcacatcatccccgtggtggtgagccacaacgcccagatgtggcagctgctggtgagagtgatcgtgtgcagatgcaacgtggagggccagtgcatgagaaaggtgggcagaatgaagggcatgcccaccaagctgagcgccgtgggcatcctggtgggcaccctggtggccatcggcatcttcctgatcctgatcttcacccactggaccatgagcagaaagaaggaccccgaccagcccgccgacagcgtgcccctgaaggccaccgtgtag

SEQ ID NO: 74849 - DNA, 2382 bp, synthetic construct
  misc_feature 1..2382: note = Description of Artificial Sequence: Synthetic coding sequence
  source 1..2382: mol_type = other DNA
atggtgcccgcctggctgtggctgctgtgcgtgagcgtgccccaggccctgcccaaggcccagcccgccgagctgagcgtggaggtgcccgagaactacggcggcaacttccccctgtacctgaccaagctgcccctgcccagagagggcgccgagggccagatcgtgctgagcggcgagcaggccgagatgcaggacggccacgtgctgtggggcccccagcccgtgctggtgcacgtgaaggacgagaacgaccaggtgccccacttcagccaggccatctacagagccagactgagcagaggcaccagacccggcatccccttcctgttcctggaggccagcgacagagacgagcccggcaccgccaacagcgacctgagattccacatcctgagccaggcccccgcccagcccagccccgacatgttccagctggagcccagactgggcgccctggccctgagccccaagggcagcaccagcctggaccacgccctggagagaacctaccagctgctggtgcaggtgaaggacatgggcgaccaggccagcggccaccaggccaccgccaccgtggaggtgagcatcatcgagagcacctgggtgagcctggagcccatccacctggccgagaacctgaaggtgctgtacccccaccacatggcccaggtgcactggagcggcggcgacgtgcactaccacctggagagccacccccccggccccttcgaggtgaacgccgagggcaacctgtacgtgaccagagagctggacagagaggcccaggccgagtacctgctgcaggtgagagcccagaacagccacggcgaggactacgccgcccccctggagctgcacgtgctggtgatggacgagaacgacaacgtgcccatctgcccccccagagaccccaccgtgagcatccccgagctgagcccccccggcaccgaggtgaccagactgagcgccgaggacgccgacgcccccggcagccccaacagccacgtggtgtaccagctgctgagccccgagcccgaggacggcgtggagggcagagccttccaggtggaccccaccagcggcagcgtgaccctgggcgtgctgcccctgagagccggccagaacatcctgctgctggtgctggccatggacctggccggcgccgagggcggcttcagcagcacctgcgaggtggaggtggccgtgaccgacatcaacgaccacgcccccgagttcatcaccagccagatcggccccatcagcctgcccgaggacgtggagcccggcaccctggtggccatgctgaccgccatcgacgccgacctggagcccgccttcagactgatggacttcgccatcgagagaggcgacaccgagggcaccttcggcctggactgggagcccgacagcggccacgtgagactgagactgtgcaagaacctgagctacgaggccgcccccagccacgaggtggtggtggtggtgcagagcgtggccaagctggtgggccccggccccggccccggcgccaccgccaccgtgaccgtgctggtggagagagtgatgcccccccccaagctggaccaggagagctacgaggccagcgtgcccatcagcgcccccgccggcagcttcctgctgaccatccagcccagcgaccccatcagcagaaccctgagattcagcctggtgaacgacagcgagggctggctgtgcatcgagaagttcagcggcgaggtgcacaccgcccagagcctgcagggcgcccagcccggcgacacctacaccgtgctggtggaggcccaggacaccgacgagcccagactgagcgccagcgcccccctggtgatccacttcctgaaggccccccccgcccccgccctgaccctggcccccgtgcccagccagtacctgtgcacccccagacaggaccacggcctgatcgtgagcggccccagcaaggaccccgacctggccagcggccacggcccctacagcttcaccctgggccccaaccccaccgtgcagagagactggagactgcagaccctgaacggcagccacgcctacctgaccctggccctgcactgggtggagcccagagagcacatcatccccgtggtggtgagccacaacgcccagatgtggcagctgctggtgagagtgatcgtgtgcagatgcaacgtggagggccagtgcatgagaaaggtgggcagaatgaagggcatgcccaccaagctgagcgccgtgggcatcctggtgggcaccctggtggccatcggcatcttcctgatcctgatcttcacccactggaccatgagcagaaagaaggaccccgaccagcccgccgacagcgtgcccctgaaggccaccgtgtag

SEQ ID NO: 74850 - DNA, 2499 bp, synthetic construct
  misc_feature 1..2499: note = Description of Artificial Sequence: Synthetic coding sequence
  source 1..2499: mol_type = other DNA
atgatcctgcaggcccacctgcacagcctgtgcctgctgatgctgtacctggccaccggctacggccaggagggcaagttcagcggccccctgaagcccatgaccttcagcatctacgagggccaggagcccagccagatcatcttccagttcaaggccaacccccccgccgtgaccttcgagctgaccggcgagaccgacaacatcttcgtgatcgagagagagggcctgctgtactacaacagagccctggacagagagaccagaagcacccacaacctgcaggtggccgccctggacgccaacggcatcatcgtggagggccccgtgcccatcaccatcaaggtgaaggacatcaacgacaacagacccaccttcctgcagagcaagtacgagggcagcgtgagacagaacagcagacccggcaagcccttcctgtacgtgaacgccaccgacctggacgaccccgccacccccaacggccagctgtactaccagatcgtgatccagctgcccatgatcaacaacgtgatgtacttccagatcaacaacaagaccggcgccatcagcctgaccagagagggcagccaggagctgaaccccgccaagaaccccagctacaacctggtgatcagcgtgaaggacatgggcggccagagcgagaacagcttcagcgacaccaccagcgtggacatcatcgtgaccgagaacatctggaaggcccccaagcccgtggagatggtggagaacagcaccgacccccaccccatcaagatcacccaggtgagatggaacgaccccggcgcccagtacagcctggtggacaaggagaagctgcccagattccccttcagcatcgaccaggagggcgacatctacgtgacccagcccctggacagagaggagaaggacgcctacgtgttctacgccgtggccaaggacgagtacggcaagcccctgagctaccccctggagatccacgtgaaggtgaaggacatcaacgacaacccccccacctgccccagccccgtgaccgtgttcgaggtgcaggagaacgagagactgggcaacagcatcggcaccctgaccgcccacgacagagacgaggagaacaccgccaacagcttcctgaactacagaatcgtggagcagacccccaagctgcccatggacggcctgttcctgatccagacctacgccggcatgctgcagctggccaagcagagcctgaagaagcaggacaccccccagtacaacctgaccatcgaggtgagcgacaaggacttcaagaccctgtgcttcgtgcagatcaacgtgatcgacatcaacgaccagatccccatcttcgagaagagcgactacggcaacctgaccctggccgaggacaccaacatcggcagcaccatcctgaccatccaggccaccgacgccgacgagcccttcaccggcagcagcaagatcctgtaccacatcatcaagggcgacagcgagggcagactgggcgtggacaccgacccccacaccaacaccggctacgtgatcatcaagaagcccctggacttcgagaccgccgccgtgagcaacatcgtgttcaaggccgagaaccccgagcccctggtgttcggcgtgaagtacaacgccagcagcttcgccaagttcaccctgatcgtgaccgacgtgaacgaggccccccagttcagccagcacgtgttccaggccaaggtgagcgaggacgtggccatcggcaccaaggtgggcaacgtgaccgccaaggaccccgagggcctggacatcagctacagcctgagaggcgacaccagaggctggctgaagatcgaccacgtgaccggcgagatcttcagcgtggcccccctggacagagaggccggcagcccctacagagtgcaggtggtggccaccgaggtgggcggcagcagcctgagcagcgtgagcgagttccacctgatcctgatggacgtgaacgacaacccccccagactggccaaggactacaccggcctgttcttctgccaccccctgagcgcccccggcagcctgatcttcgaggccaccgacgacgaccagcacctgttcagaggcccccacttcaccttcagcctgggcagcggcagcctgcagaacgactgggaggtgagcaagatcaacggcacccacgccagactgagcaccagacacaccgagttcgaggagagagagtacgtggtgctgatcagaatcaacgacggcggcagaccccccctggagggcatcgtgagcctgcccgtgaccttctgcagctgcgtggagggcagctgcttcagacccgccggccaccagaccggcatccccaccgtgggcatggccgtgggcatcctgctgaccaccctgctggtgatcggcatcatcctggccgtggtgttcatcagaatcaagaaggacaagggcaaggacaacgtggagagcgcccaggccagcgaggtgaagcccctgagaagctag

SEQ ID NO: 74851 - DNA, 2499 bp, synthetic construct; identical to SEQ ID NO: 74850
  misc_feature 1..2499: note = Description of Artificial Sequence: Synthetic coding sequence
  source 1..2499: mol_type = other DNA

SEQ ID NO: 74852 - DNA, 444 bp, synthetic construct
  misc_feature 1..444: note = Description of Artificial Sequence: Synthetic coding sequence
  source 1..444: mol_type = other DNA
atgatcctgcaggcccacctgcacagcctgtgcctgctgatgctgtacctggccaccggctacggccaggagggcaagttcagcggccccctgaagcccatgaccttcagcatctacgagggccaggagcccagccagatcatcttccagttcaaggccaacccccccgccgtgaccttcgagctgaccggcgagaccgacaacatcttcgtgatcgagagagagggcctgctgtactacaacagagccctggacagagagaccagaagcacccacaacctgcaggtggccgccctggacgccaacggcatcatcgtggagggccccgtgcccatcaccatcaaggtgaaggacatcaacgacaacagacccaccttcctgcagagcaagtacgagggcagcgtgagacagaacagcagacccggcaagcccttcctgtactag

SEQ ID NO: 74853 - DNA, 2373 bp, synthetic construct
  misc_feature 1..2373: note = Description of Artificial Sequence: Synthetic coding sequence
  source 1..2373: mol_type = other DNA
atgaagatcaccagcaccagctgcatctgccccgtgctggtgtgcctgtgcttcgtgcagagatgctacggcaccgcccaccacagcagcatcaaggtgatgagaaaccagaccaagcacatcgagggcgagaccgaggtgcaccacagacccaagagaggctgggtgtggaaccagttcttcgtgctggaggagcacatgggccccgacccccagtacgtgggcaagctgcacagcaacagcgacaagggcgacggcagcgtgaagtacatcctgaccggcgagggcgccggcaccatcttcatcatcgacgacaccaccggcgacatccacagcaccaagagcctggacagagagcagaagacccactacgtgctgcacgcccaggccatcgacagaagaaccaacaagcccctggagcccgagagcgagttcatcatcaaggtgcaggacatcaacgacaacgcccccaagttcaccgacggcccctacatcgtgaccgtgcccgagatgagcgacatgggcaccagcgtgctgcaggtgaccgccaccgacgccgacgaccccacctacggcaacagcgccagagtggtgtacagcatcctgcagggccagccctacttcagcgtggaccccaagaccggcgtgatcagaaccgccctgcacaacatggacagagaggccagagagcactacagcgtggtgatccaggccaaggacatggccggccaggtgggcggcctgagcggcagcaccaccgtgaacatcaccctgaccgacgtgaacgacaacccccccagattcccccagaagcactaccagctgtacgtgcccgagagcgcccaggtgggcagcgccgtgggcaagatcaaggccaacgacgccgacaccggcagcaacgccgacatgacctacagcatcatcaacggcgacggcatgggcatcttcagcatcagcaccgacaaggagaccagagagggcatcctgagcctgaagaagcccctgaactacgagaagaagaagagctacaccctgaacatcgagggcgccaacacccacctggacttcagattcagccacctgggccccttcaaggacgccaccatgctgaagatcatcgtgggcgacgtggacgagccccccctgttcagcatgcccagctacctgatggaggtgtacgagaacgccaagatcggcaccgtggtgggcaccgtgctggcccaggaccccgacagcaccaacagcctggtgagatacttcatcaactacaacgtggaggacgacagattcttcaacatcgacgccaacaccggcaccatcagaaccaccaaggtgctggacagagaggagaccccctggtacaacatcaccgtgaccgccagcgagatcgacaaccccgacctgctgagccacgtgaccgtgggcatcagagtgctggacgtgaacgacaacccccccgagctggccagagagtacgacatcatcgtgtgcgagaacagcaagcccggccaggtgatccacaccatcagcgccaccgacaaggacgacttcgccaacggccccagattcaacttcttcctggacgagagactgcccgtgaaccccaacttcaccctgaaggacaacgaggacaacaccgccagcatcctgaccagaagaagaagattcagcagaaccgtgcaggacgtgtactacctgcccatcatgatcagcgacggcggcatccccagcctgagcagcagcagcaccctgaccatcagagtgtgcgcctgcgagagagacggcagagtgagaacctgccacgccgaggccttcctgagcagcgccggcctgagcaccggcgccctgatcgccatcctgctgtgcgtgctgatcctgctggccatcgtggtgctgttcatcaccctgagaagaagcaagaaggagcccctgatcatcagcgaggaggacgtgagagagaacgtggtgacctacgacgacgagggcggcggcgaggaggacaccgaggccttcgacatcaccgccctgagaaaccccagcgccgccgaggagctgaagtacagaagagacatcagacccgaggtgaagctgacccccagacaccagaccagcagcaccctggagagcatcgacgtgcaggagttcatcaagcagagactggccgaggccgacctggaccccagcgtgcccccctacgacagcctgcagacctacgcctacgagggccagagaagcgaggccggcagcatcagcagcctggacagcgccaccacccagagcgaccaggactaccactacctgggcgactggggccccgagttcaagaagctggccgagctgtacggcgagatcgagagcgagagaaccacctag

SEQ ID NO: 74854 - DNA, 2373 bp, synthetic construct; identical to SEQ ID NO: 74853
  misc_feature 1..2373: note = Description of Artificial Sequence: Synthetic coding sequence
  source 1..2373: mol_type = other DNA

SEQ ID NO: 74855 - DNA, 1725 bp, synthetic construct
  misc_feature 1..1725: note = Description of Artificial Sequence: Synthetic coding sequence
  source 1..1725: mol_type = other DNA
atgaagatcaccagcaccagctgcatctgccccgtgctggtgtgcctgtgcttcgtgcagagatgctacggcaccgcccaccacagcagcatcaaggtgatgagaaaccagaccaagcacatcgagggcgagaccgaggtgcaccacagacccaagagaggctgggtgtggaaccagttcttcgtgctggaggagcacatgggccccgacccccagtacgtgggcaagctgcacagcaacagcgacaagggcgacggcagcgtgaagtacatcctgaccggcgagggcgccggcaccatcttcatcatcgacgacaccaccggcgacatccacagcaccaagagcctggacagagagcagaagacccactacgtgctgcacgcccaggccatcgacagaagaaccaacaagcccctggagcccgagagcgagttcatcatcaaggtgcaggacatcaacgacaacgcccccaagttcaccgacggcccctacatcgtgaccgtgcccgagatgagcgacatgggcaccagcgtgctgcaggtgaccgccaccgacgccgacgaccccacctacggcaacagcgccagagtggtgtacagcatcctgcagggccagccctacttcagcgtggaccccaagaccggcgtgatcagaaccgccctgcacaacatggacagagaggccagagagcactacagcgtggtgatccaggccaaggacatggccggccaggtgggcggcctgagcggcagcaccaccgtgaacatcaccctgaccgacgtgaacgacaacccccccagattcccccagaagcactaccagctgtacgtgcccgagagcgcccaggtgggcagcgccgtgggcaagatcaaggccaacgacgccgacaccggcagcaacgccgacatgacctacagcatcatcaacggcgacggcatgggcatcttcagcatcagcaccgacaaggagaccagagagggcatcctgagcctgaagaagcccctgaactacgagaagaagaagagctacaccctgaacatcgagggcgccaacacccacctggacttcagattcagccacctgggccccttcaaggacgccaccatgctgaagatcatcgtgggcgacgtggacgagccccccctgttcagcatgcccagctacctgatggaggtgtacgagaacgccaagatcggcaccgtggtgggcaccgtgctggcccaggaccccgacagcaccaacagcctggtgagatacttcatcaactacaacgtggaggacgacagattcttcaacatcgacgccaacaccggcaccatcagaaccaccaaggtgctggacagagaggagaccccctggtacaacatcaccgtgaccgccagcgagatcgacaaccccgacctgctgagccacgtgaccgtgggcatcagagtgctggacgtgaacgacaacccccccgagctggccagagagtacgacatcatcgtgtgcgagaacagcaagcccggccaggtgatccacaccatcagcgccaccgacaaggacgacttcgccaacggccccagattcaacttcttcctggacgagagactgcccgtgaaccccaacttcaccctgaaggacaacgaggccgccgcccccagccccagcggcttcgtgcacgccagagagatgggcgtgtgcggccccgccatgcagaagcccagctgccccagactggtgtag

SEQ ID NO: 74856 - DNA, 2373 bp, synthetic construct; identical to SEQ ID NO: 74853
  misc_feature 1..2373: note = Description of Artificial Sequence: Synthetic coding sequence
  source 1..2373: mol_type = other DNA

SEQ ID NO: 74857 - DNA, 2373 bp, synthetic construct; identical to SEQ ID NO: 74853
  misc_feature 1..2373: note = Description of Artificial Sequence: Synthetic coding sequence
  source 1..2373: mol_type = other DNA

SEQ ID NO: 74858 - DNA, 2319 bp, synthetic construct
  misc_feature 1..2319: note = Description of Artificial Sequence: Synthetic coding sequence
  source 1..2319: mol_type = other DNA
atgaactgctacctgctgctgagattcatgctgggcatccccctgctgtggccctgcctgggcgccaccgagaacagccagaccaagaaggtgaagcagcccgtgagaagccacctgagagtgaagagaggctgggtgtggaaccagttcttcgtgcccgaggagatgaacaccaccagccaccacatcggccagctgagaagcgacctggacaacggcaacaacagcttccagtacaagctgctgggcgccggcgccggcagcaccttcatcatcgacgagagaaccggcgacatctacgccatccagaagctggacagagaggagagaagcctgtacatcctgagagcccaggtgatcgacatcgccaccggcagagccgtggagcccgagagcgagttcgtgatcaaggtgagcgacatcaacgacaacgagcccaagttcctggacgagccctacgaggccatcgtgcccgagatgagccccgagggcaccctggtgatccaggtgaccgccagcgacgccgacgaccccagcagcggcaacaacgccagactgctgtacagcctgctgcagggccagccctacttcagcgtggagcccaccaccggcgtgatcagaatcagcagcaagatggacagagagctgcaggacgagtactgggtgatcatccaggccaaggacatgatcggccagcccggcgccctgagcggcaccaccagcgtgctgatcaagctgagcgacgtgaacgacaacaagcccatcttcaaggagagcctgtacagactgaccgtgagcgagagcgcccccaccggcaccagcatcggcaccatcatggcctacgacaacgacatcggcgagaacgccgagatggactacagcatcgaggaggacgacagccagaccttcgacatcatcaccaaccacgagacccaggagggcatcgtgatcctgaagaagaaggtggacttcgagcaccagaaccactacggcatcagagccaaggtgaagaaccaccacgtgcccgagcagctgatgaagtaccacaccgaggccagcaccaccttcatcaagatccaggtggaggacgtggacgagccccccctgttcctgctgccctactacgtgttcgaggtgttcgaggagaccccccagggcagcttcgtgggcgtggtgagcgccaccgaccccgacaacagaaagagccccatcagatacagcatcaccagaagcaaggtgttcaacatcaacgacaacggcaccatcaccaccagcaacagcctggacagagagatcagcgcctggtacaacctgagcatcaccgccaccgagaagtacaacatcgagcagatcagcagcatccccctgtacgtgcaggtgctgaacatcaacgaccacgcccccgagttcagccagtactacgagacctacgtgtgcgagaacgccggcagcggccaggtgatccagaccatcagcgccgtggacagagacgagagcatcgaggagcaccacttctacttcaacctgagcgtggaggacaccaacaacagcagcttcaccatcatcgacaaccaggacaacaccgccgtgatcctgaccaacagaaccggcttcaacctgcaggaggagcccgtgttctacatcagcatcctgatcgccgacaacggcatccccagcctgaccagcaccaacaccctgaccatccacgtgtgcgactgcggcgacagcggcagcacccagacctgccagtaccaggagctggtgctgagcatgggcttcaagaccgaggtgatcatcgccatcctgatctgcatcatgatcatcttcggcttcatcttcctgaccctgggcctgaagcagagaagaaagcagatcctgttccccgagaagagcgaggacttcagagagaacatcttccagtacgacgacgagggcggcggcgaggaggacaccgaggccttcgacatcgccgagctgagaagcagcaccatcatgagagagagaaagaccagaaagaccaccagcgccgagatcagaagcctgtacagacagagcctgcaggtgggccccgacagcgccatcttcagaaagttcatcctggagaagctggaggaggccaacaccgacccctgcgccccccccttcgacagcctgcagacctacgccttcgagggcaccggcagcctggccggcagcctgagcagcctggagagcgccgtgagcgaccaggacgagagctacgactacctgaacgagctgggccccagattcaagagactggcctgcatgttcggcagcgccgtgcagagcaacaactag

SEQ ID NO: 74859 - DNA, 1173 bp, synthetic construct
  misc_feature 1..1173: note = Description of Artificial Sequence: Synthetic coding sequence
  source 1..1173: mol_type = other DNA
atgaacaccaccagccaccacatcggccagctgagaagcgacctggacaacggcaacaacagcttccagtacaagctgctgggcgccggcgccggcagcaccttcatcatcgacgagagaaccggcgacatctacgccatccagaagctggacagagaggagagaagcctgtacatcctgagagcccaggtgatcgacatcgccaccggcagagccgtggagcccgagagcgagttcgtgatcaaggtgagcgacatcaacgacaacgagcccaagttcctggacgagccctacgaggccatcgtgcccgagatgagccccgagggcaccctggtgatccaggtgaccgccagcgacgccgacgaccccagcagcggcaacaacgccagactgctgtacagcctgctgcagggccagccctacttcagcgtggagcccaccaccggcgtgatcagaatcagcagcaagatggacagagagctgcaggacgagtactgggtgatcatccaggccaaggacatgatcggccagcccggcgccctgagcggcaccaccagcgtgctgatcaagctgagcgacgtgaacgacaacaagcccatcttcaaggagagcctgtacagactgaccgtgagcgagagcgcccccaccggcaccagcatcggcaccatcatggcctacgacaacgacatcggcgagaacgccgagatggactacagcatcgaggaggacgacagccagaccttcgacatcatcaccaaccacgagacccaggagggcatcgtgatcctgaagaagaaggtggacttcgagcaccagaaccactacggcatcagagccaaggtgaagaaccaccacgtgcccgagcagctgatgaagtaccacaccgaggccagcaccaccttcatcaagatccaggtggaggacgtggacgagccccccctgttcctgctgccctactacgtgttcgaggtgttcgaggagaccccccagggcagcttcgtgggcgtggtgagcgccaccgaccccgacaacagaaagagccccatcagatacagcatcaccagaagcaaggtgttcaacatcaacgacaacggcaccatcaccaccagcaacagcctggacagagagatcagcgcctggtacaacctgagcatcaccgccaccgagaagtag

SEQ ID NO: 74860 - DNA, 1473 bp, synthetic construct
  misc_feature 1..1473: note = Description of Artificial Sequence: Synthetic coding sequence
  source 1..1473: mol_type = other DNA
atgaactgctacctgctgctgagattcatgctgggcatccccctgctgtggccctgcctgggcgccaccgagaacagccagaccaagaaggtgaagcagcccgtgagaagccacctgagagtgaagagaggctgggtgtggaaccagttcttcgtgcccgaggagatgaacaccaccagccaccacatcggccagctgagaagcgacctggacaacggcaacaacagcttccagtacaagctgctgggcgccggcgccggcagcaccttcatcatcgacgagagaaccggcgacatctacgccatccagaagctggacagagaggagagaagcctgtacatcctgagagcccaggtgatcgacatcgccaccggcagagccgtggagcccgagagcgagttcgtgatcaaggtgagcgacatcaacgacaacgagcccaagttcctggacgagccctacgaggccatcgtgcccgagatgagccccgagggcaccctggtgatccaggtgaccgccagcgacgccgacgaccccagcagcggcaacaacgccagactgctgtacagcctgctgcagggccagccctacttcagcgtggagcccaccaccggcgtgatcagaatcagcagcaagatggacagagagctgcaggacgagtactgggtgatcatccaggccaaggacatgatcggccagcccggcgccctgagcggcaccaccagcgtgctgatcaagctgagcgacgtgaacgacaacaagcccatcttcaaggagagcctgtacagactgaccgtgagcgagagcgcccccaccggcaccagcatcggcaccatcatggcctacgacaacgacatcggcgagaacgccgagatggactacagcatcgaggaggacgacagccagaccttcgacatcatcaccaaccacgagacccaggagggcatcgtgatcctgaagaagaaggtggacttcgagcaccagaaccactacggcatcagagccaaggtgaagaaccaccacgtgcccgagcagctgatgaagtaccacaccgaggccagcaccaccttcatcaagatccaggtggaggacgtggacgagccccccctgttcctgctgccctactacgtgttcgaggtgttcgaggagaccccccagggcagcttcgtgggcgtggtgagcgccaccgaccccgacaacagaaagagccccatcagatacagcatcaccagaagcaaggtgttcaacatcaacgacaacggcaccatcaccaccagcaacagcctggacagagagatcagcgcctggtacaacctgagcatcaccgccaccgagaagtacaacatcgagcagatcagcagcatccccctgtacgtgcaggtgctgaacatcaacgaccacgcccccgagttcagccagtactacgagacctacgtgtgcgagaacgccggcagcggccagggcctgttcttctag

SEQ ID NO: 74861 - DNA, 2406 bp, synthetic construct
  misc_feature 1..2406: note = Description of Artificial Sequence: Synthetic coding sequence
  source 1..2406: mol_type = other DNA
atgtggaccagcggcagaatgagcaacgccaagaactggctgggcctgggcatgagcctgtacttctggggcctgatggacctgaccaccaccgtgctgagcgacacccccaccccccagggcgagctggaggccctgctgagcgacaagccccagagccaccagagaaccaagagaagctgggtgtggaaccagttcttcgtgctggaggagtacaccggcaccgaccccctgtacgtgggcaagctgcacagcgacatggacagaggcgacggcagcatcaagtacatcctgagcggcgagggcgccggcatcgtgttcaccatcgacgacaccaccggcgacatccacgccatccagagactggacagagaggagagagcccagtacaccctgagagcccaggccctggacagaagaaccggcagacccatggagcccgagagcgagttcatcatcaagatccaggacatcaacgacaacgagcccaagttcctggacggcccctacgtggccaccgtgcccgagatgagccccgtgggcaccagcgtgatccaggtgaccgccaccgacgccgacgaccccacctacggcaacagcgccagagtggtgtacagcatcctgcagggccagccctacttcagcgtggacagcaagaccggcgtgatcagaaccgccctgatgaacatggacagagaggccaaggagtactacgaggtgatcatccaggccaaggacatgggcggccagctgggcggcctggccggcaccaccaccgtgaacatcaccctgagcgacgtgaacgacaacccccccagattcccccagaagcactaccagatgagcgtgctggagagcgcccccatcagcagcaccgtgggcagagtgttcgccaaggacctggacgagggcatcaacgccgagatgaagtacaccatcgtggacggcgacggcgccgacgccttcgacatcagcaccgaccccaacttccaggtgggcatcatcaccgtgaagaagcccctgagcttcgagagcaagaagagctacaccctgaaggtggagggcgccaacccccacctggagatgagattcctgaacctgggccccttccaggacaccaccaccgtgcacatcagcgtggaggacgtggacgagccccccgtgttcgagcccggcttctacttcgtggaggtgcccgaggacgtggccatcggcaccaccatccagatcatcagcgccaaggaccccgacgtgaccaacaacagcatcagatacagcatcgacagaagcagcgaccccggcagattcttctacgtggacatcaccaccggcgccctgatgaccgccagacccctggacagagaggagttcagctggcacaacatcaccgtgctggccatggagatgaacaaccccagccaggtgggcagcgtgcccgtgaccatcaaggtgctggacgtgaacgacaacgcccccgagttccccagattctacgaggccttcgtgtgcgagaacgccaaggccggccagctgatccagaccgtgagcgccgtggaccaggacgaccccagaaacggccagcacttctactacagcctggcccccgaggccgccaacaaccccaacttcaccatcagagacaaccaggacaacaccgccagaatcctgaccagaagaagcggcttcagacagcaggagcagagcgtgttccacctgcccatcctgatcgccgacagcggccagcccgtgctgagcagcaccggcaccctgaccatccaggtgtgcagctgcgacgacgacggccacgtgatgagctgcagccccgaggcctacatgctgcccgtgagcctgagcagaggcgccctgatcgccatcctggcctgcatcttcgtgctgctggtgctggtgctgctgatcctgagcatgagaagacacagaaagcagccctacatcatcgacgacgaggagaacatccacgagaacatcgtgagatacgacgacgagggcggcggcgaggaggacaccgaggccttcgacatcgccgccatgtggaaccccagagaggcccaggccggcgccgcccccaagaccagacaggacatgctgcccgagatcgagagcctgagcagatacgtgccccagacctgcgccgtgaacagcaccgtgcacagctacgtgctggccaagctgtacgaggccgacatggacctgtgggccccccccttcgacagcctgcagacctacatgttcgagggcgacggcagcgtggccggcagcctgagcagcctgcagagcgccaccagcgacagcgagcagagcttcgacttcctgaccgactggggccccagattcagaaagctggccgagctgtacggcgccagcgagggccccgcccccctgtggtag

SEQ ID NO: 74862 - DNA, 2406 bp, synthetic construct; identical to SEQ ID NO: 74861
  misc_feature 1..2406: note = Description of Artificial Sequence: Synthetic coding sequence
  source 1..2406: mol_type = other DNA

SEQ ID NO: 74863 - DNA, 2406 bp, synthetic construct; identical to SEQ ID NO: 74861
  misc_feature 1..2406: note = Description of Artificial Sequence: Synthetic coding sequence
  source 1..2406: mol_type = other DNA

SEQ ID NO: 74864 - DNA, 2487 bp, synthetic construct
  misc_feature 1..2487: note = Description of Artificial Sequence: Synthetic coding sequence
  source 1..2487: mol_type = other DNA
atgagacccagacccgagggcagaggcctgagagccggcgtggccctgagccccgccctgctgctgctgctgctgctgccccccccccccaccctgctgggcagactgtgggccgccggcacccccagccccagcgcccccggcgccagacaggacggcgccctgggcgccggcagagtgaagagaggctgggtgtggaaccagttcttcgtggtggaggagtacaccggcaccgagcccctgtacgtgggcaagatccacagcgacagcgacgagggcgacggcgccatcaagtacaccatcagcggcgagggcgccggcaccatcttcctgatcgacgagctgaccggcgacatccacgccatggagagactggacagagagcagaagaccttctacaccctgagagcccaggccagagacagagccaccaacagactgctggagcccgagagcgagttcatcatcaaggtgcaggacatcaacgacagcgagcccagattcctgcacggcccctacatcggcagcgtggccgagctgagccccaccggcaccagcgtgatgcaggtgatggccagcgacgccgacgaccccacctacggcagcagcgccagactggtgtacagcgtgctggacggcgagcaccacttcaccgtggaccccaagaccggcgtgatcagaaccgccgtgcccgacctggacagagagagccaggagagatacgaggtggtgatccaggccaccgacatggccggccagctgggcggcctgagcggcagcaccaccgtgaccatcgtggtgaccgacgtgaacgacaacccccccagattcccccagaagatgtaccagttcagcatccaggagagcgcccccatcggcaccgccgtgggcagagtgaaggccgaggacagcgacgtgggcgagaacaccgacatgacctaccacctgaaggacgagagcagcagcggcggcgacgtgttcaaggtgaccaccgacagcgacacccaggaggccatcatcgtggtgcagaagagactggacttcgagagccagcccgtgcacaccgtgatcctggaggccctgaacaagttcgtggaccccagattcgccgacctgggcaccttcagagaccaggccatcgtgagagtggccgtgaccgacgtggacgagccccccgagttcagaccccccagcggcctgctggaggtgcaggaggacgcccaggtgggcagcctggtgggcgtggtgaccgccagagaccccgacgccgccaacagacccgtgagatacgccatcgacagagagagcgacctggaccagatcttcgacatcgacgccgacaccggcgccatcgtgaccggcaagggcctggacagagagaccgccggctggcacaacatcaccgtgctggccatggaggccgacaaccacgcccagctgagcagagccagcctgagaatcagaatcctggacgtgaacgacaacccccccgagctggccaccccctacgaggccgccgtgtgcgaggacgccaagcccggccagctgatccagaccatcagcgtggtggacagagacgagccccagggcggccacagattctacttcagactggtgcccgaggcccccagcaacccccacttcagcctgctggacatccaggacaacaccgccgccgtgcacacccagcacgtgggcttcaacagacaggagcaggacgtgttcttcctgcccatcctggtggtggacagcggcccccccaccctgagcagcaccggcaccctgaccatcagaatctgcggctgcgacagcagcggcaccatccagagctgcaacaccaccgccttcgtgatggccgccagcctgagccccggcgccctgatcgccctgctggtgtgcgtgctgatcctggtggtgctggtgctgctgatcctgaccctgagaagacaccacaagagccacctgagcagcgacgaggacgaggacatgagagacaacgtgatcaagtacaacgacgagggcggcggcgagcaggacaccgaggcctacgacatgagcgccctgagaagcctgtacgacttcggcgagctgaagggcggcgacggcggcggcagcgccggcggcggcgccggcggcggcagcggcggcggcgccggcagccccccccaggcccacctgcccagcgagagacacagcctgccccagggcccccccagccccgagcccgacttcagcgtgttcagagacttcatcagcagaaaggtggccctggccgacggcgacctgagcgtgcccccctacgacgccttccagacctacgccttcgagggcgccgacagccccgccgccagcctgagcagcctgcacagcggcagcagcggcagcgagcaggacttcgcctacctgagcagctggggccccagattcagacccctggccgccctgtacgccggccacagaggcgacgacgaggcccaggccagctag

SEQ ID NO: 74865 - DNA, 2487 bp, synthetic construct; identical to SEQ ID NO: 74864
  misc_feature 1..2487: note = Description of Artificial Sequence: Synthetic coding sequence
  source 1..2487: mol_type = other DNA

SEQ ID NO: 74866 - DNA, 2490 bp, synthetic construct
  misc_feature 1..2490: note = Description of Artificial Sequence: Synthetic coding sequence
  source 1..2490: mol_type = other DNA
atgggcctgcccagaggccccctggccagcctgctgctgctgcaggtgtgctggctgcagtgcgccgccagcgagccctgcagagccgtgttcagagaggccgaggtgaccctggaggccggcggcgccgagcaggagcccggccaggccctgggcaaggtgttcatgggctgccccggccaggagcccgccctgttcagcaccgacaacgacgacttcaccgtgagaaacggcgagaccgtgcaggagagaagaagcctgaaggagagaaaccccctgaagatcttccccagcaagagaatcctgagaagacacaagagagactgggtggtggcccccatcagcgtgcccgagaacggcaagggccccttcccccagagactgaaccagctgaagagcaacaaggacagagacaccaagatcttctacagcatcaccggccccggcgccgacagcccccccgagggcgtgttcgccgtggagaaggagaccggctggctgctgctgaacaagcccctggacagagaggagatcgccaagtacgagctgttcggccacgccgtgagcgagaacggcgccagcgtggaggaccccatgaacatcagcatcatcgtgaccgaccagaacgaccacaagcccaagttcacccaggacaccttcagaggcagcgtgctggagggcgtgctgcccggcaccagcgtgatgcaggtgaccgccaccgacgaggacgacgccatctacacctacaacggcgtggtggcctacagcatccacagccaggagcccaaggacccccacgacctgatgttcaccatccacagaagcaccggcaccatcagcgtgatcagcagcggcctggacagagagaaggtgcccgagtacaccctgaccatccaggccaccgacatggacggcgacggcagcaccaccaccgccgtggccgtggtggagatcctggacgccaacgacaacgcccccatgttcgacccccagaagtacgaggcccacgtgcccgagaacgccgtgggccacgaggtgcagagactgaccgtgaccgacctggacgcccccaacagccccgcctggagagccacctacctgatcatgggcggcgacgacggcgaccacttcaccatcaccacccaccccgagagcaaccagggcatcctgaccaccagaaagggcctggacttcgaggccaagaaccagcacaccctgtacgtggaggtgaccaacgaggcccccttcgtgctgaagctgcccaccagcaccgccaccatcgtggtgcacgtggaggacgtgaacgaggcccccgtgttcgtgccccccagcaaggtggtggaggtgcaggagggcatccccaccggcgagcccgtgtgcgtgtacaccgccgaggaccccgacaaggagaaccagaagatcagctacagaatcctgagagaccccgccggctggctggccatggaccccgacagcggccaggtgaccgccgtgggcaccctggacagagaggacgagcagttcgtgagaaacaacatctacgaggtgatggtgctggccatggacaacggcagcccccccaccaccggcaccggcaccctgctgctgaccctgatcgacgtgaacgaccacggccccgtgcccgagcccagacagatcaccatctgcaaccagagccccgtgagacaggtgctgaacatcaccgacaaggacctgagcccccacaccagccccttccaggcccagctgaccgacgacagcgacatctactggaccgccgaggtgaacgaggagggcgacaccgtggtgctgagcctgaagaagttcctgaagcaggacacctacgacgtgcacctgagcctgagcgaccacggcaacaaggagcagctgaccgtgatcagagccaccgtgtgcgactgccacggccacgtggagacctgccccggcccctggaagggcggcttcatcctgcccgtgctgggcgccgtgctggccctgctgttcctgctgctggtgctgctgctgctggtgagaaagaagagaaagatcaaggagcccctgctgctgcccgaggacgacaccagagacaacgtgttctactacggcgaggagggcggcggcgaggaggaccaggactacgacatcacccagctgcacagaggcctggaggccagacccgaggtggtgctgagaaacgacgtggcccccaccatcatccccacccccatgtacagacccagacccgccaaccccgacgagatcggcaacttcatcatcgagaacctgaaggccgccaacaccgaccccaccgcccccccctacgacaccctgctggtgttcgactacgagggcagcggcagcgacgccgccagcctgagcagcctgaccagcagcgccagcgaccaggaccaggactacgactacctgaacgagtggggcagcagattcaagaagctggccgacatgtacggcggcggcgaggacgactag

SEQ ID NO: 74867 - DNA, 2355 bp, synthetic construct
  misc_feature 1..2355: note = Description of Artificial Sequence: Synthetic coding sequence
  source 1..2355: mol_type = other DNA
atgggcctgcccagaggccccctggccagcctgctgctgctgcaggtgtgctggctgcagtgcgccgccagcgagccctgcagagccgtgttcagagaggccgaggtgaccctggaggccggcggcgccgagcaggagcccggccaggccctgggcaaggtgttcatgggctgccccggccaggagcccgccctgttcagcaccgacaacgacgacttcaccgtgagaaacggcgagaccgtgcaggagagaagaagcctgaaggagagaaaccccctgaagatcttccccagcaagagaatcctgagaagacacaagagagactgggtggtggcccccatcagcgtgcccgagaacggcaagggccccttcccccagagactgaaccagctgaagagcaacaaggacagagacaccaagatcttctacagcatcaccggccccggcgccgacagcccccccgagggcgtgttcgccgtggagaaggagaccggctggctgctgctgaacaagcccctggacagagaggagatcgccaagtacgagctgttcggccacgccgtgagcgagaacggcgccagcgtggaggaccccatgaacatcagcatcatcgtgaccgaccagaacgaccacaagcccaagttcacccaggacaccttcagaggcagcgtgctggagggcgtgctgcccggcaccagcgtgatgcaggtgaccgccaccgacgaggacgacgccatctacacctacaacggcgtggtggcctacagcatccacagccaggagcccaaggacccccacgacctgatgttcaccatccacagaagcaccggcaccatcagcgtgatcagcagcggcctggacagagagaaggtgcccgagtacaccctgaccatccaggccaccgacatggacggcgacggcagcaccaccaccgccgtggccgtggtggagatcctggacgccaacgacaacgcccccatgttcgacccccagaagtacgaggcccacgtgcccgagaacgccgtgggccacgaggtgcagagactgaccgtgaccgacctggacgcccccaacagccccgcctggagagccacctacctgatcatgggcggcgacgacggcgaccacttcaccatcaccacccaccccgagagcaaccagggcatcctgaccaccagaaagggcctggacttcgaggccaagaaccagcacaccctgtacgtggaggtgaccaacgaggcccccttcgtgctgaagctgcccaccagcaccgccaccatcgtggtgcacgtggaggacgtgaacgaggcccccgtgttcgtgccccccagcaaggtggtggaggtgcaggagggcatccccaccggcgagcccgtgtgcgtgtacaccgccgaggaccccgacaaggagaaccagaagatcagctacagaatcctgagagaccccgccggctggctggccatggaccccgacagcggccaggtgaccgccgtgggcaccctggacagagaggacgagcagttcgtgagaaacaacatctacgaggtgatggtgctggccatggacaacggcagcccccccaccaccggcaccggcaccctgctgctgaccctgatcgacgtgaacgaccacggccccgtgcccgagcccagacagatcaccatctgcaaccagagccccgtgagacaggtgctgaacatcaccgacaaggacctgagcccccacaccagccccttccaggcccagctgaccgacgacagcgacatctactggaccgccgaggtgaacgaggagggcgacaccgtggtgctgagcctgaagaagttcctgaagcaggacacctacgacgtgcacctgagcctgagcgaccacggcaacaaggagcagctgaccgtgatcagagccaccgtgtgcgactgccacggccacgtggagacctgccccggcccctggaagggcggcttcatcctgcccgtgctgggcgccgtgctggccctgctgttcctgctgctggtgctgctgctgctggtgagaaagaagagaaagatcaaggagcccctgctgctgcccgaggacgacaccagagacaacgtgttctactacggcgaggagggcggcggcgaggaggaccaggactacgacatcacccagctgcacagaggcctggaggccagacccgaggtggtgctgagaaacgacgtggcccccaccatcatccccacccccatgtacagacccagacccgccaaccccgacgagatcggcaacttcatcatcgagggcagaggcgagagaggcagccagagaggcaacggcggcctgcagctggccagaggcagaaccagaagaagctag

SEQ ID NO: 74868 - DNA, 2325 bp, synthetic construct
  misc_feature 1..2325: note = Description of Artificial Sequence: Synthetic coding sequence
  source 1..2325: mol_type = other DNA
atgggctgccccggccaggagcccgccctgttcagcaccgacaacgacgacttcaccgtgagaaacggcgagaccgtgcaggagagaagaagcctgaaggagagaaaccccctgaagatcttccccagcaagagaatcctgagaagacacaagagagactgggtggtggcccccatcagcgtgcccgagaacggcaagggccccttcccccagagactgaaccagctgaagagcaacaaggacagagacaccaagatcttctacagcatcaccggccccggcgccgacagcccccccgagggcgtgttcgccgtggagaaggagaccggctggctgctgctgaacaagcccctggacagagaggagatcgccaagtacgagctgttcggccacgccgtgagcgagaacggcgccagcgtggaggaccccatgaacatcagcatcatcgtgaccgaccagaacgaccacaagcccaagttcacccaggacaccttcagaggcagcgtgctggagggcgtgctgcccggcaccagcgtgatgcaggtgaccgccaccgacgaggacgacgccatctacacctacaacggcgtggtggcctacagcatccacagccaggagcccaaggacccccacgacctgatgttcaccatccacagaagcaccggcaccatcagcgtgatcagcagcggcctggacagagagaaggtgcccgagtacaccctgaccatccaggccaccgacatggacggcgacggcagcaccaccaccgccgtggccgtggtggagatcctggacgccaacgacaacgcccccatgttcgacccccagaagtacgaggcccacgtgcccgagaacgccgtgggccacgaggtgcagagactgaccgtgaccgacctggacgcccccaacagccccgcctggagagccacctacctgatcatgggcggcgacgacggcgaccacttcaccatcaccacccaccccgagagcaaccagggcatcctgaccaccagaaagggcctggacttcgaggccaagaaccagcacaccctgtacgtggaggtgaccaacgaggcccccttcgtgctgaagctgcccaccagcaccgccaccatcgtggtgcacgtggaggacgtgaacgaggcccccgtgttcgtgccccccagcaaggtggtggaggtgcaggagggcatccccaccggcgagcccgtgtgcgtgtacaccgccgaggaccccgacaaggagaaccagaagatcagctacagaatcctgagagaccccgccggctggctggccatggaccccgacagcggccaggtgaccgccgtgggcaccctggacagagaggacgagcagttcgtgagaaacaacatctacgaggtgatggtgctggccatggacaacggcagcccccccaccaccggcaccggcaccctgctgctgaccctgatcgacgtgaacgaccacggccccgtgcccgagcccagacagatcaccatctgcaaccagagccccgtgagacaggtgctgaacatcaccgacaaggacctgagcccccacaccagccccttccaggcccagctgaccgacgacagcgacatctactggaccgccgaggtgaacgaggagggcgacaccgtggtgctgagcctgaagaagttcctgaagcaggacacctacgacgtgcacctgagcctgagcgaccacggcaacaaggagcagctgaccgtgatcagagccaccgtgtgcgactgccacggccacgtggagacctgccccggcccctggaagggcggcttcatcctgcccgtgctgggcgccgtgctggccctgctgttcctgctgctggtgctgctgctgctggtgagaaagaagagaaagatcaaggagcccctgctgctgcccgaggacgacaccagagacaacgtgttctactacggcgaggagggcggcggcgaggaggaccaggactacgacatcacccagctgcacagaggcctggaggccagacccgaggtggtgctgagaaacgacgtggcccccaccatcatccccacccccatgtacagacccagacccgccaaccccgacgagatcggcaacttcatcatcgagaacctgaaggccgccaacaccgaccccaccgcccccccctacgacaccctgctggtgttcgactacgagggcagcggcagcgacgccgccagcctgagcagcctgaccagcagcgccagcgaccaggaccaggactacgactacctgaacgagtggggcagcagattcaagaagctggccgacatgtacggcggcggcgaggacgactag

SEQ ID NO: 74869 - DNA, 2751 bp, synthetic construct
  misc_feature 1..2751: note = Description of Artificial Sequence: Synthetic coding sequence
  source 1..2751: mol_type = other DNA
atgaccgccggcgccggcgtgctgctgctgctgctgagcctgagcggcgccctgagagcccacaacgaggacctgaccaccagagagacctgcaaggccggcttcagcgaggacgactacaccgccctgatcagccagaacatcctggagggcgagaagctgctgcaggtgaagttcagcagctgcgtgggcaccaagggcacccagtacgagaccaacagcatggacttcaaggtgggcgccgacggcaccgtgttcgccaccagagagctgcaggtgcccagcgagcaggtggccttcaccgtgaccgcctgggacagccagaccgccgagaagtgggacgccgtggtgagactgctggtggcccagaccagcagcccccacagcggccacaagccccagaagggcaagaaggtggtggccctggaccccagccccccccccaaggacaccctgctgccctggccccagcaccagaacgccaacggcctgagaagaagaaagagagactgggtgatcccccccatcaacgtgcccgagaacagcagaggccccttcccccagcagctggtgagaatcagaagcgacaaggacaacgacatccccatcagatacagcatcaccggcgtgggcgccgaccagccccccatggaggtgttcagcatcgacagcatgagcggcagaatgtacgtgaccagacccatggacagagaggagcacgccagctaccacctgagagcccacgccgtggacatgaacggcaacaaggtggagaaccccatcgacctgtacatctacgtgatcgacatgaacgacaacagacccgagttcatcaaccaggtgtacaacggcagcgtggacgagggcagcaagcccggcacctacgtgatgaccgtgaccgccaacgacgccgacgacagcaccaccgccaacggcatggtgagatacagaatcgtgacccagaccccccagagccccagccagaacatgttcaccatcaacagcgagaccggcgacatcgtgaccgtggccgccggcctggacagagagaaggtgcagcagtacaccgtgatcgtgcaggccaccgacatggagggcaacctgaactacggcctgagcaacaccgccaccgccatcatcaccgtgaccgacgtgaacgacaacccccccgagttcaccgccagcaccttcgccggcgaggtgcccgagaacagagtggagaccgtggtggccaacctgaccgtgatggacagagaccagccccacagccccaactggaacgccgtgtacagaatcatcagcggcgaccccagcggccacttcagcgtgagaaccgaccccgtgaccaacgagggcatggtgaccgtggtgaaggccgtggactacgagctgaacagagccttcatgctgaccgtgatggtgagcaaccaggcccccctggccagcggcatccagatgagcttccagagcaccgccggcgtgaccatcagcatcatggacatcaacgaggccccctacttccccagcaaccacaagctgatcagactggaggagggcgtgccccccggcaccgtgctgaccaccttcagcgccgtggaccccgacagattcatgcagcaggccgtgagatacagcaagctgagcgaccccgccagctggctgcacatcaacgccaccaacggccagatcaccaccgccgccgtgctggacagagagagcctgtacaccaagaacaacgtgtacgaggccaccttcctggccgccgacaacggcatcccccccgccagcggcaccggcaccctgcagatctacctgatcgacatcaacgacaacgcccccgagctgctgcccaaggaggcccagatctgcgagaagcccaacctgaacgccatcaacatcaccgccgccgacgccgacgtggaccccaacatcggcccctacgtgttcgagctgcccttcgtgcccgccgccgtgagaaagaactggaccatcaccagactgaacggcgactacgcccagctgagcctgagaatcctgtacctggaggccggcatgtacgacgtgcccatcatcgtgaccgacagcggcaacccccccctgagcaacaccagcatcatcaaggtgaaggtgtgcccctgcgacgacaacggcgactgcaccaccatcggcgccgtggccgccgccggcctgggcaccggcgccatcgtggccatcctgatctgcatcctgatcctgctgaccatggtgctgctgttcgtgatgtggatgaagagaagagagaaggagagacacaccaagcagctgctgatcgaccccgaggacgacgtgagagacaacatcctgaagtacgacgaggagggcggcggcgaggaggaccaggactacgacctgagccagctgcagcagcccgaggccatgggccacgtgcccagcaaggcccccggcgtgagaagagtggacgagagacccgtgggcgccgagccccagtaccccatcagacccatggtgccccaccccggcgacatcggcgacttcatcaacgagggcctgagagccgccgacaacgaccccaccgcccccccctacgacagcctgctggtgttcgactacgagggcagcggcagcaccgccggcagcgtgagcagcctgaacagcagcagcagcggcgaccaggactacgactacctgaacgactggggccccagattcaagaagctggccgacatgtacggcggcggcgaggaggactag

SEQ ID NO: 74870 - DNA, 2475 bp, synthetic construct
  misc_feature 1..2475: note = Description of Artificial Sequence: Synthetic coding sequence
  source 1..2475: mol_type = other DNA
atgcccaagagcaccggcatgctgcacggcggcagagagaacgccggcgtgaagttcagcagctgcgtgggcaccaagggcacccagtacgagaccagcagcccccacagcggccacaagccccagaagggcaagaaggtggtggccctggaccccagccccccccccaaggacaccctgctgccctggccccagcaccagaacgccaacggcctgagaagaagaaagagagactgggtgatcccccccatcaacgtgcccgagaacagcagaggccccttcccccagcagctggtgagaatcagaagcgacaaggacaacgacatccccatcagatacagcatcaccggcgtgggcgccgaccagccccccatggaggtgttcagcatcgacagcatgagcggcagaatgtacgtgaccagacccatggacagagaggagcacgccagctaccacctgagagcccacgccgtggacatgaacggcaacaaggtggagaaccccatcgacctgtacatctacgtgatcgacatgaacgacaacagacccgagttcatcaaccaggtgtacaacggcagcgtggacgagggcagcaagcccggcacctacgtgatgaccgtgaccgccaacgacgccgacgacagcaccaccgccaacggcatggtgagatacagaatcgtgacccagaccccccagagccccagccagaacatgttcaccatcaacagcgagaccggcgacatcgtgaccgtggccgccggcctggacagagagaaggtgcagcagtacaccgtgatcgtgcaggccaccgacatggagggcaacctgaactacggcctgagcaacaccgccaccgccatcatcaccgtgaccgacgtgaacgacaacccccccgagttcaccgccagcaccttcgccggcgaggtgcccgagaacagagtggagaccgtggtggccaacctgaccgtgatggacagagaccagccccacagccccaactggaacgccgtgtacagaatcatcagcggcgaccccagcggccacttcagcgtgagaaccgaccccgtgaccaacgagggcatggtgaccgtggtgaaggccgtggactacgagctgaacagagccttcatgctgaccgtgatggtgagcaaccaggcccccctggccagcggcatccagatgagcttccagagcaccgccggcgtgaccatcagcatcatggacatcaacgaggccccctacttccccagcaaccacaagctgatcagactggaggagggcgtgccccccggcaccgtgctgaccaccttcagcgccgtggaccccgacagattcatgcagcaggccgtgagatacagcaagctgagcgaccccgccagctggctgcacatcaacgccaccaacggccagatcaccaccgccgccgtgctggacagagagagcctgtacaccaagaacaacgtgtacgaggccaccttcctggccgccgacaacggcatcccccccgccagcggcaccggcaccctgcagatctacctgatcgacatcaacgacaacgcccccgagctgctgcccaaggaggcccagatctgcgagaagcccaacctgaacgccatcaacatcaccgccgccgacgccgacgtggaccccaacatcggcccctacgtgttcgagctgcccttcgtgcccgccgccgtgagaaagaactggaccatcaccagactgaacggcgactacgcccagctgagcctgagaatcctgtacctggaggccggcatgtacgacgtgcccatcatcgtgaccgacagcggcaacccccccctgagcaacaccagcatcatcaaggtgaaggtgtgcccctgcgacgacaacggcgactgcaccaccatcggcgccgtggccgccgccggcctgggcaccggcgccatcgtggccatcctgatctgcatcctgatcctgctgaccatggtgctgctgttcgtgatgtggatgaagagaagagagaaggagagacacaccaagcagctgctgatcgaccccgaggacgacgtgagagacaacatcctgaagtacgacgaggagggcggcggcgaggaggaccaggactacgacctgagccagctgcagcagcccgaggccatgggccacgtgcccagcaaggcccccggcgtgagaagagtggacgagagacccgtgggcgccgagccccagtaccccatcagacccatggtgccccaccccggcgacatcggcgacttcatcaacgagggcctgagagccgccgacaacgaccccaccgcccccccctacgacagcctgctggtgttcgactacgagggcagcggcagcaccgccggcagcgtgagcagcctgaacagcagcagcagcggcgaccaggactacgactacctgaacgactggggccccagattcaagaagctggccgacatgtacggcggcggcgaggaggactag

SEQ ID NO: 74871 - DNA, 2529 bp, synthetic construct
  misc_feature 1..2529: note = Description of Artificial Sequence: Synthetic coding sequence
  source 1..2529: mol_type = other DNA
atggacttcaaggtgggcgccgacggcaccgtgttcgccaccagagagctgcaggtgcccagcgagcaggtggccttcaccgtgaccgcctgggacagccagaccgccgagaagtgggacgccgtggtgagactgctggtggcccagaccagcagcccccacagcggccacaagccccagaagggcaagaaggtggtggccctggaccccagccccccccccaaggacaccctgctgccctggccccagcaccagaacgccaacggcctgagaagaagaaagagagactgggtgatcccccccatcaacgtgcccgagaacagcagaggccccttcccccagcagctggtgagaatcagaagcgacaaggacaacgacatccccatcagatacagcatcaccggcgtgggcgccgaccagccccccatggaggtgttcagcatcgacagcatgagcggcagaatgtacgtgaccagacccatggacagagaggagcacgccagctaccacctgagagcccacgccgtggacatgaacggcaacaaggtggagaaccccatcgacctgtacatctacgtgatcgacatgaacgacaacagacccgagttcatcaaccaggtgtacaacggcagcgtggacgagggcagcaagcccggcacctacgtgatgaccgtgaccgccaacgacgccgacgacagcaccaccgccaacggcatggtgagatacagaatcgtgacccagaccccccagagccccagccagaacatgttcaccatcaacagcgagaccggcgacatcgtgaccgtggccgccggcctggacagagagaaggtgcagcagtacaccgtgatcgtgcaggccaccgacatggagggcaacctgaactacggcctgagcaacaccgccaccgccatcatcaccgtgaccgacgtgaacgacaacccccccgagttcaccgccagcaccttcgccggcgaggtgcccgagaacagagtggagaccgtggtggccaacctgaccgtgatggacagagaccagccccacagccccaactggaacgccgtgtacagaatcatcagcggcgaccccagcggccacttcagcgtgagaaccgaccccgtgaccaacgagggcatggtgaccgtggtgaaggccgtggactacgagctgaacagagccttcatgctgaccgtgatggtgagcaaccaggcccccctggccagcggcatccagatgagcttccagagcaccgccggcgtgaccatcagcatcatggacatcaacgaggccccctacttccccagcaaccacaagctgatcagactggaggagggcgtgccccccggcaccgtgctgaccaccttcagcgccgtggaccccgacagattcatgcagcaggccgtgagatacagcaagctgagcgaccccgccagctggctgcacatcaacgccaccaacggccagatcaccaccgccgccgtgctggacagagagagcctgtacaccaagaacaacgtgtacgaggccaccttcctggccgccgacaacggcatcccccccgccagcggcaccggcaccctgcagatctacctgatcgacatcaacgacaacgcccccgagctgctgcccaaggaggcccagatctgcgagaagcccaacctgaacgccatcaacatcaccgccgccgacgccgacgtggaccccaacatcggcccctacgtgttcgagctgcccttcgtgcccgccgccgtgagaaagaactggaccatcaccagactgaacggcgactacgcccagctgagcctgagaatcctgtacctggaggccggcatgtacgacgtgcccatcatcgtgaccgacagcggcaacccccccctgagcaacaccagcatcatcaaggtgaaggtgtgcccctgcgacgacaacggcgactgcaccaccatcggcgccgtggccgccgccggcctgggcaccggcgccatcgtggccatcctgatctgcatcctgatcctgctgaccatggtgctgctgttcgtgatgtggatgaagagaagagagaaggagagacacaccaagcagctgctgatcgaccccgaggacgacgtgagagacaacatcctgaagtacgacgaggagggcggcggcgaggaggaccaggactacgacctgagccagctgcagcagcccgaggccatgggccacgtgcccagcaaggcccccggcgtgagaagagtggacgagagacccgtgggcgccgagccccagtaccccatcagacccatggtgccccaccccggcgacatcggcgacttcatcaacgagggcctgagagccgccgacaacgaccccaccgcccccccctacgacagcctgctggtgttcgactacgagggcagcggcagcaccgccggcagcgtgagcagcctgaacagcagcagcagcggcgaccaggactacgactacctgaacgactggggccccagattcaagaagctggccgacatgtacggcggcggcgaggaggactag

SEQ ID NO: 74872 - DNA, 2358 bp, synthetic construct
  misc_feature 1..2358: note = Description of Artificial Sequence: Synthetic coding sequence
  source 1..2358: mol_type = other DNA
atgaagctgggcaaggtggagttctgccacttcctgcagctgatcgccctgttcctgtgcttcagcggcatgagccaggccgagctgagcagaagcagaagcaagccctacttccagagcggcagaagcagaaccaagagaagctgggtgtggaaccagttcttcgtgctggaggagtacatgggcagcgaccccctgtacgtgggcaagctgcacagcgacgtggacaagggcgacggcagcatcaagtacatcctgagcggcgagggcgccagcagcatcttcatcatcgacgagaacaccggcgacatccacgccaccaagagactggacagagaggagcaggcctactacaccctgagagcccaggccctggacagactgaccaacaagcccgtggagcccgagagcgagttcgtgatcaagatccaggacatcaacgacaacgagcccaagttcctggacggcccctacaccgccggcgtgcccgagatgagccccgtgggcaccagcgtggtgcaggtgaccgccaccgacgccgacgaccccacctacggcaacagcgccagagtggtgtacagcatcctgcagggccagccctacttcagcgtggagcccaagaccggcgtgatcaagaccgccctgcccaacatggacagagaggccaaggaccagtacctgctggtgatccaggccaaggacatggtgggccagaacggcggcctgagcggcaccaccagcgtgaccgtgaccctgaccgacgtgaacgacaacccccccagattccccagaagaagctaccagtacaacgtgcccgagagcctgcccgtggccagcgtggtggccagaatcaaggccgccgacgccgacatcggcgccaacgccgagatggagtacaagatcgtggacggcgacggcctgggcatcttcaagatcagcgtggacaaggagacccaggagggcatcatcaccatccagaaggagctggacttcgaggccaagaccagctacaccctgagaatcgaggccgccaacaaggacgccgaccccagattcctgagcctgggccccttcagcgacaccaccaccgtgaagatcatcgtggaggacgtggacgagccccccgtgttcagcagccccctgtaccccatggaggtgagcgaggccacccaggtgggcaacatcatcggcaccgtggccgcccacgaccccgacagcagcaacagccccgtgagatacagcatcgacagaaacaccgacctggagagatacttcaacatcgacgccaacagcggcgtgatcaccaccgccaagagcctggacagagagaccaacgccatccacaacatcaccgtgctggccatggagagccagaaccccagccaggtgggcagaggctacgtggccatcaccatcctggacatcaacgacaacgcccccgagttcgccatggactacgagaccaccgtgtgcgagaacgcccagcccggccaggtgatccagaagatcagcgccgtggacaaggacgagcccagcaacggccaccagttctacttcagcctgaccaccgacgccaccaacaaccacaacttcagcctgaaggacaacaaggacaacaccgccagcatcctgaccagaagaaacggcttcagaagacaggagcagagcgtgtactacctgcccatcttcatcgtggacagcggcagccccagcctgagcagcaccaacaccctgaccatcagagtgtgcgactgcgacgccgacggcgtggcccagacctgcaacgccgaggcctacgtgctgcccgccggcctgagcaccggcgccctgatcgccatcctggcctgcgtgctgaccctgctggtgctgatcctgctgatcgtgaccatgagaagaagaaagaaggagcccctgatcttcgacgaggagagagacatcagagagaacatcgtgagatacgacgacgagggcggcggcgaggaggacaccgaggccttcgacatggccgccctgagaaacctgaacgtgatcagagacaccaagaccagaagagacgtgacccccgagatccagttcctgagcagacccgccttcaagagcatccccgacaacgtgatcttcagagagttcatctgggagagactgaaggaggccgacgtggaccccggcgcccccccctacgacagcctgcagacctacgccttcgagggcaacggcagcgtggccgagagcctgagcagcctggacagcatcagcagcaacagcgaccagaactacgactacctgagcgactggggccccagattcaagagactggccgacatgtacggcaccggccaggagagcctgtacagctag

SEQ ID NO: 74873 - DNA, 2358 bp, synthetic construct; identical to SEQ ID NO: 74872
  misc_feature 1..2358: note = Description of Artificial Sequence: Synthetic coding sequence
  source 1..2358: mol_type = other DNA

SEQ ID NO: 74874 - DNA, 2358 bp, synthetic construct; identical to SEQ ID NO: 74872
  misc_feature 1..2358: note = Description of Artificial Sequence: Synthetic coding sequence
  source 1..2358: mol_type = other DNA

SEQ ID NO: 74875 - DNA, 1893 bp, synthetic construct
  misc_feature 1..1893: note = Description of Artificial Sequence: Synthetic coding sequence
  source 1..1893: mol_type = other DNA
atgaagctgggcaaggtggagttctgccacttcctgcagctgatcgccctgttcctgtgcttcagcggcatgagccaggccgagctgagcagaagcagaagcaagccctacttccagagcggcagaagcagaaccaagagaagctgggtgtggaaccagttcttcgtgctggaggagtacatgggcagcgaccccctgtacgtgggcaagctgcacagcgacgtggacaagggcgacggcagcatcaagtacatcctgagcggcgagggcgccagcagcatcttcatcatcgacgagaacaccggcgacatccacgccaccaagagactggacagagaggagcaggcctactacaccctgagagcccaggccctggacagactgaccaacaagcccgtggagcccgagagcgagttcgtgatcaagatccaggacatcaacgacaacgagcccaagttcctggacggcccctacaccgccggcgtgcccgagatgagccccgtgggcaccagcgtggtgcaggtgaccgccaccgacgccgacgaccccacctacggcaacagcgccagagtggtgtacagcatcctgcagggccagccctacttcagcgtggagcccaagaccggcgtgatcaagaccgccctgcccaacatggacagagaggccaaggaccagtacctgctggtgatccaggccaaggacatggtgggccagaacggcggcctgagcggcaccaccagcgtgaccgtgaccctgaccgacgtgaacgacaacccccccagattccccagaagaagctaccagtacaacgtgcccgagagcctgcccgtggccagcgtggtggccagaatcaaggccgccgacgccgacatcggcgccaacgccgagatggagtacaagatcgtggacggcgacggcctgggcatcttcaagatcagcgtggacaaggagacccaggagggcatcatcaccatccagaaggagctggacttcgaggccaagaccagctacaccctgagaatcgaggccgccaacaaggacgccgaccccagattcctgagcctgggccccttcagcgacaccaccaccgtgaagatcatcgtggaggacgtggacgagccccccgtgttcagcagccccctgtaccccatggaggtgagcgaggccacccaggtgggcaacatcatcggcaccgtggccgcccacgaccccgacagcagcaacagccccgtgagatacagcatcgacagaaacaccgacctggagagatacttcaacatcgacgccaacagcggcgtgatcaccaccgccaagagcctggacagagagaccaacgccatccacaacatcaccgtgctggccatggagagccagaaccccagccaggtgggcagaggctacgtggccatcaccatcctggacatcaacgacaacgcccccgagttcgccatggactacgagaccaccgtgtgcgagaacgcccagcccggccaggtgatccagaagatcagcgccgtggacaaggacgagcccagcaacggccaccagttctacttcagcctgaccaccgacgccaccaacaaccacaacttcagcctgaaggacaacaaggacaacaccgccagcatcctgaccagaagaaacggcttcagaagacaggagcagagcgtgtactacctgcccatcttcatcgtggacagcggcagccccagcctgagcagcaccaacaccctgaccatcagagtgtgcgactgcgacgccgacggcgtggcccagacctgcaacgccgaggcctacgtgctgcccgccggcctgagcaccggcgccctgatcgccatcctggcctgcgtgctgaccctgctgggcagatactgcttccagggcctgctgtag

SEQ ID NO: 74876 - DNA, 2400 bp, synthetic construct
  misc_feature 1..2400: note = Description of Artificial Sequence: Synthetic coding sequence
  source 1..2400: mol_type = other DNA
atgcccgagagactggccgagatgctgctggacctgtggacccccctgatcatcctgtggatcaccctgcccccctgcatctacatggcccccatgaaccagagccaggtgctgatgagcggcagccccctggagctgaacagcctgggcgaggagcagagaatcctgaacagaagcaagagaggctgggtgtggaaccagatgttcgtgctggaggagttcagcggccccgagcccatcctggtgggcagactgcacaccgacctggaccccggcagcaagaagatcaagtacatcctgagcggcgacggcgccggcaccatcttccagatcaacgacgtgaccggcgacatccacgccatcaagagactggacagagaggagaaggccgagtacaccctgaccgcccaggccgtggactgggagaccagcaagcccctggagccccccagcgagttcatcatcaaggtgcaggacatcaacgacaacgcccccgagttcctgaacggcccctaccacgccaccgtgcccgagatgagcatcctgggcaccagcgtgaccaacgtgaccgccaccgacgccgacgaccccgtgtacggcaacagcgccaagctggtgtacagcatcctggagggccagccctacttcagcatcgagcccgagaccgccatcatcaagaccgccctgcccaacatggacagagaggccaaggaggagtacctggtggtgatccaggccaaggacatgggcggccacagcggcggcctgagcggcaccaccaccctgaccgtgaccctgaccgacgtgaacgacaacccccccaagttcgcccagagcctgtaccacttcagcgtgcccgaggacgtggtgctgggcaccgccatcggcagagtgaaggccaacgaccaggacatcggcgagaacgcccagagcagctacgacatcatcgacggcgacggcaccgccctgttcgagatcaccagcgacgcccaggcccaggacggcatcatcagactgagaaagcccctggacttcgagaccaagaagagctacaccctgaaggtggaggccgccaacgtgcacatcgaccccagattcagcggcagaggccccttcaaggacaccgccaccgtgaagatcgtggtggaggacgccgacgagccccccgtgttcagcagccccacctacctgctggaggtgcacgagaacgccgccctgaacagcgtgatcggccaggtgaccgccagagaccccgacatcaccagcagccccatcagattcagcatcgacagacacaccgacctggagagacagttcaacatcaacgccgacgacggcaagatcaccctggccacccccctggacagagagctgagcgtgtggcacaacatcaccatcatcgccaccgagatcagaaaccacagccagatcagcagagtgcccgtggccatcaaggtgctggacgtgaacgacaacgcccccgagttcgccagcgagtacgaggccttcctgtgcgagaacggcaagcccggccaggtgatccagaccgtgagcgccatggacaaggacgaccccaagaacggccactacttcctgtacagcctgctgcccgagatggtgaacaaccccaacttcaccatcaagaagaacgaggacaacagcctgagcatcctggccaagcacaacggcttcaacagacagaagcaggaggtgtacctgctgcccatcatcatcagcgacagcggcaacccccccctgagcagcaccagcaccctgaccatcagagtgtgcggctgcagcaacgacggcgtggtgcagagctgcaacgtggaggcctacgtgctgcccatcggcctgagcatgggcgccctgatcgccatcctggcctgcatcatcctgctgctggtgatcgtggtgctgttcgtgaccctgagaagacacaagaacgagcccctgatcatcaaggacgacgaggacgtgagagagaacatcatcagatacgacgacgagggcggcggcgaggaggacaccgaggccttcgacatcgccaccctgcagaaccccgacggcatcaacggcttcctgcccagaaaggacatcaagcccgacctgcagttcatgcccagacagggcctggcccccgtgcccaacggcgtggacgtggacgagttcatcaacgtgagactgcacgaggccgacaacgaccccaccgcccccccctacgacagcatccagatctacggctacgagggcagaggcagcgtggccggcagcctgagcagcctggagagcaccaccagcgacagcgaccagaacttcgactacctgagcgactggggccccagattcaagagactgggcgagctgtacagcgtgggcgagagcgacaaggagacctag

SEQ ID NO: 74877 - DNA, 2400 bp, synthetic construct; identical to SEQ ID NO: 74876
  misc_feature 1..2400: note = Description of Artificial Sequence: Synthetic coding sequence
  source 1..2400: mol_type = other DNA

SEQ ID NO: 74878 - DNA, 795 bp, synthetic construct
  misc_feature 1..795: note = Description of Artificial Sequence: Synthetic coding sequence
  source 1..795: mol_type = other DNA
atgaccaagttcagcagcttcagcctgttcttcctgatcgtgggcgcctacatgacccacgtgtgcttcaacatggagatcatcggcggcaaggaggtgagcccccacagcagacccttcatggccagcatccagtacggcggccaccacgtgtgcggcggcgtgctgatcgacccccagtgggtgctgaccgccgcccactgccagtacagattcaccaagggccagagccccaccgtggtgctgggcgcccacagcctgagcaagaacgaggccagcaagcagaccctggagatcaagaagttcatccccttcagcagagtgaccagcgacccccagagcaacgacatcatgctggtgaagctgcagaccgccgccaagctgaacaagcacgtgaagatgctgcacatcagaagcaagaccagcctgagaagcggcaccaagtgcaaggtgaccggctggggcgccaccgaccccgacagcctgagacccagcgacaccctgagagaggtgaccgtgaccgtgctgagcagaaagctgtgcaacagccagagctactacaacggcgaccccttcatcaccaaggacatggtgtgcgccggcgacgccaagggccagaaggacagctgcaagggcgacagcggcggccccctgatctgcaagggcgtgttccacgccatcgtgagcggcggccacgagtgcggcgtggccaccaagcccggcatctacaccctgctgaccaagaagtaccagacctggatcaagagcaacctggtgcccccccacaccaactag

SEQ ID NO: 74879 - DNA, 246 bp, synthetic construct
  misc_feature 1..246: note = Description of Artificial Sequence: Synthetic coding sequence
  source 1..246: mol_type = other DNA
atgagaacctaccactacatccccctgttcatctggacctacatgttccacaccgtggacaccatcctgctgcaggagaagcccaacagctacctgagcagcaagaagatcgccggcctgaccaaggacgacggcaagatgctgagaagaaccaagagaggctggatgtggaaccagttcttcctgctggaggagtacaccggcaccgacacccagtacgtgggcaagctgcacaccgaccagtag

SEQ ID NO: 74880 - DNA, 399 bp, synthetic construct
  misc_feature 1..399: note = Description of Artificial Sequence: Synthetic coding sequence
  source 1..399: mol_type = other DNA
atgagaacctaccactacatccccctgttcatctggacctacatgttccacaccgtggacaccatcctgctgcaggagaagcccaacagctacctgagcagcaagaagatcgccggcctgaccaaggacgacggcaagatgctgagaagaaccaagagaggctggatgtggaaccagttcttcctgctggaggagtacaccggcaccgacacccagtacgtgggcaagctgcacaccgaccaggacaagggcgacggcaacctgaagtacatcctgaccggcgacggcgccggcagcctgttcgtgatcgacgagaacaccggcgacatccacgccgccaagaagctggacagagaggagaagagcctgtacatcctgagagccaaggccatcgactag

SEQ ID NO: 74881 - DNA, 9045 bp, synthetic construct
  misc_feature 1..9045: note = Description of Artificial Sequence: Synthetic coding sequence
  source 1..9045: mol_type = other DNA
atggcccccccccccccccccgtgctgcccgtgctgctgctgctggccgccgccgccgccctgcccgccatgggcctgagagccgccgcctgggagcccagagtgcccggcggcaccagagccttcgccctgagacccggctgcacctacgccgtgggcgccgcctgcacccccagagcccccagagagctgctggacgtgggcagagacggcagactggccggcagaagaagagtgagcggcgccggcagacccctgcccctgcaggtgagactggtggccagaagcgcccccaccgccctgagcagaagactgagagccagaacccacctgcccggctgcggcgccagagccagactgtgcggcaccggcgccagactgtgcggcgccctgtgcttccccgtgcccggcggctgcgccgccgcccagcacagcgccctggccgcccccaccaccctgcccgcctgcagatgcccccccagacccagacccagatgccccggcagacccatctgcctgccccccggcggcagcgtgagactgagactgctgtgcgccctgagaagagccgccggcgccgtgagagtgggcctggccctggaggccgccaccgccggcacccccagcgccagccccagccccagcccccccctgccccccaacctgcccgaggccagagccggccccgccagaagagccagaagaggcaccagcggcagaggcagcctgaagttccccatgcccaactaccaggtggccctgttcgagaacgagcccgccggcaccctgatcctgcagctgcacgcccactacaccatcgagggcgaggaggagagagtgagctactacatggagggcctgttcgacgagagaagcagaggctacttcagaatcgacagcgccaccggcgccgtgagcaccgacagcgtgctggacagagagaccaaggagacccacgtgctgagagtgaaggccgtggactacagcaccccccccagaagcgccaccacctacatcaccgtgctggtgaaggacaccaacgaccacagccccgtgttcgagcagagcgagtacagagagagagtgagagagaacctggaggtgggctacgaggtgctgaccatcagagccagcgacagagacagccccatcaacgccaacctgagatacagagtgctgggcggcgcctgggacgtgttccagctgaacgagagcagcggcgtggtgagcaccagagccgtgctggacagagaggaggccgccgagtaccagctgctggtggaggccaacgaccagggcagaaaccccggccccctgagcgccaccgccaccgtgtacatcgaggtggaggacgagaacgacaactacccccagttcagcgagcagaactacgtggtgcaggtgcccgaggacgtgggcctgaacaccgccgtgctgagagtgcaggccaccgacagagaccagggccagaacgccgccatccactacagcatcctgagcggcaacgtggccggccagttctacctgcacagcctgagcggcatcctggacgtgatcaaccccctggacttcgaggacgtgcagaagtacagcctgagcatcaaggcccaggacggcggcagaccccccctgatcaacagcagcggcgtggtgagcgtgcaggtgctggacgtgaacgacaacgagcccatcttcgtgagcagccccttccaggccaccgtgctggagaacgtgcccctgggctaccccgtggtgcacatccaggccgtggacgccgacagcggcgagaacgccagactgcactacagactggtggacaccgccagcaccttcctgggcggcggcagcgccggccccaagaaccccgcccccacccccgacttccccttccagatccacaacagcagcggctggatcaccgtgtgcgccgagctggacagagaggaggtggagcactacagcttcggcgtggaggccgtggaccacggcagcccccccatgagcagcagcaccagcgtgagcatcaccgtgctggacgtgaacgacaacgaccccgtgttcacccagcccacctacgagctgagactgaacgaggacgccgccgtgggcagcagcgtgctgaccctgcaggccagagacagagacgccaacagcgtgatcacctaccagctgaccggcggcaacaccagaaacagattcgccctgagcagccagagaggcggcggcctgatcaccctggccctgcccctggactacaagcaggagcagcagtacgtgctggccgtgaccgccagcgacggcaccagaagccacaccgcccacgtgctgatcaacgtgaccgacgccaacacccacagacccgtgttccagagcagccactacaccgtgagcgtgagcgaggacagacccgtgggcaccagcatcgccaccctgagcgccaacgacgaggacaccggcgagaacgccagaatcacctacgtgatccaggaccccgtgccccagttcagaatcgaccccgacagcggcaccatgtacaccatgatggagctggactacgagaaccaggtggcctacaccctgaccatcatggcccaggacaacggcatcccccagaagagcgacaccaccaccctggagatcctgatcctggacgccaacgacaacgccccccagttcctgtgggacttctaccagggcagcatcttcgaggacgccccccccagcaccagcatcctgcaggtgagcgccaccgacagagacagcggccccaacggcagactgctgtacaccttccagggcggcgacgacggcgacggcgacttctacatcgagcccaccagcggcgtgatcagaacccagagaagactggacagagagaacgtggccgtgtacaacctgtgggccctggccgtggacagaggcagccccacccccctgagcgccagcgtggagatccaggtgaccatcctggacatcaacgacaacgcccccatgttcgagaaggacgagctggagctgttcgtggaggagaacaaccccgtgggcagcgtggtggccaagatcagagccaacgaccccgacgagggccccaacgcccagatcatgtaccagatcgtggagggcgacatgagacacttcttccagctggacctgctgaacggcgacctgagagccatggtggagctggacttcgaggtgagaagagagtacgtgctggtggtgcaggccaccagcgcccccctggtgagcagagccaccgtgcacatcctgctggtggaccagaacgacaacccccccgtgctgcccgacttccagatcctgttcaacaactacgtgaccaacaagagcaacagcttccccaccggcgtgatcggctgcatccccgcccacgaccccgacgtgagcgacagcctgaactacaccttcgtgcagggcaacgagctgagactgctgctgctggaccccgccaccggcgagctgcagctgagcagagacctggacaacaacagacccctggaggccctgatggaggtgagcgtgagcgacggcatccacagcgtgaccgccttctgcaccctgagagtgaccatcatcaccgacgacatgctgaccaacagcatcaccgtgagactggagaacatgagccaggagaagttcctgagccccctgctggccctgttcgtggagggcgtggccgccgtgctgagcaccaccaaggacgacgtgttcgtgttcaacgtgcagaacgacaccgacgtgagcagcaacatcctgaacgtgaccttcagcgccctgctgcccggcggcgtgagaggccagttcttccccagcgaggacctgcaggagcagatctacctgaacagaaccctgctgaccaccatcagcacccagagagtgctgcccttcgacgacaacatctgcctgagagagccctgcgagaactacatgaagtgcgtgagcgtgctgagattcgacagcagcgcccccttcctgagcagcaccaccgtgctgttcagacccatccaccccatcaacggcctgagatgcagatgcccccccggcttcaccggcgactactgcgagaccgagatcgacctgtgctacagcgacccctgcggcgccaacggcagatgcagaagcagagagggcggctacacctgcgagtgcttcgaggacttcaccggcgagcactgcgaggtggacgccagaagcggcagatgcgccaacggcgtgtgcaagaacggcggcacctgcgtgaacctgctgatcggcggcttccactgcgtgtgcccccccggcgagtacgagagaccctactgcgaggtgaccaccagaagcttccccccccagagcttcgtgaccttcagaggcctgagacagagattccacttcaccatcagcctgaccttcgccacccaggagagaaacggcctgctgctgtacaacggcagattcaacgagaagcacgacttcatcgccctggagatcgtggacgagcaggtgcagctgaccttcagcgccggcgagaccaccaccaccgtggcccccaaggtgcccagcggcgtgagcgacggcagatggcacagcgtgcaggtgcagtactacaacaagcccaacatcggccacctgggcctgccccacggccccagcggcgagaagatggccgtggtgaccgtggacgactgcgacaccaccatggccgtgagattcggcaaggacatcggcaactacagctgcgccgcccagggcacccagaccggcagcaagaagagcctggacctgaccggccccctgctgctgggcggcgtgcccaacctgcccgaggacttccccgtgcacaacagacagttcgtgggctgcatgagaaacctgagcgtggacggcaagaacgtggacatggccggcttcatcgccaacaacggcaccagagagggctgcgccgccagaagaaacttctgcgacggcagaagatgccagaacggcggcacctgcgtgaacagatggaacatgtacctgtgcgagtgccccctgagattcggcggcaagaactgcgagcaggccatgccccacccccagctgttcagcggcgagagcgtggtgagctggagcgacctgaacatcatcatcagcgtgccctggtacctgggcctgatgttcagaaccagaaaggaggacagcgtgctgatggaggccaccagcggcggccccaccagcttcagactgcagatcctgaacaactacctgcagttcgaggtgagccacggccccagcgacgtggagagcgtgatgctgagcggcctgagagtgaccgacggcgagtggcaccacctgctgatcgagctgaagaacgtgaaggaggacagcgagatgaagcacctggtgaccatgaccctggactacggcatggaccagaacaaggccgacatcggcggcatgctgcccggcctgaccgtgagaagcgtggtggtgggcggcgccagcgaggacaaggtgagcgtgagaagaggcttcagaggctgcatgcagggcgtgagaatgggcggcacccccaccaacgtggccaccctgaacatgaacaacgccctgaaggtgagagtgaaggacggctgcgacgtggacgacccctgcaccagcagcccctgcccccccaacagcagatgccacgacgcctgggaggactacagctgcgtgtgcgacaagggctacctgggcatcaactgcgtggacgcctgccacctgaacccctgcgagaacatgggcgcctgcgtgagaagccccggcagcccccagggctacgtgtgcgagtgcggccccagccactacggcccctactgcgagaacaagctggacctgccctgccccagaggctggtggggcaaccccgtgtgcggcccctgccactgcgccgtgagcaagggcttcgaccccgactgcaacaagaccaacggccagtgccagtgcaaggagaactactacaagctgctggcccaggacacctgcctgccctgcgactgcttcccccacggcagccacagcagaacctgcgacatggccaccggccagtgcgcctgcaagcccggcgtgatcggcagacagtgcaacagatgcgacaaccccttcgccgaggtgaccaccctgggctgcgaggtgatctacaacggctgccccaaggccttcgaggccggcatctggtggccccagaccaagttcggccagcccgccgccgtgccctgccccaagggcagcgtgggcaacgccgtgagacactgcagcggcgagaagggctggctgccccccgagctgttcaactgcaccaccatcagcttcgtggacctgagagccatgaacgagaagctgagcagaaacgagacccaggtggacggcgccagagccctgcagctggtgagagccctgagaagcgccacccagcacaccggcaccctgttcggcaacgacgtgagaaccgcctaccagctgctgggccacgtgctgcagcacgagagctggcagcagggcttcgacctggccgccacccaggacgccgacttccacgaggacgtgatccacagcggcagcgccctgctggcccccgccaccagagccgcctgggagcagatccagagaagcgagggcggcaccgcccagctgctgagaagactggagggctacttcagcaacgtggccagaaacgtgagaagaacctacctgagacccttcgtgatcgtgaccgccaacatgatcctggccgtggacatcttcgacaagttcaacttcaccggcgccagagtgcccagattcgacaccatccacgaggagttccccagagagctggagagcagcgtgagcttccccgccgacttcttcagaccccccgaggagaaggagggccccctgctgagacccgccggcagaagaaccaccccccagaccaccagacccggccccggcaccgagagagaggcccccatcagcagaagaagaagacaccccgacgacgccggccagttcgccgtggccctggtgatcatctacagaaccctgggccagctgctgcccgagagatacgaccccgacagaagaagcctgagactgccccacagacccatcatcaacacccccatggtgagcaccctggtgtacagcgagggcgcccccctgcccagacccctggagagacccgtgctggtggagttcgccctgctggaggtggaggagagaaccaagcccgtgtgcgtgttctggaaccacagcctggccgtgggcggcaccggcggctggagcgccagaggctgcgagctgctgagcagaaacagaacccacgtggcctgccagtgcagccacaccgccagcttcgccgtgctgatggacatcagcagaagagagaacggcgaggtgctgcccctgaagatcgtgacctacgccgccgtgagcctgagcctggccgccctgctggtggccttcgtgctgctgagcctggtgagaatgctgagaagcaacctgcacagcatccacaagcacctggccgtggccctgttcctgagccagctggtgttcgtgatcggcatcaaccagaccgagaaccccttcctgtgcaccgtggtggccatcctgctgcactacatctacatgagcaccttcgcctggaccctggtggagagcctgcacgtgtacagaatgctgaccgaggtgagaaacatcgacaccggccccatgagattctactacgtggtgggctggggcatccccgccatcgtgaccggcctggccgtgggcctggacccccagggctacggcaaccccgacttctgctggctgagcctgcaggacaccctgatctggagcttcgccggccccatcggcgccgtgatcatcatcaacaccgtgaccagcgtgctgagcgccaaggtgagctgccagagaaagcaccactactacggcaagaagggcatcgtgagcctgctgagaaccgccttcctgctgctgctgctgatcagcgccacctggctgctgggcctgctggccgtgaacagagacgccctgagcttccactacctgttcgccatcttcagcggcctgcagggccccttcgtgctgctgttccactgcgtgctgaaccaggaggtgagaaagcacctgaagggcgtgctgggcggcagaaagctgcacctggaggacagcgccaccaccagagccaccctgctgaccagaagcctgaactgcaacaccaccttcggcgacggccccgacatgctgagaaccgacctgggcgagagcaccgccagcctggacagcatcgtgagagacgagggcatccagaagctgggcgtgagcagcggcctggtgagaggcagccacggcgagcccgacgccagcctgatgcccagaagctgcaaggacccccccggccacgacagcgacagcgacagcgagctgagcctggacgagcagagcagcagctacgccagcagccacagcagcgacagcgaggacgacggcgtgggcgccgaggagaagtgggaccccgccagaggcgccgtgcacagcacccccaagggcgacgccgtggccaaccacgtgcccgccggctggcccgaccagagcctggccgagagcgacagcgaggaccccagcggcaagcccagactgaaggtggagaccaaggtgagcgtggagctgcacagagaggagcagggcagccacagaggcgagtacccccccgaccaggagagcggcggcgccgccagactggccagcagccagccccccgagcagagaaagggcatcctgaagaacaaggtgacctaccccccccccctgaccctgaccgagcagaccctgaagggcagactgagagagaagctggccgactgcgagcagagccccaccagcagcagaaccagcagcctgggcagcggcggccccgactgcgccatcaccgtgaagagccccggcagagagcccggcagagaccacctgaacggcgtggccatgaacgtgagaaccggcagcgcccaggccgacggcagcgacagcgagaagccctag

SEQ ID NO: 74882 - DNA, 4194 bp, synthetic construct
  misc_feature 1..4194: note = Description of Artificial Sequence: Synthetic coding sequence
  source 1..4194: mol_type = other DNA
atggcccccccccccccccccgtgctgcccgtgctgctgctgctggccgccgccgccgccctgcccgccatgggcctgagagccgccgcctgggagcccagagtgcccggcggcaccagagccttcgccctgagacccggctgcacctacgccgtgggcgccgcctgcacccccagagcccccagagagctgctggacgtgggcagagacggcagactggccggcagaagaagagtgagcggcgccggcagacccctgcccctgcaggtgagactggtggccagaagcgcccccaccgccctgagcagaagactgagagccagaacccacctgcccggctgcggcgccagagccagactgtgcggcaccggcgccagactgtgcggcgccctgtgcttccccgtgcccggcggctgcgccgccgcccagcacagcgccctggccgcccccaccaccctgcccgcctgcagatgcccccccagacccagacccagatgccccggcagacccatctgcctgccccccggcggcagcgtgagactgagactgctgtgcgccctgagaagagccgccggcgccgtgagagtgggcctggccctggaggccgccaccgccggcacccccagcgccagccccagccccagcccccccctgccccccaacctgcccgaggccagagccggccccgccagaagagccagaagaggcaccagcggcagaggcagcctgaagttccccatgcccaactaccaggtggccctgttcgagaacgagcccgccggcaccctgatcctgcagctgcacgcccactacaccatcgagggcgaggaggagagagtgagctactacatggagggcctgttcgacgagagaagcagaggctacttcagaatcgacagcgccaccggcgccgtgagcaccgacagcgtgctggacagagagaccaaggagacccacgtgctgagagtgaaggccgtggactacagcaccccccccagaagcgccaccacctacatcaccgtgctggtgaaggacaccaacgaccacagccccgtgttcgagcagagcgagtacagagagagagtgagagagaacctggaggtgggctacgaggtgctgaccatcagagccagcgacagagacagccccatcaacgccaacctgagatacagagtgctgggcggcgcctgggacgtgttccagctgaacgagagcagcggcgtggtgagcaccagagccgtgctggacagagaggaggccgccgagtaccagctgctggtggaggccaacgaccagggcagaaaccccggccccctgagcgccaccgccaccgtgtacatcgaggtggaggacgagaacgacaactacccccagttcagcgagcagaactacgtggtgcaggtgcccgaggacgtgggcctgaacaccgccgtgctgagagtgcaggccaccgacagagaccagggccagaacgccgccatccactacagcatcctgagcggcaacgtggccggccagttctacctgcacagcctgagcggcatcctggacgtgatcaaccccctggacttcgaggacgtgcagaagtacagcctgagcatcaaggcccaggacggcggcagaccccccctgatcaacagcagcggcgtggtgagcgtgcaggtgctggacgtgaacgacaacgagcccatcttcgtgagcagccccttccaggccaccgtgctggagaacgtgcccctgggctaccccgtggtgcacatccaggccgtggacgccgacagcggcgagaacgccagactgcactacagactggtggacaccgccagcaccttcctgggcggcggcagcgccggccccaagaaccccgcccccacccccgacttccccttccagatccacaacagcagcggctggatcaccgtgtgcgccgagctggacagagaggaggtggagcactacagcttcggcgtggaggccgtggaccacggcagcccccccatgagcagcagcaccagcgtgagcatcaccgtgctggacgtgaacgacaacgaccccgtgttcacccagcccacctacgagctgagactgaacgaggacgccgccgtgggcagcagcgtgctgaccctgcaggccagagacagagacgccaacagcgtgatcacctaccagctgaccggcggcaacaccagaaacagattcgccctgagcagccagagaggcggcggcctgatcaccctggccctgcccctggactacaagcaggagcagcagtacgtgctggccgtgaccgccagcgacggcaccagaagccacaccgcccacgtgctgatcaacgtgaccgacgccaacacccacagacccgtgttccagagcagccactacaccgtgagcgtgagcgaggacagacccgtgggcaccagcatcgccaccctgagcgccaacgacgaggacaccggcgagaacgccagaatcacctacgtgatccaggaccccgtgccccagttcagaatcgaccccgacagcggcaccatgtacaccatgatggagctggactacgagaaccaggtggcctacaccctgaccatcatggcccaggacaacggcatcccccagaagagcgacaccaccaccctggagatcctgatcctggacgccaacgacaacgccccccagttcctgtgggacttctaccagggcagcatcttcgaggacgccccccccagcaccagcatcctgcaggtgagcgccaccgacagagacagcggccccaacggcagactgctgtacaccttccagggcggcgacgacggcgacggcgacttctacatcgagcccaccagcggcgtgatcagaacccagagaagactggacagagagaacgtggccgtgtacaacctgtgggccctggccgtggacagaggcagccccacccccctgagcgccagcgtggagatccaggtgaccatcctggacatcaacgacaacgcccccatgttcgagaaggacgagctggagctgttcgtggaggagaacaaccccgtgggcagcgtggtggccaagatcagagccaacgaccccgacgagggccccaacgcccagatcatgtaccagatcgtggagggcgacatgagacacttcttccagctggacctgctgaacggcgacctgagagccatggtggagctggacttcgaggtgagaagagagtacgtgctggtggtgcaggccaccagcgcccccctggtgagcagagccaccgtgcacatcctgctggtggaccagaacgacaacccccccgtgctgcccgacttccagatcctgttcaacaactacgtgaccaacaagagcaacagcttccccaccggcgtgatcggctgcatccccgcccacgaccccgacgtgagcgacagcctgaactacaccttcgtgcagggcaacgagctgagactgctgctgctggaccccgccaccggcgagctgcagctgagcagagacctggacaacaacagacccctggaggccctgatggaggtgagcgtgagcgacggcatccacagcgtgaccgccttctgcaccctgagagtgaccatcatcaccgacgacatgctgaccaacagcatcaccgtgagactggagaacatgagccaggagaagttcctgagccccctgctggccctgttcgtggagggcgtggccgccgtgctgagcaccaccaaggacgacgtgttcgtgttcaacgtgcagaacgacaccgacgtgagcagcaacatcctgaacgtgaccttcagcgccctgctgcccggcggcgtgagaggccagttcttccccagcgaggacctgcaggagcagatctacctgaacagaaccctgctgaccaccatcagcacccagagagtgctgcccttcgacgacaacatctgcctgagagagccctgcgagaactacatgaagtgcgtgagcgtgctgagattcgacagcagcgcccccttcctgagcagcaccaccgtgctgttcagacccatccaccccatcaacggcctgagatgcagatgcccccccggcttcaccggcgactactgcgagaccgagatcgacctgtgctacagcgacccctgcggcgccaacggcagatgcagaagcagagagggcggctacacctgcgagtgcttcgaggacttcaccgccgtgagctag

SEQ ID NO: 74883 - DNA, 2319 bp, synthetic construct
  misc_feature 1..2319: note = Description of Artificial Sequence: Synthetic coding sequence
  source 1..2319: mol_type = other DNA
tgagacttccccttccagatccacaacagcagcggctggatcaccgtgtgcgccgagctggacagagaggaggtggagcactacagcttcggcgtggaggccgtggaccacggcagcccccccatgagcagcagcaccagcgtgagcatcaccgtgctggacgtgaacgacaacgaccccgtgttcacccagcccacctacgagctgagactgaacgaggacgccgccgtgggcagcagcgtgctgaccctgcaggccagagacagagacgccaacagcgtgatcacctaccagctgaccggcggcaacaccagaaacagattcgccctgagcagccagagaggcggcggcctgatcaccctggccctgcccctggactacaagcaggagcagcagtacgtgctggccgtgaccgccagcgacggcaccagaagccacaccgcccacgtgctgatcaacgtgaccgacgccaacacccacagacccgtgttccagagcagccactacaccgtgagcgtgagcgaggacagacccgtgggcaccagcatcgccaccctgagcgccaacgacgaggacaccggcgagaacgccagaatcacctacgtgatccaggaccccgtgccccagttcagaatcgaccccgacagcggcaccatgtacaccatgatggagctggactacgagaaccaggtggcctacaccctgaccatcatggcccaggacaacggcatcccccagaagagcgacaccaccaccctggagatcctgatcctggacgccaacgacaacgccccccagttcctgtgggacttctaccagggcagcatcttcgaggacgccccccccagcaccagcatcctgcaggtgagcgccaccgacagagacagcggccccaacggcagactgctgtacaccttccagggcggcgacgacggcgacggcgacttctacatcgagcccaccagcggcgtgatcagaacccagagaagactggacagagagaacgtggccgtgtacaacctgtgggccctggccgtggacagaggcagccccacccccctgagcgccagcgtggagatccaggtgaccatcctggacatcaacgacaacgcccccatgttcgagaaggacgagctggagctgttcgtggaggagaacaaccccgtgggcagcgtggtggccaagatcagagccaacgaccccgacgagggccccaacgcccagatcatgtaccagatcgtggagggcgacatgagacacttcttccagctggacctgctgaacggcgacctgagagccatggtggagctggacttcgaggtgagaagagagtacgtgctggtggtgcaggccaccagcgcccccctggtgagcagagccaccgtgcacatcctgctggtggaccagaacgacaacccccccgtgctgcccgacttccagatcctgttcaacaactacgtgaccaacaagagcaacagcttccccaccggcgtgatcggctgcatccccgcccacgaccccgacgtgagcgacagcctgaactacaccttcgtgcagggcaacgagctgagactgctgctgctggaccccgccaccggcgagctgcagctgagcagagacctggacaacaacagacccctggaggccctgatggaggtgagcgtgagcgacggcatccacagcgtgaccgccttctgcaccctgagagtgaccatcatcaccgacgacatgctgaccaacagcatcaccgtgagactggagaacatgagccaggagaagttcctgagccccctgctggccctgttcgtggagggcgtggccgccgtgctgagcaccaccaaggacgacgtgttcgtgttcaacgtgcagaacgacaccgacgtgagcagcaacatcctgaacgtgaccttcagcgccctgctgcccggcggcgtgagaggccagttcttccccagcgaggacctgcaggagcagatctacctgaacagaaccctgctgaccaccatcagcacccagagagtgctgcccttcgacgacaacatctgcctgagagagccctgcgagaactacatgaagtgcgtgagcgtgctgagattcgacagcagcgcccccttcctgagcagcaccaccgtgctgttcagacccatccaccccatcaacggcctgagatgcagatgcccccccggcttcaccggcgactactgcgagaccgagatcgacctgtgctacagcgacccctgcggcgccaacggcagatgcagaagcagagagggcggctacacctgcgagtgcttcgaggacttcaccgagatcagctag

SEQ ID NO: 74884 - DNA, 8772 bp, synthetic construct
  misc_feature 1..8772: note = Description of Artificial Sequence: Synthetic coding sequence
  source 1..8772: mol_type = other DNA
atgagaagccccgccaccggcgtgcccctgcccaccccccccccccccctgctgctgctgctgctgctgctgctgcccccccccctgctgggcgaccaggtgggcccctgcagaagcctgggcagcagaggcagaggcagcagcggcgcctgcgcccccatgggctggctgtgccccagcagcgccagcaacctgtggctgtacaccagcagatgcagagacgccggcaccgagctgaccggccacctggtgccccaccacgacggcctgagagtgtggtgccccgagagcgaggcccacatccccctgccccccgcccccgagggctgcccctggagctgcagactgctgggcatcggcggccacctgagcccccagggcaagctgaccctgcccgaggagcacccctgcctgaaggcccccagactgagatgccagagctgcaagctggcccaggcccccggcctgagagccggcgagagaagccccgaggagagcctgggcggcagaagaaagagaaacgtgaacaccgccccccagttccagccccccagctaccaggccaccgtgcccgagaaccagcccgccggcacccccgtggccagcctgagagccatcgaccccgacgagggcgaggccggcagactggagtacaccatggacgccctgttcgacagcagaagcaaccagttcttcagcctggaccccgtgaccggcgccgtgaccaccgccgaggagctggacagagagaccaagagcacccacgtgttcagagtgaccgcccaggaccacggcatgcccagaagaagcgccctggccaccctgaccatcctggtgaccgacaccaacgaccacgaccccgtgttcgagcagcaggagtacaaggagagcctgagagagaacctggaggtgggctacgaggtgctgaccgtgagagccaccgacggcgacgccccccccaacgccaacatcctgtacagactgctggagggcagcggcggcagccccagcgaggtgttcgagatcgaccccagaagcggcgtgatcagaaccagaggccccgtggacagagaggaggtggagagctaccagctgaccgtggaggccagcgaccagggcagagaccccggccccagaagcaccaccgccgccgtgttcctgagcgtggaggacgacaacgacaacgccccccagttcagcgagaagagatacgtggtgcaggtgagagaggacgtgacccccggcgcccccgtgctgagagtgaccgccagcgacagagacaagggcagcaacgccgtggtgcactacagcatcatgagcggcaacgccagaggccagttctacctggacgcccagaccggcgccctggacgtggtgagccccctggactacgagaccaccaaggagtacaccctgagagtgagagcccaggacggcggcagaccccccctgagcaacgtgagcggcctggtgaccgtgcaggtgctggacatcaacgacaacgcccccatcttcgtgagcacccccttccaggccaccgtgctggagagcgtgcccctgggctacctggtgctgcacgtgcaggccatcgacgccgacgccggcgacaacgccagactggagtacagactggccggcgtgggccacgacttccccttcaccatcaacaacggcaccggctggatcagcgtggccgccgagctggacagagaggaggtggacttctacagcttcggcgtggaggccagagaccacggcacccccgccctgaccgccagcgccagcgtgagcgtgaccgtgctggacgtgaacgacaacaaccccaccttcacccagcccgagtacaccgtgagactgaacgaggacgccgccgtgggcaccagcgtggtgaccgtgagcgccgtggacagagacgcccacagcgtgatcacctaccagatcaccagcggcaacaccagaaacagattcagcatcaccagccagagcggcggcggcctggtgagcctggccctgcccctggactacaagctggagagacagtacgtgctggccgtgaccgccagcgacggcaccagacaggacaccgcccagatcgtggtgaacgtgaccgacgccaacacccacagacccgtgttccagagcagccactacaccgtgaacgtgaacgaggacagacccgccggcaccaccgtggtgctgatcagcgccaccgacgaggacaccggcgagaacgccagaatcacctacttcatggaggacagcatcccccagttcagaatcgacgccgacaccggcgccgtgaccacccaggccgagctggactacgaggaccaggtgagctacaccctggccatcaccgccagagacaacggcatcccccagaagagcgacaccacctacctggagatcctggtgaacgacgtgaacgacaacgccccccagttcctgagagacagctaccagggcagcgtgtacgaggacgtgccccccttcaccagcgtgctgcagatcagcgccaccgacagagacagcggcctgaacggcagagtgttctacaccttccagggcggcgacgacggcgacggcgacttcatcgtggagagcaccagcggcatcgtgagaaccctgagaagactggacagagagaacgtggcccagtacgtgctgagagcctacgccgtggacaagggcatgccccccgccagaacccccatggaggtgaccgtgaccgtgctggacgtgaacgacaacccccccgtgttcgagcaggacgagttcgacgtgttcgtggaggagaacagccccatcggcctggccgtggccagagtgaccgccaccgaccccgacgagggcaccaacgcccagatcatgtaccagatcgtggagggcaacatccccgaggtgttccagctggacatcttcagcggcgagctgaccgccctggtggacctggactacgaggacagacccgagtacgtgctggtgatccaggccaccagcgcccccctggtgagcagagccaccgtgcacgtgagactgctggacagaaacgacaacccccccgtgctgggcaacttcgagatcctgttcaacaactacgtgaccaacagaagcagcagcttccccggcggcgccatcggcagagtgcccgcccacgaccccgacatcagcgacagcctgacctacagcttcgagagaggcaacgagctgagcctggtgctgctgaacgccagcaccggcgagctgaagctgagcagagccctggacaacaacagacccctggaggccatcatgagcgtgctggtgagcgacggcgtgcacagcgtgaccgcccagtgcgccctgagagtgaccatcatcaccgacgagatgctgacccacagcatcaccctgagactggaggacatgagccccgagagattcctgagccccctgctgggcctgttcatccaggccgtggccgccaccctggccaccccccccgaccacgtggtggtgttcaacgtgcagagagacaccgacgcccccggcggccacatcctgaacgtgagcctgagcgtgggccagccccccggccccggcggcggcccccccttcctgcccagcgaggacctgcaggagagactgtacctgaacagaagcctgctgaccgccatcagcgcccagagagtgctgcccttcgacgacaacatctgcctgagagagccctgcgagaactacatgagatgcgtgagcgtgctgagattcgacagcagcgcccccttcatcgccagcagcagcgtgctgttcagacccatccaccccgtgggcggcctgagatgcagatgcccccccggcttcaccggcgactactgcgagaccgaggtggacctgtgctacagcagaccctgcggcccccacggcagatgcagaagcagagagggcggctacacctgcctgtgcagagacggctacaccggcgagcactgcgaggtgagcgccagaagcggcagatgcacccccggcgtgtgcaagaacggcggcacctgcgtgaacctgctggtgggcggcttcaagtgcgactgccccagcggcgacttcgagaagccctactgccaggtgaccaccagaagcttccccgcccacagcttcatcaccttcagaggcctgagacagagattccacttcaccctggccctgagcttcgccaccaaggagagagacggcctgctgctgtacaacggcagattcaacgagaagcacgacttcgtggccctggaggtgatccaggagcaggtgcagctgaccttcagcgccggcgagagcaccaccaccgtgagccccttcgtgcccggcggcgtgagcgacggccagtggcacaccgtgcagctgaagtactacaacaagcccctgctgggccagaccggcctgccccagggccccagcgagcagaaggtggccgtggtgaccgtggacggctgcgacaccggcgtggccctgagattcggcagcgtgctgggcaactacagctgcgccgcccagggcacccagggcggcagcaagaagagcctggacctgaccggccccctgctgctgggcggcgtgcccgacctgcccgagagcttccccgtgagaatgagacagttcgtgggctgcatgagaaacctgcaggtggacagcagacacatcgacatggccgacttcatcgccaacaacggcaccgtgcccggctgccccgccaagaagaacgtgtgcgacagcaacacctgccacaacggcggcacctgcgtgaaccagtgggacgccttcagctgcgagtgccccctgggcttcggcggcaagagctgcgcccaggagatggccaacccccagcacttcctgggcagcagcctggtggcctggcacggcctgagcctgcccatcagccagccctggtacctgagcctgatgttcagaaccagacaggccgacggcgtgctgctgcaggccatcaccagaggcagaagcaccatcaccctgcagctgagagagggccacgtgatgctgagcgtggagggcaccggcctgcaggccagcagcctgagactggagcccggcagagccaacgacggcgactggcaccacgcccagctggccctgggcgccagcggcggccccggccacgccatcctgagcttcgactacggccagcagagagccgagggcaacctgggccccagactgcacggcctgcacctgagcaacatcaccgtgggcggcatccccggccccgccggcggcgtggccagaggcttcagaggctgcctgcagggcgtgagagtgagcgacacccccgagggcgtgaacagcctggaccccagccacggcgagagcatcaacgtggagcagggctgcagcctgcccgacccctgcgacagcaacccctgccccgccaacagctactgcagcaacgactgggacagctacagctgcagctgcgaccccggctactacggcgacaactgcaccaacgtgtgcgacctgaacccctgcgagcaccagagcgtgtgcaccagaaagcccagcgccccccacggctacacctgcgagtgcccccccaactacctgggcccctactgcgagaccagaatcgaccagccctgccccagaggctggtggggccaccccacctgcggcccctgcaactgcgacgtgagcaagggcttcgaccccgactgcaacaagaccagcggcgagtgccactgcaaggagaaccactacagaccccccggcagccccacctgcctgctgtgcgactgctaccccaccggcagcctgagcagagtgtgcgaccccgaggacggccagtgcccctgcaagcccggcgtgatcggcagacagtgcgacagatgcgacaaccccttcgccgaggtgaccaccaacggctgcgaggtgaactacgacagctgccccagagccatcgaggccggcatctggtggcccagaaccagattcggcctgcccgccgccgccccctgccccaagggcagcttcggcaccgccgtgagacactgcgacgagcacagaggctggctgccccccaacctgttcaactgcaccagcatcaccttcagcgagctgaagggcttcgccgagagactgcagagaaacgagagcggcctggacagcggcagaagccagcagctggccctgctgctgagaaacgccacccagcacaccgccggctacttcggcagcgacgtgaaggtggcctaccagctggccaccagactgctggcccacgagagcacccagagaggcttcggcctgagcgccacccaggacgtgcacttcaccgagaacctgctgagagtgggcagcgccctgctggacaccgccaacaagagacactgggagctgatccagcagaccgagggcggcaccgcctggctgctgcagcactacgaggcctacgccagcgccctggcccagaacatgagacacacctacctgagccccttcaccatcgtgacccccaacatcgtgatcagcgtggtgagactggacaagggcaacttcgccggcgccaagctgcccagatacgaggccctgagaggcgagcagccccccgacctggagaccaccgtgatcctgcccgagagcgtgttcagagagaccccccccgtggtgagacccgccggccccggcgaggcccaggagcccgaggagctggccagaagacagagaagacaccccgagctgagccagggcgaggccgtggccagcgtgatcatctacagaaccctggccggcctgctgccccacaactacgaccccgacaagagaagcctgagagtgcccaagagacccatcatcaacacccccgtggtgagcatcagcgtgcacgacgacgaggagctgctgcccagagccctggacaagcccgtgaccgtgcagttcagactgctggagaccgaggagagaaccaagcccatctgcgtgttctggaaccacagcatcctggtgagcggcaccggcggctggagcgccagaggctgcgaggtggtgttcagaaacgagagccacgtgagctgccagtgcaaccacatgaccagcttcgccgtgctgatggacgtgagcagaagagagaacggcgagatcctgcccctgaagaccctgacctacgtggccctgggcgtgaccctggccgccctgctgctgaccttcttcttcctgaccctgctgagaatcctgagaagcaaccagcacggcatcagaagaaacctgaccgccgccctgggcctggcccagctggtgttcctgctgggcatcaaccaggccgacctgcccttcgcctgcaccgtgatcgccatcctgctgcacttcctgtacctgtgcaccttcagctgggccctgctggaggccctgcacctgtacagagccctgaccgaggtgagagacgtgaacaccggccccatgagattctactacatgctgggctggggcgtgcccgccttcatcaccggcctggccgtgggcctggaccccgagggctacggcaaccccgacttctgctggctgagcatctacgacaccctgatctggagcttcgccggccccgtggccttcgccgtgagcatgagcgtgttcctgtacatcctggccgccagagccagctgcgccgcccagagacagggcttcgagaagaagggccccgtgagcggcctgcagcccagcttcgccgtgctgctgctgctgagcgccacctggctgctggccctgctgagcgtgaacagcgacaccctgctgttccactacctgttcgccacctgcaactgcatccagggccccttcatcttcctgagctacgtggtgctgagcaaggaggtgagaaaggccctgaagctggcctgcagcagaaagcccagccccgaccccgccctgaccaccaagagcaccctgaccagcagctacaactgccccagcccctacgccgacggcagactgtaccagccctacggcgacagcgccggcagcctgcacagcaccagcagaagcggcaagagccagcccagctacatccccttcctgctgagagaggagagcgccctgaaccccggccagggcccccccggcctgggcgaccccggcagcctgttcctggagggccaggaccagcagcacgaccccgacaccgacagcgacagcgacctgagcctggaggacgaccagagcggcagctacgccagcacccacagcagcgacagcgaggaggaggaggaggaggaggaggaggaggccgccttccccggcgagcagggctgggacagcctgctgggccccggcgccgagagactgcccctgcacagcacccccaaggacggcggccccggccccggcaaggccccctggcccggcgacttcggcaccaccgccaaggagagcagcggcaacggcgcccccgaggagagactgagagagaacggcgacgccctgagcagagagggcagcctgggccccctgcccggcagcagcgcccagccccacaagggcatcctgaagaagaagtgcctgcccaccatcagcgagaagagcagcctgctgagactgcccctggagcagtgcaccggcagcagcagaggcagcagcgccagcgagggcagcagaggcggccccccccccagacccccccccagacagagcctgcaggagcagctgaacggcgtgatgcccatcgccatgagcatcaaggccggcaccgtggacgaggacagcagcggcagcgagttcctgttcttcaacttcctgcactag

SEQ ID NO: 74885 - DNA, 9939 bp, synthetic construct
  misc_feature 1..9939: note = Description of Artificial Sequence: Synthetic coding sequence
  source 1..9939: mol_type = other DNA
atgatggccagaagacccccctggagaggcctgggcggcagaagcacccccatcctgctgctgctgctgctgagcctgttccccctgagccaggaggagctgggcggcggcggccaccagggctgggaccccggcctggccgccaccaccggccccagagcccacatcggcggcggcgccctggccctgtgccccgagagcagcggcgtgagagaggacggcggccccggcctgggcgtgagagagcccatcttcgtgggcctgagaggcagaagacagagcgccagaaacagcagaggcccccccgagcagcccaacgaggagctgggcatcgagcacggcgtgcagcccctgggcagcagagagagagagaccggccagggccccggcagcgtgctgtactggagacccgaggtgagcagctgcggcagaaccggccccctgcagagaggcagcctgagccccggcgccctgagcagcggcgtgcccggcagcggcaacagcagccccctgcccagcgacttcctgatcagacaccacggccccaagcccgtgagcagccagagaaacgccggcaccggcagcagaaagagagtgggcaccgccagatgctgcggcgagctgtgggccaccggcagcaagggccagggcgagagagccaccaccagcggcgccgagagaaccgcccccagaagaaactgcctgcccggcgccagcggcagcggccccgagctggacagcgcccccagaaccgccagaaccgcccccgccagcggcagcgcccccagagagagcagaaccgcccccgagcccgcccccaagagaatgagaagcagaggcctgttcagatgcagattcctgccccagagacccggccccagaccccccggcctgcccgccagacccgaggccagaaaggtgaccagcgccaacagagccagattcagaagagccgccaacagacacccccagttcccccagtacaactaccagaccctggtgcccgagaacgaggccgccggcaccgccgtgctgagagtggtggcccaggaccccgacgccggcgaggccggcagactggtgtacagcctggccgccctgatgaacagcagaagcctggagctgttcagcatcgacccccagagcggcctgatcagaaccgccgccgccctggacagagagagcatggagagacactacctgagagtgaccgcccaggaccacggcagccccagactgagcgccaccaccatggtggccgtgaccgtggccgacagaaacgaccacagccccgtgttcgagcaggcccagtacagagagaccctgagagagaacgtggaggagggctaccccatcctgcagctgagagccaccgacggcgacgccccccccaacgccaacctgagatacagattcgtgggcccccccgccgccagagccgccgccgccgccgccttcgagatcgaccccagaagcggcctgatcagcaccagcggcagagtggacagagagcacatggagagctacgagctggtggtggaggccagcgaccagggccaggagcccggccccagaagcgccaccgtgagagtgcacatcaccgtgctggacgagaacgacaacgccccccagttcagcgagaagagatacgtggcccaggtgagagaggacgtgagaccccacaccgtggtgctgagagtgaccgccaccgacagagacaaggacgccaacggcctggtgcactacaacatcatcagcggcaacagcagaggccacttcgccatcgacagcctgaccggcgagatccaggtggtggcccccctggacttcgaggccgagagagagtacgccctgagaatcagagcccaggacgccggcagaccccccctgagcaacaacaccggcctggccagcatccaggtggtggacatcaacgaccacatccccatcttcgtgagcacccccttccaggtgagcgtgctggagaacgcccccctgggccacagcgtgatccacatccaggccgtggacgccgaccacggcgagaacgccagactggagtacagcctgaccggcgtggcccccgacacccccttcgtgatcaacagcgccaccggctgggtgagcgtgagcggccccctggacagagagagcgtggagcactacttcttcggcgtggaggccagagaccacggcagcccccccctgagcgccagcgccagcgtgaccgtgaccgtgctggacgtgaacgacaacagacccgagttcaccatgaaggagtaccacctgagactgaacgaggacgccgccgtgggcaccagcgtggtgagcgtgaccgccgtggacagagacgccaacagcgccatcagctaccagatcaccggcggcaacaccagaaacagattcgccatcagcacccagggcggcgtgggcctggtgaccctggccctgcccctggactacaagcaggagagatacttcaagctggtgctgaccgccagcgacagagccctgcacgaccactgctacgtgcacatcaacatcaccgacgccaacacccacagacccgtgttccagagcgcccactacagcgtgagcgtgaacgaggacagacccatgggcagcaccatcgtggtgatcagcgccagcgacgacgacgtgggcgagaacgccagaatcacctacctgctggaggacaacctgccccagttcagaatcgacgccgacagcggcgccatcaccctgcaggcccccctggactacgaggaccaggtgacctacaccctggccatcaccgccagagacaacggcatcccccagaaggccgacaccacctacgtggaggtgatggtgaacgacgtgaacgacaacgccccccagttcgtggccagccactacaccggcctggtgagcgaggacgccccccccttcaccagcgtgctgcagatcagcgccaccgacagagacgcccacgccaacggcagagtgcagtacaccttccagaacggcgaggacggcgacggcgacttcaccatcgagcccaccagcggcatcgtgagaaccgtgagaagactggacagagaggccgtgagcgtgtacgagctgaccgcctacgccgtggacagaggcgtgccccccctgagaacccccgtgagcatccaggtgatggtgcaggacgtgaacgacaacgcccccgtgttccccgccgaggagttcgaggtgagagtgaaggagaacagcatcgtgggcagcgtggtggcccagatcaccgccgtggaccccgacgagggccccaacgcccacatcatgtaccagatcgtggagggcaacatccccgagctgttccagatggacatcttcagcggcgagctgaccgccctgatcgacctggactacgaggccagacaggagtacgtgatcgtggtgcaggccaccagcgcccccctggtgagcagagccaccgtgcacgtgagactggtggaccagaacgacaacagccccgtgctgaacaacttccagatcctgttcaacaactacgtgagcaacagaagcgacaccttccccagcggcatcatcggcagaatccccgcctacgaccccgacgtgagcgaccacctgttctacagcttcgagagaggcaacgagctgcagctgctggtggtgaaccagaccagcggcgagctgagactgagcagaaagctggacaacaacagacccctggtggccagcatgctggtgaccgtgaccgacggcctgcacagcgtgaccgcccagtgcgtgctgagagtggtgatcatcaccgaggagctgctggccaacagcctgaccgtgagactggagaacatgtggcaggagagattcctgagccccctgctgggcagattcctggagggcgtggccgccgtgctggccacccccgccgaggacgtgttcatcttcaacatccagaacgacaccgacgtgggcggcaccgtgctgaacgtgagcttcagcgccctggcccccagaggcgccggcgccggcgccgccggcccctggttcagcagcgaggagctgcaggagcagctgtacgtgagaagagccgccctggccgccagaagcctgctggacgtgctgcccttcgacgacaacgtgtgcctgagagagccctgcgagaactacatgaagtgcgtgagcgtgctgagattcgacagcagcgcccccttcctggccagcgccagcaccctgttcagacccatccagcccatcgccggcctgagatgcagatgcccccccggcttcaccggcgacttctgcgagaccgagctggacctgtgctacagcaacccctgcagaaacggcggcgcctgcgccagaagagagggcggctacacctgcgtgtgcagacccagattcaccggcgaggactgcgagctggacaccgaggccggcagatgcgtgcccggcgtgtgcagaaacggcggcacctgcaccgacgcccccaacggcggcttcagatgccagtgccccgccggcggcgccttcgagggccccagatgcgaggtggccgccagaagcttcccccccagcagcttcgtgatgttcagaggcctgagacagagattccacctgaccctgagcctgagcttcgccaccgtgcagcagagcggcctgctgttctacaacggcagactgaacgagaagcacgacttcctggccctggagctggtggccggccaggtgagactgacctacagcaccggcgagagcaacaccgtggtgagccccaccgtgcccggcggcctgagcgacggccagtggcacaccgtgcacctgagatactacaacaagcccagaaccgacgccctgggcggcgcccagggccccagcaaggacaaggtggccgtgctgagcgtggacgactgcgacgtggccgtggccctgcagttcggcgccgagatcggcaactacagctgcgccgccgccggcgtgcagaccagcagcaagaagagcctggacctgaccggccccctgctgctgggcggcgtgcccaacctgcccgagaacttccccgtgagccacaaggacttcatcggctgcatgagagacctgcacatcgacggcagaagagtggacatggccgccttcgtggccaacaacggcaccatggccggctgccaggccaagctgcacttctgcgacagcggcccctgcaagaacagcggcttctgcagcgagagatggggcagcttcagctgcgactgccccgtgggcttcggcggcaaggactgccagctgaccatggcccacccccaccacttcagaggcaacggcaccctgagctggaacttcggcagcgacatggccgtgagcgtgccctggtacctgggcctggccttcagaaccagagccacccagggcgtgctgatgcaggtgcaggccggcccccacagcaccctgctgtgccagctggacagaggcctgctgagcgtgaccgtgaccagaggcagcggcagagccagccacctgctgctggaccaggtgaccgtgagcgacggcagatggcacgacctgagactggagctgcaggaggagcccggcggcagaagaggccaccacgtgctgatggtgagcctggacttcagcctgttccaggacaccatggccgtgggcagcgagctgcagggcctgaaggtgaagcagctgcacgtgggcggcctgccccccggcagcgccgaggaggccccccagggcctggtgggctgcatccagggcgtgtggctgggcagcacccccagcggcagccccgccctgctgccccccagccacagagtgaacgccgagcccggctgcgtggtgaccaacgcctgcgccagcggcccctgccccccccacgccgactgcagagacctgtggcagaccttcagctgcacctgccagcccggctactacggccccggctgcgtggacgcctgcctgctgaacccctgccagaaccagggcagctgcagacacctgcccggcgccccccacggctacacctgcgactgcgtgggcggctacttcggccaccactgcgagcacagaatggaccagcagtgccccagaggctggtggggcagccccacctgcggcccctgcaactgcgacgtgcacaagggcttcgaccccaactgcaacaagaccaacggccagtgccactgcaaggagttccactacagacccagaggcagcgacagctgcctgccctgcgactgctaccccgtgggcagcaccagcagaagctgcgccccccacagcggccagtgcccctgcagacccggcgccctgggcagacagtgcaacagctgcgacagccccttcgccgaggtgaccgccagcggctgcagagtgctgtacgacgcctgccccaagagcctgagaagcggcgtgtggtggccccagaccaagttcggcgtgctggccaccgtgccctgccccagaggcgccctgggcgccgccgtgagactgtgcgacgaggcccagggctggctggagcccgacctgttcaactgcaccagccccgccttcagagagctgagcctgctgctggacggcctggagctgaacaagaccgccctggacaccatggaggccaagaagctggcccagagactgagagaggtgaccggccacaccgaccactacttcagccaggacgtgagagtgaccgccagactgctggcccacctgctggccttcgagagccaccagcagggcttcggcctgaccgccacccaggacgcccacttcaacgagaacctgctgtgggccggcagcgccctgctggcccccgagaccggcgacctgtgggccgccctgggccagagagcccccggcggcagccccggcagcgccggcctggtgagacacctggaggagtacgccgccaccctggccagaaacatggagctgacctacctgaaccccatgggcctggtgacccccaacatcatgctgagcatcgacagaatggagcaccccagcagccccagaggcgccagaagataccccagataccacagcaacctgttcagaggccaggacgcctgggacccccacacccacgtgctgctgcccagccagagccccagacccagccccagcgaggtgctgcccaccagcagcagcatcgagaacagcaccaccagcagcgtggtgcccccccccgccccccccgagcccgagcccggcatcagcatcatcatcctgctggtgtacagaaccctgggcggcctgctgcccgcccagttccaggccgagagaagaggcgccagactgccccagaaccccgtgatgaacagccccgtggtgagcgtggccgtgttccacggcagaaacttcctgagaggcatcctggagagccccatcagcctggagttcagactgctgcagaccgccaacagaagcaaggccatctgcgtgcagtgggacccccccggcctggccgagcagcacggcgtgtggaccgccagagactgcgagctggtgcacagaaacggcagccacgccagatgcagatgcagcagaaccggcaccttcggcgtgctgatggacgccagccccagagagagactggagggcgacctggagctgctggccgtgttcacccacgtggtggtggccgtgagcgtggccgccctggtgctgaccgccgccatcctgctgagcctgagaagcctgaagagcaacgtgagaggcatccacgccaacgtggccgccgccctgggcgtggccgagctgctgttcctgctgggcatccacagaacccacaaccagctggtgtgcaccgccgtggccatcctgctgcactacttcttcctgagcaccttcgcctggctgttcgtgcagggcctgcacctgtacagaatgcaggtggagcccagaaacgtggacagaggcgccatgagattctaccacgccctgggctggggcgtgcccgccgtgctgctgggcctggccgtgggcctggaccccgagggctacggcaaccccgacttctgctggatcagcgtgcacgagcccctgatctggagcttcgccggccccgtggtgctggtgatcgtgatgaacggcaccatgttcctgctggccgccagaaccagctgcagcaccggccagagagaggccaagaagaccagcgccctgaccctgagaagcagcttcctgctgctgctgctggtgagcgccagctggctgttcggcctgctggccgtgaaccacagcatcctggccttccactacctgcacgccggcctgtgcggcctgcagggcctggccgtgctgctgctgttctgcgtgctgaacgccgacgccagagccgcctggatgcccgcctgcctgggcagaaaggccgcccccgaggaggccagacccgcccccggcctgggccccggcgcctacaacaacaccgccctgttcgaggagagcggcctgatcagaatcaccctgggcgccagcaccgtgagcagcgtgagcagcgccagaagcggcagaacccaggaccaggacagccagagaggcagaagctacctgagagacaacgtgctggtgagacacggcagcgccgccgaccacaccgaccacagcctgcaggcccacgccggccccaccgacctggacgtggccatgttccacagagacgccggcgccgacagcgacagcgacagcgacctgagcctggaggaggagagaagcctgagcatccccagcagcgagagcgaggacaacggcagaaccagaggcagattccagagacccctgtgcagagccgcccagagcgagagactgctgacccaccccaaggacgtggacggcaacgacctgctgagctactggcccgccctgggcgagtgcgaggccgccccctgcgccctgcagacctggggcagcgagagaagactgggcctggacaccagcaaggacgccgccaacaacaaccagcccgaccccgccctgaccagcggcgacgagaccagcctgggcagagcccagagacagagaaagggcatcctgaagaacagactgcagtaccccctggtgccccagaccagaggcgcccccgagctgagctggtgcagagccgccaccctgggccacagagccgtgcccgccgccagctacggcagaatctacgccggcggcggcaccggcagcctgagccagcccgccagcagatacagcagcagagagcagctggacctgctgctgagaagacagctgagcagagagagactggaggaggcccccgcccccgtgctgagacccctgagcagacccggcagccaggagtgcatggacgccgcccccggcagactggagcccaaggacagaggcagcaccctgcccagaagacagccccccagagactaccccggcgccatggccggcagattcggcagcagagacgccctggacctgggcgcccccagagagtggctgagcaccctgcccccccccagaagaaccagagacctggacccccagcccccccccctgcccctgagcccccagagacagctgagcagagaccccctgctgcccagcagacccctggacagcctgagcagaagcagcaacagcagagagcagctggaccaggtgcccagcagacaccccagcagagaggccctgggccccctgccccagctgctgagagccagagaggacagcgtgagcggccccagccacggccccagcaccgagcagctggacatcctgagcagcatcctggccagcttcaacagcagcgccctgagcagcgtgcagagcagcagcacccccctgggcccccacaccaccgccacccccagcgccaccgccagcgtgctgggccccagcacccccagaagcgccaccagccacagcatcagcgagctgagccccgacagcgaggtgcccagaagcgagggccacagctag

SEQ ID NO: 74886 - DNA, 9954 bp, synthetic construct
  misc_feature 1..9954: note = Description of Artificial Sequence: Synthetic coding sequence
  source 1..9954: mol_type = other DNA
atgatggccagaagacccccctggagaggcctgggcggcagaagcacccccatcctgctgctgctgctgctgagcctgttccccctgagccaggaggagctgggcggcggcggccaccagggctgggaccccggcctggccgccaccaccggccccagagcccacatcggcggcggcgccctggccctgtgccccgagagcagcggcgtgagagaggacggcggccccggcctgggcgtgagagagcccatcttcgtgggcctgagaggcagaagacagagcgccagaaacagcagaggcccccccgagcagcccaacgaggagctgggcatcgagcacggcgtgcagcccctgggcagcagagagagagagaccggccagggccccggcagcgtgctgtactggagacccgaggtgagcagctgcggcagaaccggccccctgcagagaggcagcctgagccccggcgccctgagcagcggcgtgcccggcagcggcaacagcagccccctgcccagcgacttcctgatcagacaccacggccccaagcccgtgagcagccagagaaacgccggcaccggcagcagaaagagagtgggcaccgccagatgctgcggcgagctgtgggccaccggcagcaagggccagggcgagagagccaccaccagcggcgccgagagaaccgcccccagaagaaactgcctgcccggcgccagcggcagcggccccgagctggacagcgcccccagaaccgccagaaccgcccccgccagcggcagcgcccccagagagagcagaaccgcccccgagcccgcccccaagagaatgagaagcagaggcctgttcagatgcagattcctgccccagagacccggccccagaccccccggcctgcccgccagacccgaggccagaaaggtgaccagcgccaacagagccagattcagaagagccgccaacagacacccccagttcccccagtacaactaccagaccctggtgcccgagaacgaggccgccggcaccgccgtgctgagagtggtggcccaggaccccgacgccggcgaggccggcagactggtgtacagcctggccgccctgatgaacagcagaagcctggagctgttcagcatcgacccccagagcggcctgatcagaaccgccgccgccctggacagagagagcatggagagacactacctgagagtgaccgcccaggaccacggcagccccagactgagcgccaccaccatggtggccgtgaccgtggccgacagaaacgaccacagccccgtgttcgagcaggcccagtacagagagaccctgagagagaacgtggaggagggctaccccatcctgcagctgagagccaccgacggcgacgccccccccaacgccaacctgagatacagattcgtgggcccccccgccgccagagccgccgccgccgccgccttcgagatcgaccccagaagcggcctgatcagcaccagcggcagagtggacagagagcacatggagagctacgagctggtggtggaggccagcgaccagggccaggagcccggccccagaagcgccaccgtgagagtgcacatcaccgtgctggacgagaacgacaacgccccccagttcagcgagaagagatacgtggcccaggtgagagaggacgtgagaccccacaccgtggtgctgagagtgaccgccaccgacagagacaaggacgccaacggcctggtgcactacaacatcatcagcggcaacagcagaggccacttcgccatcgacagcctgaccggcgagatccaggtggtggcccccctggacttcgaggccgagagagagtacgccctgagaatcagagcccaggacgccggcagaccccccctgagcaacaacaccggcctggccagcatccaggtggtggacatcaacgaccacatccccatcttcgtgagcacccccttccaggtgagcgtgctggagaacgcccccctgggccacagcgtgatccacatccaggccgtggacgccgaccacggcgagaacgccagactggagtacagcctgaccggcgtggcccccgacacccccttcgtgatcaacagcgccaccggctgggtgagcgtgagcggccccctggacagagagagcgtggagcactacttcttcggcgtggaggccagagaccacggcagcccccccctgagcgccagcgccagcgtgaccgtgaccgtgctggacgtgaacgacaacagacccgagttcaccatgaaggagtaccacctgagactgaacgaggacgccgccgtgggcaccagcgtggtgagcgtgaccgccgtggacagagacgccaacagcgccatcagctaccagatcaccggcggcaacaccagaaacagattcgccatcagcacccagggcggcgtgggcctggtgaccctggccctgcccctggactacaagcaggagagatacttcaagctggtgctgaccgccagcgacagagccctgcacgaccactgctacgtgcacatcaacatcaccgacgccaacacccacagacccgtgttccagagcgcccactacagcgtgagcgtgaacgaggacagacccatgggcagcaccatcgtggtgatcagcgccagcgacgacgacgtgggcgagaacgccagaatcacctacctgctggaggacaacctgccccagttcagaatcgacgccgacagcggcgccatcaccctgcaggcccccctggactacgaggaccaggtgacctacaccctggccatcaccgccagagacaacggcatcccccagaaggccgacaccacctacgtggaggtgatggtgaacgacgtgaacgacaacgccccccagttcgtggccagccactacaccggcctggtgagcgaggacgccccccccttcaccagcgtgctgcagatcagcgccaccgacagagacgcccacgccaacggcagagtgcagtacaccttccagaacggcgaggacggcgacggcgacttcaccatcgagcccaccagcggcatcgtgagaaccgtgagaagactggacagagaggccgtgagcgtgtacgagctgaccgcctacgccgtggacagaggcgtgccccccctgagaacccccgtgagcatccaggtgatggtgcaggacgtgaacgacaacgcccccgtgttccccgccgaggagttcgaggtgagagtgaaggagaacagcatcgtgggcagcgtggtggcccagatcaccgccgtggaccccgacgagggccccaacgcccacatcatgtaccagatcgtggagggcaacatccccgagctgttccagatggacatcttcagcggcgagctgaccgccctgatcgacctggactacgaggccagacaggagtacgtgatcgtggtgcaggccaccagcgcccccctggtgagcagagccaccgtgcacgtgagactggtggaccagaacgacaacagccccgtgctgaacaacttccagatcctgttcaacaactacgtgagcaacagaagcgacaccttccccagcggcatcatcggcagaatccccgcctacgaccccgacgtgagcgaccacctgttctacagcttcgagagaggcaacgagctgcagctgctggtggtgaaccagaccagcggcgagctgagactgagcagaaagctggacaacaacagacccctggtggccagcatgctggtgaccgtgaccgacggcctgcacagcgtgaccgcccagtgcgtgctgagagtggtgatcatcaccgaggagctgctggccaacagcctgaccgtgagactggagaacatgtggcaggagagattcctgagccccctgctgggcagattcctggagggcgtggccgccgtgctggccacccccgccgaggacgtgttcatcttcaacatccagaacgacaccgacgtgggcggcaccgtgctgaacgtgagcttcagcgccctggcccccagaggcgccggcgccggcgccgccggcccctggttcagcagcgaggagctgcaggagcagctgtacgtgagaagagccgccctggccgccagaagcctgctggacgtgctgcccttcgacgacaacgtgtgcctgagagagccctgcgagaactacatgaagtgcgtgagcgtgctgagattcgacagcagcgcccccttcctggccagcgccagcaccctgttcagacccatccagcccatcgccggcctgagatgcagatgcccccccggcttcaccggcgacttctgcgagaccgagctggacctgtgctacagcaacccctgcagaaacggcggcgcctgcgccagaagagagggcggctacacctgcgtgtgcagacccagattcaccggcgaggactgcgagctggacaccgaggccggcagatgcgtgcccggcgtgtgcagaaacggcggcacctgcaccgacgcccccaacggcggcttcagatgccagtgccccgccggcggcgccttcgagggccccagatgcgaggtggccgccagaagcttcccccccagcagcttcgtgatgttcagaggcctgagacagagattccacctgaccctgagcctgagcttcgccaccgtgcagcagagcggcctgctgttctacaacggcagactgaacgagaagcacgacttcctggccctggagctggtggccggccaggtgagactgacctacagcaccggcgagagcaacaccgtggtgagccccaccgtgcccggcggcctgagcgacggccagtggcacaccgtgcacctgagatactacaacaagcccagaaccgacgccctgggcggcgcccagggccccagcaaggacaaggtggccgtgctgagcgtggacgactgcgacgtggccgtggccctgcagttcggcgccgagatcggcaactacagctgcgccgccgccggcgtgcagaccagcagcaagaagagcctggacctgaccggccccctgctgctgggcggcgtgcccaacctgcccgagaacttccccgtgagccacaaggacttcatcggctgcatgagagacctgcacatcgacggcagaagagtggacatggccgccttcgtggccaacaacggcaccatggccggctgccaggccaagctgcacttctgcgacagcggcccctgcaagaacagcggcttctgcagcgagagatggggcagcttcagctgcgactgccccgtgggcttcggcggcaaggactgccagctgaccatggcccacccccaccacttcagaggcaacggcaccctgagctggaacttcggcagcgacatggccgtgagcgtgccctggtacctgggcctggccttcagaaccagagccacccagggcgtgctgatgcaggtgcaggccggcccccacagcaccctgctgtgccagctggacagaggcctgctgagcgtgaccgtgaccagaggcagcggcagagccagccacctgctgctggaccaggtgaccgtgagcgacggcagatggcacgacctgagactggagctgcaggaggagcccggcggcagaagaggccaccacgtgctgatggtgagcctggacttcagcctgttccaggacaccatggccgtgggcagcgagctgcagggcctgaaggtgaagcagctgcacgtgggcggcctgccccccggcagcgccgaggaggccccccagggcctggtgggctgcatccagggcgtgtggctgggcagcacccccagcggcagccccgccctgctgccccccagccacagagtgaacgccgagcccggctgcgtggtgaccaacgcctgcgccagcggcccctgccccccccacgccgactgcagagacctgtggcagaccttcagctgcacctgccagcccggctactacggccccggctgcgtggacgcctgcctgctgaacccctgccagaaccagggcagctgcagacacctgcccggcgccccccacggctacacctgcgactgcgtgggcggctacttcggccaccactgcgagcacagaatggaccagcagtgccccagaggctggtggggcagccccacctgcggcccctgcaactgcgacgtgcacaagggcttcgaccccaactgcaacaagaccaacggccagtgccactgcaaggagttccactacagacccagaggcagcgacagctgcctgccctgcgactgctaccccgtgggcagcaccagcagaagctgcgccccccacagcggccagtgcccctgcagacccggcgccctgggcagacagtgcaacagctgcgacagccccttcgccgaggtgaccgccagcggctgcagagtgctgtacgacgcctgccccaagagcctgagaagcggcgtgtggtggccccagaccaagttcggcgtgctggccaccgtgccctgccccagaggcgccctgggcctgagaggcgccggcgccgccgtgagactgtgcgacgaggcccagggctggctggagcccgacctgttcaactgcaccagccccgccttcagagagctgagcctgctgctggacggcctggagctgaacaagaccgccctggacaccatggaggccaagaagctggcccagagactgagagaggtgaccggccacaccgaccactacttcagccaggacgtgagagtgaccgccagactgctggcccacctgctggccttcgagagccaccagcagggcttcggcctgaccgccacccaggacgcccacttcaacgagaacctgctgtgggccggcagcgccctgctggcccccgagaccggcgacctgtgggccgccctgggccagagagcccccggcggcagccccggcagcgccggcctggtgagacacctggaggagtacgccgccaccctggccagaaacatggagctgacctacctgaaccccatgggcctggtgacccccaacatcatgctgagcatcgacagaatggagcaccccagcagccccagaggcgccagaagataccccagataccacagcaacctgttcagaggccaggacgcctgggacccccacacccacgtgctgctgcccagccagagccccagacccagccccagcgaggtgctgcccaccagcagcagcatcgagaacagcaccaccagcagcgtggtgcccccccccgccccccccgagcccgagcccggcatcagcatcatcatcctgctggtgtacagaaccctgggcggcctgctgcccgcccagttccaggccgagagaagaggcgccagactgccccagaaccccgtgatgaacagccccgtggtgagcgtggccgtgttccacggcagaaacttcctgagaggcatcctggagagccccatcagcctggagttcagactgctgcagaccgccaacagaagcaaggccatctgcgtgcagtgggacccccccggcctggccgagcagcacggcgtgtggaccgccagagactgcgagctggtgcacagaaacggcagccacgccagatgcagatgcagcagaaccggcaccttcggcgtgctgatggacgccagccccagagagagactggagggcgacctggagctgctggccgtgttcacccacgtggtggtggccgtgagcgtggccgccctggtgctgaccgccgccatcctgctgagcctgagaagcctgaagagcaacgtgagaggcatccacgccaacgtggccgccgccctgggcgtggccgagctgctgttcctgctgggcatccacagaacccacaaccagctggtgtgcaccgccgtggccatcctgctgcactacttcttcctgagcaccttcgcctggctgttcgtgcagggcctgcacctgtacagaatgcaggtggagcccagaaacgtggacagaggcgccatgagattctaccacgccctgggctggggcgtgcccgccgtgctgctgggcctggccgtgggcctggaccccgagggctacggcaaccccgacttctgctggatcagcgtgcacgagcccctgatctggagcttcgccggccccgtggtgctggtgatcgtgatgaacggcaccatgttcctgctggccgccagaaccagctgcagcaccggccagagagaggccaagaagaccagcgccctgaccctgagaagcagcttcctgctgctgctgctggtgagcgccagctggctgttcggcctgctggccgtgaaccacagcatcctggccttccactacctgcacgccggcctgtgcggcctgcagggcctggccgtgctgctgctgttctgcgtgctgaacgccgacgccagagccgcctggatgcccgcctgcctgggcagaaaggccgcccccgaggaggccagacccgcccccggcctgggccccggcgcctacaacaacaccgccctgttcgaggagagcggcctgatcagaatcaccctgggcgccagcaccgtgagcagcgtgagcagcgccagaagcggcagaacccaggaccaggacagccagagaggcagaagctacctgagagacaacgtgctggtgagacacggcagcgccgccgaccacaccgaccacagcctgcaggcccacgccggccccaccgacctggacgtggccatgttccacagagacgccggcgccgacagcgacagcgacagcgacctgagcctggaggaggagagaagcctgagcatccccagcagcgagagcgaggacaacggcagaaccagaggcagattccagagacccctgtgcagagccgcccagagcgagagactgctgacccaccccaaggacgtggacggcaacgacctgctgagctactggcccgccctgggcgagtgcgaggccgccccctgcgccctgcagacctggggcagcgagagaagactgggcctggacaccagcaaggacgccgccaacaacaaccagcccgaccccgccctgaccagcggcgacgagaccagcctgggcagagcccagagacagagaaagggcatcctgaagaacagactgcagtaccccctggtgccccagaccagaggcgcccccgagctgagctggtgcagagccgccaccctgggccacagagccgtgcccgccgccagctacggcagaatctacgccggcggcggcaccggcagcctgagccagcccgccagcagatacagcagcagagagcagctggacctgctgctgagaagacagctgagcagagagagactggaggaggcccccgcccccgtgctgagacccctgagcagacccggcagccaggagtgcatggacgccgcccccggcagactggagcccaaggacagaggcagcaccctgcccagaagacagccccccagagactaccccggcgccatggccggcagattcggcagcagagacgccctggacctgggcgcccccagagagtggctgagcaccctgcccccccccagaagaaccagagacctggacccccagcccccccccctgcccctgagcccccagagacagctgagcagagaccccctgctgcccagcagacccctggacagcctgagcagaagcagcaacagcagagagcagctggaccaggtgcccagcagacaccccagcagagaggccctgggccccctgccccagctgctgagagccagagaggacagcgtgagcggccccagccacggccccagcaccgagcagctggacatcctgagcagcatcctggccagcttcaacagcagcgccctgagcagcgtgcagagcagcagcacccccctgggcccccacaccaccgccacccccagcgccaccgccagcgtgctgggccccagcacccccagaagcgccaccagccacagcatcagcgagctgagccccgacagcgaggtgcccagaagcgagggccacagctag

SEQ ID NO: 74887 - DNA, 1557 bp, synthetic construct
  misc_feature 1..1557: note = Description of Artificial Sequence: Synthetic coding sequence
  source 1..1557: mol_type = other DNA
atggccttctgggccggcggcagccccagcgtggtggactacttccccagcgaggacttctacagatgcggctactgcaagaacgagagcggcagcagaagcaacggcatgtgggcccacagcatgaccgtgcaggactaccaggacctgatcgacagaggctggagaagaagcggcaagtacgtgtacaagcccgtgatgaaccagacctgctgcccccagtacaccatcagatgcagacccctgcagttccagcccagcaagagccacaagaaggtgctgaagaagatgctgaagttcctggccaagggcgaggtgcccaagggcagctgcgaggacgagcccatggacagcaccatggacgacgccgtggccggcgacttcgccctgatcaacaagctggacatccagtgcgacctgaagaccctgagcgacgacatcaaggagagcctggagagcgagggcaagaacagcaagaaggaggagccccaggagctgctgcagagccaggacttcgtgggcgagaagctgggcagcggcgagcccagccacagcgtgaaggtgcacaccgtgcccaagcccggcaagggcgccgacctgagcaagcccccctgcagaaaggccaaggagatcagaaaggagagaaagagactgaagctgatgcagcagaaccccgccggcgagctggagggcttccaggcccagggccacccccccagcctgttcccccccaaggccaagagcaaccagcccaagagcctggaggacctgatcttcgagagcctgcccgagaacgccagccacaagctggaggtgagagtggtgagaagcagcccccccagcagccagttcaaggccaccctgctggagagctaccaggtgtacaagagataccagatggtgatccacaagaacccccccgacacccccaccgagagccagttcaccagattcctgtgcagcagccccctggaggccgagaccccccccaacggccccgactgcggctacggcagcttccaccagcagtactggctggacggcaagatcatcgccgtgggcgtgatcgacatcctgcccaactgcgtgagcagcgtgtacctgtactacgaccccgactacagcttcctgagcctgggcgtgtacagcgccctgagagagatcgccttcaccagacagctgcacgagaagaccagccagctgagctactactacatgggcttctacatccacagctgccccaagatgaagtacaagggccagtacagacccagcgacctgctgtgccccgagacctacgtgtgggtgcccatcgagcagtgcctgcccagcctggagaacagcaagtactgcagattcaaccaggaccccgaggccgtggacgaggacagaagcaccgagcccgacagactgcaggtgttccacaagagagccatcatgccctacggcgtgtacaagaagcagcagaaggaccccagcgaggaggccgccgtgctgcagtacgccagcctggtgggccagaagtgcagcgagagaatgctgctgttcagaaactag

SEQ ID NO: 74888 - DNA, 3195 bp, synthetic construct
  misc_feature 1..3195: note = Description of Artificial Sequence: Synthetic coding sequence
  source 1..3195: mol_type = other DNA
atgggcagacacgtggccaccagctgccacgtggcctggctgctggtgctgatcagcggctgctggggccaggtgaacagactgcccttcttcaccaaccacttcttcgacacctacctgctgatcagcgaggacacccccgtgggcagcagcgtgacccagctgctggcccaggacatggacaacgaccccctggtgttcggcgtgagcggcgaggaggccagcagattcttcgccgtggagcccgacaccggcgtggtgtggctgagacagcccctggacagagagaccaagagcgagttcaccgtggagttcagcgtgagcgaccaccagggcgtgatcaccagaaaggtgaacatccaggtgggcgacgtgaacgacaacgcccccaccttccacaaccagccctacagcgtgagaatccccgaggtgggcgccaccggcaacacccccgtgggcacccccatcttcatcgtgaacgccaccgaccccgacctgggcgccggcggcagcgtgctgtacagcttccagccccccagccagttcttcgccatcgacagcgccagaggcatcgtgaccgtgatcagagagctggactacgagaccacccaggcctaccagctgaccgtgaacgccaccgaccaggacaagaccagacccctgagcaccctggccaacctggccatcatcatcaccgacgtgcaggacatggaccccatcttcatcaacctgccctacagcaccaacatctacgagcacagcccccccggcaccaccgtgagaatcatcaccgccatcgaccaggacaagggcagacccagaggcatcggctacaccatcgtgagcggcaacaccaacagcatcttcgccctggactacatcagcggcgtgctgaccctgaacggcctgctggacagagagaaccccctgtacagccacggcttcatcctgaccgtgaagggcaccgagctgaacgacgacagaacccccagcgacgccaccgtgaccaccaccttcaacatcctggtgatcgacatcaacgacaacgcccccgagttcaacagcagcgagtacagcgtggccatcaccgagctggcccaggtgggcttcgccctgcccctgttcatccaggtggtggacaaggacgagggcctgaacagcatgttcgaggtgtacctggtgggcaacaacagccaccacttcatcatcagccccaccagcgtgcagggcaaggccgacatcagaatcagagtggccatccccctggactacgagaccgtggacagatacgacttcgacctgttcgccaacgagagcgtgcccgaccacgtgggctacgccaaggtgaagatcaccctgatcaacgagaacgacaacagacccatcttcagccagcccctgtacaacatcagcctgtacgagaacgtgaccgtgggcaccagcgtgctgaccgtgctggccaccgacaacgacgccggcaccttcggcgaggtgagctacttcttcagcgacgaccccgacagattcagcctggacaaggacaccggcctgatcatgctgatcgccagactggactacgagctgatccagagattcaccctgaccatcatcgccagagacggcggcggcgaggagaccaccggcagagtgagaatcaacgtgctggacgtgaacgacaacgtgcccaccttccagaaggacgcctacgtgggcgccctgagagagaacgagcccagcgtgacccagctggtgagactgagagccaccgacgaggacagcccccccaacaaccagatcacctacagcatcgtgagcgccagcgccttcggcagctacttcgacatcagcctgtacgagggctacggcgtgatcagcgtgagcagacccctggactacgagcagatcagcaacggcctgatctacctgaccgtgatggccatggacgccggcaacccccccctgaacagcaccgtgcccgtgaccatcgaggtgttcgacgagaacgacaacccccccaccttcagcaagcccgcctacttcgtgagcgtggtggagaacatcatggccggcgccaccgtgctgttcctgaacgccaccgacctggacagaagcagagagtacggccaggagagcatcatctacagcctggagggcagcacccagttcagaatcaacgccagaagcggcgagatcaccaccaccagcctgctggacagagagaccaagagcgagtacatcctgatcgtgagagccgtggacggcggcgtgggccacaaccagaagaccggcatcgccaccgtgaacatcaccctgctggacatcaacgacaaccaccccacctggaaggacgccccctactacatcaacctggtggagatgaccccccccgacagcgacgtgaccaccgtggtggccgtggaccccgacctgggcgagaacggcaccctggtgtacagcatccagccccccaacaagttctacagcctgaacagcaccaccggcaagatcagaaccacccacgccatgctggacagagagaaccccgacccccacgaggccgagctgatgagaaagatcgtggtgagcgtgaccgactgcggcagaccccccctgaaggccaccagcagcgccaccgtgttcgtgaacctgctggacctgaacgacaacgaccccaccttccagaacctgcccttcgtggccgaggtgctggagggcatccccgccggcgtgagcatctaccaggtggtggccatcgacctggacgagggcctgaacggcctggtgagctacagaatgcccgtgggcatgcccagaatggacttcctgatcaacagcagcagcggcgtggtggtgaccaccaccgagctggacagagagagaatcgccgagtaccagctgagagtggtggccagcgacgccggcacccccaccaagagcagcaccagcaccctgaccatccacgtgctggacgtgaacgacgagacccccaccttcttccccgccgtgtacaacgtgagcgtgagcgaggacgtgcccagagagttcagagtggtgtggctgaactgcaccgacaacgacgtgggcctgaacgccgagctgagctacttcatcaccggcgccgcccccgccagcgcccacctgtgcagaccccccggcgccctgcccccccccctgcccgacggccagcccgactag

SEQ ID NO: 74889 - DNA, 3345 bp, synthetic construct
  misc_feature 1..3345: note = Description of Artificial Sequence: Synthetic coding sequence
  source 1..3345: mol_type = other DNA
atggtgaagagccccatgaacagagagctggtggccacctacgaggtgaccctgagcgtgatcgacaacgccagcgacctgcccgagagaagcgtgagcgtgcccaacgccaagctgaccgtgaacgtgctggacgtgaacgacaacaccccccagttcaagcccttcggcatcacctactacatggagagaatcctggagggcgccacccccggcaccaccctgatcgccgtggccgccgtggaccccgacaagggcctgaacggcctggtgacctacaccctgctggacctggtgccccccggctacgtgcagctggaggacagcagcgccggcaaggtgatcgccaacagaaccgtggactacgaggaggtgcactggctgaacttcaccgtgagagccagcgacaacggcagcccccccagagccgccgagatccccgtgtacctggagatcgtggacatcaacgacaacaaccccatcttcgaccagcccagctaccaggaggccgtgttcgaggacgtgcccgtgggcaccatcatcctgaccgtgaccgccaccgacgccgacagcggcaacttcgccctgatcgagtacagcctgggcgacggcgagagcaagttcgccatcaaccccaccaccggcgacatctacgtgctgagcagcctggacagagagaagaaggaccactacatcctgaccgccctggccaaggacaaccccggcgacgtggccagcaacagaagagagaacagcgtgcaggtggtgatccaggtgctggacgtgaacgactgcagaccccagttcagcaagccccagttcagcaccagcgtgtacgagaacgagcccgccggcaccagcgtgatcaccatgatggccaccgaccaggacgagggccccaacggcgagctgacctacagcctggagggccccggcgtggaggccttccacgtggacatggacagcggcctggtgaccacccagagacccctgcagagctacgagaagttcagcctgaccgtggtggccaccgacggcggcgagccccccctgtggggcaccaccatgctgctggtggaggtgatcgacgtgaacgacaacagacccgtgttcgtgagaccccccaacggcaccatcctgcacatcagagaggagatccccctgagaagcaacgtgtacgaggtgtacgccaccgacaaggacgagggcctgaacggcgccgtgagatacagcttcctgaagaccgccggcaacagagactgggagttcttcatcatcgaccccatcagcggcctgatccagaccgcccagagactggacagagagagccaggccgtgtacagcctgatcctggtggccagcgacctgggccagcccgtgccctacgagaccatgcagcccctgcaggtggccctggaggacatcgacgacaacgagcccctgttcgtgagaccccccaagggcagcccccagtaccagctgctgaccgtgcccgagcacagccccagaggcaccctggtgggcaacgtgaccggcgccgtggacgccgacgagggccccaacgccatcgtgtactacttcatcgccgccggcaacgaggagaagaacttccacctgcagcccgacggctgcctgctggtgctgagagacctggacagagagagagaggccatcttcagcttcatcgtgaaggccagcagcaacagaagctggaccccccccagaggccccagccccaccctggacctggtggccgacctgaccctgcaggaggtgagagtggtgctggaggacatcaacgaccagccccccagattcaccaaggccgagtacaccgccggcgtggccaccgacgccaaggtgggcagcgagctgatccaggtgctggccctggacgccgacatcggcaacaacagcctggtgttctacagcatcctggccatccactacttcagagccctggccaacgacagcgaggacgtgggccaggtgttcaccatgggcagcatggacggcatcctgagaaccttcgacctgttcatggcctacagccccggctacttcgtggtggacatcgtggccagagacctggccggccacaacgacaccgccatcatcggcatctacatcctgagagacgaccagagagtgaagatcgtgatcaacgagatccccgacagagtgagaggcttcgaggaggagttcatccacctgctgagcaacatcaccggcgccatcgtgaacaccgacaacgtgcagttccacgtggacaagaagggcagagtgaacttcgcccagaccgagctgctgatccacgtggtgaacagagacaccaacagaatcctggacgtggacagagtgatccagatgatcgacgagaacaaggagcagctgagaaacctgttcagaaactacaacgtgctggacgtgcagcccgccatcagcgtgagactgcccgacgacatgagcgccctgcagatggccatcatcgtgctggccatcctgctgttcctggccgccatgctgttcgtgctgatgaactggtactacagaaccgtgcacaagagaaagctgaaggccatcgtggccggcagcgccggcaacagaggcttcatcgacatcatggacatgcccaacaccaacaagtacagcttcgacggcgccaaccccgtgtggctggaccccttctgcagaaacctggagctggccgcccaggccgagcacgaggacgacctgcccgagaacctgagcgagatcgccgacctgtggaacagccccaccagaacccacggcaccttcggcagagagcccgccgccgtgaagcccgacgacgacagatacctgagagccgccatccaggagtacgacaacatcgccaagctgggccagatcatcagagagggccccatcaagggcagcctgctgaaggtggtgctggaggactacctgagactgaagaagctgttcgcccagagaatggtgcagaaggccagcagctgccacagcagcatcagcgagctgatccagaccgagctggacgaggagcccggcgaccacagccccggccagggcagcctgagattcagacacaagccccccgtggagctgaagggccccgacggcatccacgtggtgcacggcagcaccggcaccctgctggccaccgacctgaacagcctgcccgaggaggaccagaagggcctgggcagaagcctggagaccctgaccgccgccgaggccaccgccttcgagagaaacgccagaaccgagagcgccaagagcacccccctgcacaagctgagagacgtgatcatggagacccccctggagatcaccgagctgtag

SEQ ID NO: 74890 - DNA, 1368 bp, synthetic construct
  misc_feature 1..1368: note = Description of Artificial Sequence: Synthetic coding sequence
  source 1..1368: mol_type = other DNA
atgagagccagcctgggcgtgtgcggcaccgccagcagcatggtgatcgtgtacgtggaggacatcaacgacgaggcccccgtgttcacccagcagcagtacagcagactgggcctgagagagaccgccggcatcggcaccagcgtgatcgtggtgcaggccaccgacagagacagcggcgacggcggcctggtgaactacagaatcctgagcggcgccgagggcaagttcgagatcgacgagagcaccggcctgatcatcaccgtgaactacctggactacgagaccaagaccagctacatgatgaacgtgagcgccaccgaccaggccccccccttcaaccagggcttctgcagcgtgtacatcaccctgctgaacgagctggacgaggccgtgcagttcagcaacgccagctacgaggccgccatcctggagaacctggccctgggcaccgagatcgtgagagtgcaggcctacagcatcgacaacctgaaccagatcacctacagattcaacgcctacaccagcacccaggccaaggccctgttcaagatcgacgccatcaccggcgtgatcaccgtgcagggcctggtggacagagagaagggcgacttctacaccctgaccgtggtggccgacgacggcggccccaaggtggacagcaccgtggtgtacatcaccgtgctggacgagaacgacaacagccccagattcgacttcaccagcgacagcgccgtgagcatccccgaggactgccccgtgggccagagagtggccaccgtgaaggcctgggaccccgacgccggcagcaacggccaggtggtgttcagcctggccagcggcaacatcgccggcgccttcgagatcgtgaccaccaacgacagcatcggcgaggtgttcgtggccagacccctggacagagaggagctggaccactacatcctgcaggtggtggccagcgacagaggcaccccccccagaaagaaggaccacatcctgcaggtgaccatcctggacatcaacgacaacccccccgtgatcgagagccccttcggctacaacgtgagcgtgaacgagaacgtgggcggcggcaccgccgtggtgcaggtgagagccaccgacagagacatcggcatcaacagcgtgctgagctactacatcaccgagggcaacaaggacatggccttcagaatggacagaatcagcggcgagatcgccaccagacccgccccccccgacagagagagacagagcttctaccacctggtggccaccgtggaggacgagggcacccccaccctgagcgtgagcgacggcggcggccacagagaggagagagtgggccagggcagcagcgccagcgagtag

SEQ ID NO: 74891 - DNA, 1593 bp, synthetic construct
  misc_feature 1..1593: note = Description of Artificial Sequence: Synthetic coding sequence
  source 1..1593: mol_type = other DNA
atgggcagacacgtggccaccagctgccacgtggcctggctgctggtgctgatcagcggctgctggggccaggtgaacagactgcccttcttcaccaaccacttcttcgacacctacctgctgatcagcgaggacacccccgtgggcagcagcgtgacccagctgctggcccaggacatggacaacgaccccctggtgttcggcgtgagcggcgaggaggccagcagattcttcgccgtggagcccgacaccggcgtggtgtggctgagacagcccctggacagagagaccaagagcgagttcaccgtggagttcagcgtgagcgaccaccagggcgtgatcaccagaaaggtgaacatccaggtgggcgacgtgaacgacaacgcccccaccttccacaaccagccctacagcgtgagaatccccgagaacacccccgtgggcacccccatcttcatcgtgaacgccaccgaccccgacctgggcgccggcggcagcgtgctgtacagcttccagccccccagccagttcttcgccatcgacagcgccagaggcatcgtgaccgtgatcagagagctggactacgagaccacccaggcctaccagctgaccgtgaacgccaccgaccaggacaagaccagacccctgagcaccctggccaacctggccatcatcatcaccgacgtgcaggacatggaccccatcttcatcaacctgccctacagcaccaacatctacgagcacagcccccccggcaccaccgtgagaatcatcaccgccatcgaccaggacaagggcagacccagaggcatcggctacaccatcgtgagcggcaacaccaacagcatcttcgccctggactacatcagcggcgtgctgaccctgaacggcctgctggacagagagaaccccctgtacagccacggcttcatcctgaccgtgaagggcaccgagctgaacgacgacagaacccccagcgacgccaccgtgaccaccaccttcaacatcctggtgatcgacatcaacgacaacgcccccgagttcaacagcagcgagtacagcgtggccatcaccgagctggcccaggtgggcttcgccctgcccctgttcatccaggtggtggacaaggacgagaacctgggcctgaacagcatgttcgaggtgtacctggtgggcaacaacagccaccacttcatcatcagccccaccagcgtgcagggcaaggccgacatcagaatcagagtggccatccccctggactacgagaccgtggacagatacgacttcgacctgttcgccaacgagagcgtgcccgaccacgtgggctacgccaaggtgaagatcaccctgatcaacgagaacgacaacagacccatcttcagccagcccctgtacaacatcagcctgtacgagaacgtgaccgtgggcaccagcgtgctgaccgtgctggtgagccccagattcaccgccggccccctgagcagccccggccccaccgtggtgagacaccccgagggcttctgccccagagacctgagcaaccagggcagaagacacccccagatccccgagctgtgcctgctggtgtactag

SEQ ID NO: 74892 - DNA, 3639 bp, synthetic construct
  misc_feature 1..3639: note = Description of Artificial Sequence: Synthetic coding sequence
  source 1..3639: mol_type = other DNA
atgggcagacacgtggccaccagctgccacgtggcctggctgctggtgctgatcagcggctgctggggccaggtgaacagactgcccttcttcaccaaccacttcttcgacacctacctgctgatcagcgaggacacccccgtgggcagcagcgtgacccagctgctggcccaggacatggacaacgaccccctggtgttcggcgtgagcggcgaggaggccagcagattcttcgccgtggagcccgacaccggcgtggtgtggctgagacagcccctggacagagagaccaagagcgagttcaccgtggagttcagcgtgagcgaccaccagggcgtgatcaccagaaaggtgaacatccaggtgggcgacgtgaacgacaacgcccccaccttccacaaccagccctacagcgtgagaatccccgagaacacccccgtgggcacccccatcttcatcgtgaacgccaccgaccccgacctgggcgccggcggcagcgtgctgtacagcttccagccccccagccagttcttcgccatcgacagcgccagaggcatcgtgaccgtgatcagagagctggactacgagaccacccaggcctaccagctgaccgtgaacgccaccgaccaggacaagaccagacccctgagcaccctggccaacctggccatcatcatcaccgacgtgcaggacatggaccccatcttcatcaacctgccctacagcaccaacatctacgagcacagcccccccggcaccaccgtgagaatcatcaccgccatcgaccaggacaagggcagacccagaggcatcggctacaccatcgtgagcggcaacaccaacagcatcttcgccctggactacatcagcggcgtgctgaccctgaacggcctgctggacagagagaaccccctgtacagccacggcttcatcctgaccgtgaagggcaccgagctgaacgacgacagaacccccagcgacgccaccgtgaccaccaccttcaacatcctggtgatcgacatcaacgacaacgcccccgagttcaacagcagcgagtacagcgtggccatcaccgagctggcccaggtgggcttcgccctgcccctgttcatccaggtggtggacaaggacgagacccagggcctgaacagcatgttcgaggtgtacctggtgggcaacaacagccaccacttcatcatcagccccaccagcgtgcagggcaaggccgacatcagaatcagagtggccatccccctggactacgagaccgtggacagatacgacttcgacctgttcgccaacgagagcgtgcccgaccacgtgggctacgccaaggtgaagatcaccctgatcaacgagaacgacaacagacccatcttcagccagcccctgtacaacatcagcctgtacgagaacgtgaccgtgggcaccagcgtgctgaccgtgctggccaccgacaacgacgccggcaccttcggcgaggtgagctacttcttcagcgacgaccccgacagattcagcctggacaaggacaccggcctgatcatgctgatcgccagactggactacgagctgatccagagattcaccctgaccatcatcgccagagacggcggcggcgaggagaccaccggcagagtgagaatcaacgtgctggacgtgaacgacaacgtgcccaccttccagaaggacgcctacgtgggcgccctgagagagaacgagcccagcgtgacccagctggtgagactgagagccaccgacgaggacagcccccccaacaaccagatcacctacagcatcgtgagcgccagcgccttcggcagctacttcgacatcagcctgtacgagggctacggcgtgatcagcgtgagcagacccctggactacgagcagatcagcaacggcctgatctacctgaccgtgatggccatggacgccggcaacccccccctgaacagcaccgtgcccgtgaccatcgaggtgttcgacgagaacgacaacccccccaccttcagcaagcccgcctacttcgtgagcgtggtggagaacatcatggccggcgccaccgtgctgttcctgaacgccaccgacctggacagaagcagagagtacggccaggagagcatcatctacagcctggagggcagcacccagttcagaatcaacgccagaagcggcgagatcaccaccaccagcctgctggacagagagaccaagagcgagtacatcctgatcgtgagagccgtggacggcggcgtgggccacaaccagaagaccggcatcgccaccgtgaacatcaccctgctggacatcaacgacaaccaccccacctggaaggacgccccctactacatcaacctggtggagatgaccccccccgacagcgacgtgaccaccgtggtggccgtggaccccgacctgggcgagaacggcaccctggtgtacagcatccagccccccaacaagttctacagcctgaacagcaccaccggcaagatcagaaccacccacgccatgctggacagagagaaccccgacccccacgaggccgagctgatgagaaagatcgtggtgagcgtgaccgactgcggcagaccccccctgaaggccaccagcagcgccaccgtgttcgtgaacctgctggacctgaacgacaacgaccccaccttccagaacctgcccttcgtggccgaggtgctggagggcatccccgccggcgtgagcatctaccaggtggtggccatcgacctggacgagggcctgaacggcctggtgagctacagaatgcccgtgggcatgcccagaatggacttcctgatcaacagcagcagcggcgtggtggtgaccaccaccgagctggacagagagagaatcgccgagtaccagctgagagtggtggccagcgacgccggcacccccaccaagagcagcaccagcaccctgaccatccacgtgctggacgtgaacgacgagacccccaccttcttccccgccgtgtacaacgtgagcgtgagcgaggacgtgcccagagagttcagagtggtgtggctgaactgcaccgacaacgacgtgggcctgaacgccgagctgagctacttcatcaccggcggcaacgtggacggcaagttcagcgtgggctacagagacgccgtggtgagaaccgtggtgggcctggacagagagaccaccgccgcctacatgctgatcctggaggccatcgacaacggccccgtgggcaagagacacaccggcaccgccaccgtgttcgtgaccgtgctggacgtgaacgacaacagacccatcttcctgcagagcagctacgaggccagcgtgcccgaggacatccccgagggccacagcatcctgcaggaggaggacctggccagcccctgcatcagccccgccccccccagaagagccttccagagcagcggcgagaaggagaccagccagttccccggcaaggagctgagaagagagcccggccccagcaaggcccagaacagagccgccttcaccgagcccctggccgaggcccccctgctgggcagcaagcaggcccaggaggagagagcccccctgcccagagagcaggcccagcagctgcagggcagcgagggcgagaagggcggcccctag

SEQ ID NO: 74893 - DNA, 1593 bp, synthetic construct
  misc_feature 1..1593: note = Description of Artificial Sequence: Synthetic coding sequence
  source 1..1593: mol_type = other DNA
atgggcagacacgtggccaccagctgccacgtggcctggctgctggtgctgatcagcggctgctggggccaggtgaacagactgcccttcttcaccaaccacttcttcgacacctacctgctgatcagcgaggacacccccgtgggcagcagcgtgacccagctgctggcccaggacatggacaacgaccccctggtgttcggcgtgagcggcgaggaggccagcagattcttcgccgtggagcccgacaccggcgtggtgtggctgagacagcccctggacagagagaccaagagcgagttcaccgtggagttcagcgtgagcgaccaccagggcgtgatcaccagaaaggtgaacatccaggtgggcgacgtgaacgacaacgcccccaccttccacaaccagccctacagcgtgagaatccccgagaacacccccgtgggcacccccatcttcatcgtgaacgccaccgaccccgacctgggcgccggcggcagcgtgctgtacagcttccagccccccagccagttcttcgccatcgacagcgccagaggcatcgtgaccgtgatcagagagctggactacgagaccacccaggcctaccagctgaccgtgaacgccaccgaccaggacaagaccagacccctgagcaccctggccaacctggccatcatcatcaccgacgtgcaggacatggaccccatcttcatcaacctgccctacagcaccaacatctacgagcacagcccccccggcaccaccgtgagaatcatcaccgccatcgaccaggacaagggcagacccagaggcatcggctacaccatcgtgagcggcaacaccaacagcatcttcgccctggactacatcagcggcgtgctgaccctgaacggcctgctggacagagagaaccccctgtacagccacggcttcatcctgaccgtgaagggcaccgagctgaacgacgacagaacccccagcgacgccaccgtgaccaccaccttcaacatcctggtgatcgacatcaacgacaacgcccccgagttcaacagcagcgagtacagcgtggccatcaccgagctggcccaggtgggcttcgccctgcccctgttcatccaggtggtggacaaggacgagacctggggcctgaacagcatgttcgaggtgtacctggtgggcaacaacagccaccacttcatcatcagccccaccagcgtgcagggcaaggccgacatcagaatcagagtggccatccccctggactacgagaccgtggacagatacgacttcgacctgttcgccaacgagagcgtgcccgaccacgtgggctacgccaaggtgaagatcaccctgatcaacgagaacgacaacagacccatcttcagccagcccctgtacaacatcagcctgtacgagaacgtgaccgtgggcaccagcgtgctgaccgtgctggtgagccccagattcaccgccggccccctgagcagccccggccccaccgtggtgagacaccccgagggcttctgccccagagacctgagcaaccagggcagaagacacccccagatccccgagctgtgcctgctggtgtactag

SEQ ID NO: 74894 - DNA, 9960 bp, synthetic construct
  misc_feature 1..9960: note = Description of Artificial Sequence: Synthetic coding sequence
  source 1..9960: mol_type = other DNA
atgggcagacacgtggccaccagctgccacgtggcctggctgctggtgctgatcagcggctgctggggccaggtgaacagactgcccttcttcaccaaccacttcttcgacacctacctgctgatcagcgaggacacccccgtgggcagcagcgtgacccagctgctggcccaggacatggacaacgaccccctggtgttcggcgtgagcggcgaggaggccagcagattcttcgccgtggagcccgacaccggcgtggtgtggctgagacagcccctggacagagagaccaagagcgagttcaccgtggagttcagcgtgagcgaccaccagggcgtgatcaccagaaaggtgaacatccaggtgggcgacgtgaacgacaacgcccccaccttccacaaccagccctacagcgtgagaatccccgagaacacccccgtgggcacccccatcttcatcgtgaacgccaccgaccccgacctgggcgccggcggcagcgtgctgtacagcttccagccccccagccagttcttcgccatcgacagcgccagaggcatcgtgaccgtgatcagagagctggactacgagaccacccaggcctaccagctgaccgtgaacgccaccgaccaggacaagaccagacccctgagcaccctggccaacctggccatcatcatcaccgacgtgcaggacatggaccccatcttcatcaacctgccctacagcaccaacatctacgagcacagcccccccggcaccaccgtgagaatcatcaccgccatcgaccaggacaagggcagacccagaggcatcggctacaccatcgtgagcggcaacaccaacagcatcttcgccctggactacatcagcggcgtgctgaccctgaacggcctgctggacagagagaaccccctgtacagccacggcttcatcctgaccgtgaagggcaccgagctgaacgacgacagaacccccagcgacgccaccgtgaccaccaccttcaacatcctggtgatcgacatcaacgacaacgcccccgagttcaacagcagcgagtacagcgtggccatcaccgagctggcccaggtgggcttcgccctgcccctgttcatccaggtggtggacaaggacgagacccagggcctgaacagcatgttcgaggtgtacctggtgggcaacaacagccaccacttcatcatcagccccaccagcgtgcagggcaaggccgacatcagaatcagagtggccatccccctggactacgagaccgtggacagatacgacttcgacctgttcgccaacgagagcgtgcccgaccacgtgggctacgccaaggtgaagatcaccctgatcaacgagaacgacaacagacccatcttcagccagcccctgtacaacatcagcctgtacgagaacgtgaccgtgggcaccagcgtgctgaccgtgctggccaccgacaacgacgccggcaccttcggcgaggtgagctacttcttcagcgacgaccccgacagattcagcctggacaaggacaccggcctgatcatgctgatcgccagactggactacgagctgatccagagattcaccctgaccatcatcgccagagacggcggcggcgaggagaccaccggcagagtgagaatcaacgtgctggacgtgaacgacaacgtgcccaccttccagaaggacgcctacgtgggcgccctgagagagaacgagcccagcgtgacccagctggtgagactgagagccaccgacgaggacagcccccccaacaaccagatcacctacagcatcgtgagcgccagcgccttcggcagctacttcgacatcagcctgtacgagggctacggcgtgatcagcgtgagcagacccctggactacgagcagatcagcaacggcctgatctacctgaccgtgatggccatggacgccggcaacccccccctgaacagcaccgtgcccgtgaccatcgaggtgttcgacgagaacgacaacccccccaccttcagcaagcccgcctacttcgtgagcgtggtggagaacatcatggccggcgccaccgtgctgttcctgaacgccaccgacctggacagaagcagagagtacggccaggagagcatcatctacagcctggagggcagcacccagttcagaatcaacgccagaagcggcgagatcaccaccaccagcctgctggacagagagaccaagagcgagtacatcctgatcgtgagagccgtggacggcggcgtgggccacaaccagaagaccggcatcgccaccgtgaacatcaccctgctggacatcaacgacaaccaccccacctggaaggacgccccctactacatcaacctggtggagatgaccccccccgacagcgacgtgaccaccgtggtggccgtggaccccgacctgggcgagaacggcaccctggtgtacagcatccagccccccaacaagttctacagcctgaacagcaccaccggcaagatcagaaccacccacgccatgctggacagagagaaccccgacccccacgaggccgagctgatgagaaagatcgtggtgagcgtgaccgactgcggcagaccccccctgaaggccaccagcagcgccaccgtgttcgtgaacctgctggacctgaacgacaacgaccccaccttccagaacctgcccttcgtggccgaggtgctggagggcatccccgccggcgtgagcatctaccaggtggtggccatcgacctggacgagggcctgaacggcctggtgagctacagaatgcccgtgggcatgcccagaatggacttcctgatcaacagcagcagcggcgtggtggtgaccaccaccgagctggacagagagagaatcgccgagtaccagctgagagtggtggccagcgacgccggcacccccaccaagagcagcaccagcaccctgaccatccacgtgctggacgtgaacgacgagacccccaccttcttccccgccgtgtacaacgtgagcgtgagcgaggacgtgcccagagagttcagagtggtgtggctgaactgcaccgacaacgacgtgggcctgaacgccgagctgagctacttcatcaccggcggcaacgtggacggcaagttcagcgtgggctacagagacgccgtggtgagaaccgtggtgggcctggacagagagaccaccgccgcctacatgctgatcctggaggccatcgacaacggccccgtgggcaagagacacaccggcaccgccaccgtgttcgtgaccgtgctggacgtgaacgacaacagacccatcttcctgcagagcagctacgaggccagcgtgcccgaggacatccccgagggccacagcatcctgcagctgaaggccaccgacgccgacgagggcgagttcggcagagtgtggtacagaatcctgcacggcaaccacggcaacaacttcagaatccacgtgagcaacggcctgctgatgagaggccccagacccctggacagagagagaaacagcagccacgtgctgatcgtggaggcctacaaccacgacctgggccccatgagaagcagcgtgagagtgatcgtgtacgtggaggacatcaacgacgaggcccccgtgttcacccagcagcagtacagcagactgggcctgagagagaccgccggcatcggcaccagcgtgatcgtggtgcaggccaccgacagagacagcggcgacggcggcctggtgaactacagaatcctgagcggcgccgagggcaagttcgagatcgacgagagcaccggcctgatcatcaccgtgaactacctggactacgagaccaagaccagctacatgatgaacgtgagcgccaccgaccaggccccccccttcaaccagggcttctgcagcgtgtacatcaccctgctgaacgagctggacgaggccgtgcagttcagcaacgccagctacgaggccgccatcctggagaacctggccctgggcaccgagatcgtgagagtgcaggcctacagcatcgacaacctgaaccagatcacctacagattcaacgcctacaccagcacccaggccaaggccctgttcaagatcgacgccatcaccggcgtgatcaccgtgcagggcctggtggacagagagaagggcgacttctacaccctgaccgtggtggccgacgacggcggccccaaggtggacagcaccgtgcaggtgtacatcaccgtgctggacgagaacgacaacagccccagattcgacttcaccagcgacagcgccgtgagcatccccgaggactgccccgtgggccagagagtggccaccgtgaaggcctgggaccccgacgccggcagcaacggccaggtggtgttcagcctggccagcggcaacatcgccggcgccttcgagatcgtgaccaccaacgacagcatcggcgaggtgttcgtggccagacccctggacagagaggagctggaccactacatcctgcaggtggtggccagcgacagaggcaccccccccagaaagaaggaccacatcctgcaggtgaccatcctggacatcaacgacaacccccccgtgatcgagagccccttcggctacaacgtgagcgtgaacgagaacgtgggcggcggcaccgccgtggtgcaggtgagagccaccgacagagacatcggcatcaacagcgtgctgagctactacatcaccgagggcaacaaggacatggccttcagaatggacagaatcagcggcgagatcgccaccagacccgccccccccgacagagagagacagagcttctaccacctggtggccaccgtggaggacgagggcacccccaccctgagcgccaccacccacgtgtacgtgaccatcgtggacgagaacgacaacgcccccatgttccagcagccccactacgaggtgctgctggacgagggccccgacaccctgaacaccagcctgatcaccatccaggccctggacctggacgagggccccaacggcaccgtgacctacgccatcgtggccggcaacatcgtgaacaccttcagaatcgacagacacatgggcgtgatcaccgccgccaaggagctggactacgagatcagccacggcagatacaccctgatcgtgaccgccaccgaccagtgccccatcctgagccacagactgaccagcaccaccaccgtgctggtgaacgtgaacgacatcaacgacaacgtgcccaccttccccagagactacgagggccccttcgaggtgaccgagggccagcccggccccagagtgtggaccttcctggcccacgacagagacagcggccccaacggccaggtggagtacagcatcatggacggcgaccccctgggcgagttcgtgatcagccccgtggagggcgtgctgagagtgagaaaggacgtggagctggacagagagaccatcgccttctacaacctgaccatctgcgccagagacagaggcatgccccccctgagcagcaccatgctggtgggcatcagagtgctggacatcaacgacaacgaccccgtgctgctgaacctgcccatgaacatcaccatcagcgagaacagccccgtgagcagcttcgtggcccacgtgctggccagcgacgccgacagcggctgcaacgccagactgaccttcaacatcaccgccggcaacagagagagagccttcttcatcaacgccaccaccggcatcgtgaccgtgaacagacccctggacagagagagaatccccgagtacaagctgaccatcagcgtgaaggacaaccccgagaaccccagaatcgccagaagagactacgacctgctgctgatcttcctgagcgacgagaacgacaaccaccccctgttcaccaagagcacctaccaggccgaggtgatggagaacagccccgccggcacccccctgaccgtgctgaacggccccatcctggccctggacgccgaccaggacatctacgccgtggtgacctaccagctgctgggcgcccagagcggcctgttcgacatcaacagcagcaccggcgtggtgaccgtgagaagcggcgtgatcatcgacagagaggccttcagcccccccatcctggagctgctgctgctggccgaggacatcggcctgctgaacagcaccgcccacctgctgatcaccatcctggacgacaacgacaacagacccaccttcagccccgccaccctgaccgtgcacctgctggagaactgcccccccggcttcagcgtgctgcaggtgaccgccaccgacgaggacagcggcctgaacggcgagctggtgtacagaatcgaggccggcgcccaggacagattcctgatccacctggtgaccggcgtgatcagagtgggcaacgccaccatcgacagagaggagcaggagagctacagactgaccgtggtggccaccgacagaggcaccgtgcccctgagcggcaccgccatcgtgaccatcctgatcgacgacatcaacgacagcagacccgagttcctgaaccccatccagaccgtgagcgtgctggagagcgccgagcccggcaccgtgatcgccaacatcaccgccatcgaccacgacctgaaccccaagctggagtaccacatcgtgggcatcgtggccaaggacgacaccgacagactggtgcccaaccaggaggacgccttcgccgtgaacatcaacaccggcagcgtgatggtgaagagccccatgaacagagagctggtggccacctacgaggtgaccctgagcgtgatcgacaacgccagcgacctgcccgagagaagcgtgagcgtgcccaacgccaagctgaccgtgaacgtgctggacgtgaacgacaacaccccccagttcaagcccttcggcatcacctactacatggagagaatcctggagggcgccacccccggcaccaccctgatcgccgtggccgccgtggaccccgacaagggcctgaacggcctggtgacctacaccctgctggacctggtgccccccggctacgtgcagctggaggacagcagcgccggcaaggtgatcgccaacagaaccgtggactacgaggaggtgcactggctgaacttcaccgtgagagccagcgacaacggcagcccccccagagccgccgagatccccgtgtacctggagatcgtggacatcaacgacaacaaccccatcttcgaccagcccagctaccaggaggccgtgttcgaggacgtgcccgtgggcaccatcatcctgaccgtgaccgccaccgacgccgacagcggcaacttcgccctgatcgagtacagcctgggcgacggcgagagcaagttcgccatcaaccccaccaccggcgacatctacgtgctgagcagcctggacagagagaagaaggaccactacatcctgaccgccctggccaaggacaaccccggcgacgtggccagcaacagaagagagaacagcgtgcaggtggtgatccaggtgctggacgtgaacgactgcagaccccagttcagcaagccccagttcagcaccagcgtgtacgagaacgagcccgccggcaccagcgtgatcaccatgatggccaccgaccaggacgagggccccaacggcgagctgacctacagcctggagggccccggcgtggaggccttccacgtggacatggacagcggcctggtgaccacccagagacccctgcagagctacgagaagttcagcctgaccgtggtggccaccgacggcggcgagccccccctgtggggcaccaccatgctgctggtggaggtgatcgacgtgaacgacaacagacccgtgttcgtgagaccccccaacggcaccatcctgcacatcagagaggagatccccctgagaagcaacgtgtacgaggtgtacgccaccgacaaggacgagggcctgaacggcgccgtgagatacagcttcctgaagaccgccggcaacagagactgggagttcttcatcatcgaccccatcagcggcctgatccagaccgcccagagactggacagagagagccaggccgtgtacagcctgatcctggtggccagcgacctgggccagcccgtgccctacgagaccatgcagcccctgcaggtggccctggaggacatcgacgacaacgagcccctgttcgtgagaccccccaagggcagcccccagtaccagctgctgaccgtgcccgagcacagccccagaggcaccctggtgggcaacgtgaccggcgccgtggacgccgacgagggccccaacgccatcgtgtactacttcatcgccgccggcaacgaggagaagaacttccacctgcagcccgacggctgcctgctggtgctgagagacctggacagagagagagaggccatcttcagcttcatcgtgaaggccagcagcaacagaagctggaccccccccagaggccccagccccaccctggacctggtggccgacctgaccctgcaggaggtgagagtggtgctggaggacatcaacgaccagccccccagattcaccaaggccgagtacaccgccggcgtggccaccgacgccaaggtgggcagcgagctgatccaggtgctggccctggacgccgacatcggcaacaacagcctggtgttctacagcatcctggccatccactacttcagagccctggccaacgacagcgaggacgtgggccaggtgttcaccatgggcagcatggacggcatcctgagaaccttcgacctgttcatggcctacagccccggctacttcgtggtggacatcgtggccagagacctggccggccacaacgacaccgccatcatcggcatctacatcctgagagacgaccagagagtgaagatcgtgatcaacgagatccccgacagagtgagaggcttcgaggaggagttcatccacctgctgagcaacatcaccggcgccatcgtgaacaccgacaacgtgcagttccacgtggacaagaagggcagagtgaacttcgcccagaccgagctgctgatccacgtggtgaacagagacaccaacagaatcctggacgtggacagagtgatccagatgatcgacgagaacaaggagcagctgagaaacctgttcagaaactacaacgtgctggacgtgcagcccgccatcagcgtgagactgcccgacgacatgagcgccctgcagatggccatcatcgtgctggccatcctgctgttcctggccgccatgctgttcgtgctgatgaactggtactacagaaccgtgcacaagagaaagctgaaggccatcgtggccggcagcgccggcaacagaggcttcatcgacatcatggacatgcccaacaccaacaagtacagcttcgacggcgccaaccccgtgtggctggaccccttctgcagaaacctggagctggccgcccaggccgagcacgaggacgacctgcccgagaacctgagcgagatcgccgacctgtggaacagccccaccagaacccacggcaccttcggcagagagcccgccgccgtgaagcccgacgacgacagatacctgagagccgccatccaggagtacgacaacatcgccaagctgggccagatcatcagagagggccccatcaagctgatccagaccgagctggacgaggagcccggcgaccacagccccggccagggcagcctgagattcagacacaagccccccgtggagctgaagggccccgacggcatccacgtggtgcacggcagcaccggcaccctgctggccaccgacctgaacagcctgcccgaggaggaccagaagggcctgggcagaagcctggagaccctgaccgccgccgaggccaccgccttcgagagaaacgccagaaccgagagcgccaagagcacccccctgcacaagctgagagacgtgatcatggagacccccctggagatcaccgagctgtag

SEQ ID NO: 74895 - DNA, 10080 bp, synthetic construct
  misc_feature 1..10080: note = Description of Artificial Sequence: Synthetic coding sequence
  source 1..10080: mol_type = other DNA
atgggcagacacgtggccaccagctgccacgtggcctggctgctggtgctgatcagcggctgctggggccaggtgaacagactgcccttcttcaccaaccacttcttcgacacctacctgctgatcagcgaggacacccccgtgggcagcagcgtgacccagctgctggcccaggacatggacaacgaccccctggtgttcggcgtgagcggcgaggaggccagcagattcttcgccgtggagcccgacaccggcgtggtgtggctgagacagcccctggacagagagaccaagagcgagttcaccgtggagttcagcgtgagcgaccaccagggcgtgatcaccagaaaggtgaacatccaggtgggcgacgtgaacgacaacgcccccaccttccacaaccagccctacagcgtgagaatccccgaggtgggcgccaccggcaacacccccgtgggcacccccatcttcatcgtgaacgccaccgaccccgacctgggcgccggcggcagcgtgctgtacagcttccagccccccagccagttcttcgccatcgacagcgccagaggcatcgtgaccgtgatcagagagctggactacgagaccacccaggcctaccagctgaccgtgaacgccaccgaccaggacaagaccagacccctgagcaccctggccaacctggccatcatcatcaccgacgtgcaggacatggaccccatcttcatcaacctgccctacagcaccaacatctacgagcacagcccccccggcaccaccgtgagaatcatcaccgccatcgaccaggacaagggcagacccagaggcatcggctacaccatcgtgagcgtggccggcaacaccaacagcatcttcgccctggactacatcagcggcgtgctgaccctgaacggcctgctggacagagagaaccccctgtacagccacggcttcatcctgaccgtgaagggcaccgagctgaacgacgacagaacccccagcgacgccaccgtgaccaccaccttcaacatcctggtgatcgacatcaacgacaacgcccccgagttcaacagcagcgagtacagcgtggccatcaccgagctggcccaggtgggcttcgccctgcccctgttcatccaggtggtggacaaggacgagggcctgaacagcatgttcgaggtgtacctggtgggcaacaacagccaccacttcatcatcagccccaccagcgtgcagggcaaggccgacatcagaatcagagtggccatccccctggactacgagaccgtggacagatacgacttcgacctgttcgccaacgagagcgtgcccgaccacgtgggctacgccaaggtgaagatcaccctgatcaacgagaacgacaacagacccatcttcagccagcccctgtacaacatcagcctgtacgagaacgtgaccgtgggcaccagcgtgctgaccgtgctggccaccgacaacgacgccggcaccttcggcgaggtgagctacttcttcagcgacgaccccgacagattcagcctggacaaggacaccggcctgatcatgctgatcgccagactggactacgagctgatccagagattcaccctgaccatcatcgccagagacggcggcggcgaggagaccaccggcagagtgagaatcaacgtgctggacgtgaacgacaacgtgcccaccttccagaaggacgcctacgtgggcgccctgagagagaacgagcccagcgtgacccagctggtgagactgagagccaccgacgaggacagcccccccaacaaccagatcacctacagcatcgtgagcgccagcgccttcggcagctacttcgacatcagcctgtacgagggctacggcgtgatcagcgtgagcagacccctggactacgagcagatcagcaacggcctgatctacctgaccgtgatggccatggacgccggcaacccccccctgaacagcaccgtgcccgtgaccatcgaggtgttcgacgagaacgacaacccccccaccttcagcaagcccgcctacttcgtgagcgtggtggagaacatcatggccggcgccaccgtgctgttcctgaacgccaccgacctggacagaagcagagagtacggccaggagagcatcatctacagcctggagggcagcacccagttcagaatcaacgccagaagcggcgagatcaccaccaccagcctgctggacagagagaccaagagcgagtacatcctgatcgtgagagccgtggacggcggcgtgggccacaaccagaagaccggcatcgccaccgtgaacatcaccctgctggacatcaacgacaaccaccccacctggaaggacgccccctactacatcaacctggtggagatgaccccccccgacagcgacgtgaccaccgtggtggccgtggaccccgacctgggcgagaacggcaccctggtgtacagcatccagccccccaacaagttctacagcctgaacagcaccaccggcaagatcagaaccacccacgccatgctggacagagagaaccccgacccccacgaggccgagctgatgagaaagatcgtggtgagcgtgaccgactgcggcagaccccccctgaaggccaccagcagcgccaccgtgttcgtgaacctgctggacctgaacgacaacgaccccaccttccagaacctgcccttcgtggccgaggtgctggagggcatccccgccggcgtgagcatctaccaggtggtggccatcgacctggacgagggcctgaacggcctggtgagctacagaatgcccgtgggcatgcccagaatggacttcctgatcaacagcagcagcggcgtggtggtgaccaccaccgagctggacagagagagaatcgccgagtaccagctgagagtggtggccagcgacgccggcacccccaccaagagcagcaccagcaccctgaccatccacgtgctggacgtgaacgacgagacccccaccttcttccccgccgtgtacaacgtgagcgtgagcgaggacgtgcccagagagttcagagtggtgtggctgaactgcaccgacaacgacgtgggcctgaacgccgagctgagctacttcatcaccggcggcaacgtggacggcaagttcagcgtgggctacagagacgccgtggtgagaaccgtggtgggcctggacagagagaccaccgccgcctacatgctgatcctggaggccatcgacaacggccccgtgggcaagagacacaccggcaccgccaccgtgttcgtgaccgtgctggacgtgaacgacaacagacccatcttcctgcagagcagctacgaggccagcgtgcccgaggacatccccgagggccacagcatcctgcagctgaaggccaccgacgccgacgagggcgagttcggcagagtgtggtacagaatcctgcacggcaaccacggcaacaacttcagaatccacgtgagcaacggcctgctgatgagaggccccagacccctggacagagagagaaacagcagccacgtgctgatcgtggaggcctacaaccacgacctgggccccatgagaagcagcgtgagagtgatcgtgtacgtggaggacatcaacgacgaggcccccgtgttcacccagcagcagtacagcagactgggcctgagagagaccgccggcatcggcaccagcgtgatcgtggtgcaggccaccgacagagacagcggcgacggcggcctggtgaactacagaatcctgagcggcgccgagggcaagttcgagatcgacgagagcaccggcctgatcatcaccgtgaactacctggactacgagaccaagaccagctacatgatgaacgtgagcgccaccgaccaggccccccccttcaaccagggcttctgcagcgtgtacatcaccctgctgaacgagctggacgaggccgtgcagttcagcaacgccagctacgaggccgccatcctggagaacctggccctgggcaccgagatcgtgagagtgcaggcctacagcatcgacaacctgaaccagatcacctacagattcaacgcctacaccagcacccaggccaaggccctgttcaagatcgacgccatcaccggcgtgatcaccgtgcagggcctggtggacagagagaagggcgacttctacaccctgaccgtggtggccgacgacggcggccccaaggtggacagcaccgtgcaggtgtacatcaccgtgctggacgagaacgacaacagccccagattcgacttcaccagcgacagcgccgtgagcatccccgaggactgccccgtgggccagagagtggccaccgtgaaggcctgggaccccgacgccggcagcaacggccaggtggtgttcagcctggccagcggcaacatcgccggcgccttcgagatcgtgaccaccaacgacagcatcggcgaggtgttcgtggccagacccctggacagagaggagctggaccactacatcctgcaggtggtggccagcgacagaggcaccccccccagaaagaaggaccacatcctgcaggtgaccatcctggacatcaacgacaacccccccgtgatcgagagccccttcggctacaacgtgagcgtgaacgagaacgtgggcggcggcaccgccgtggtgcaggtgagagccaccgacagagacatcggcatcaacagcgtgctgagctactacatcaccgagggcaacaaggacatggccttcagaatggacagaatcagcggcgagatcgccaccagacccgccccccccgacagagagagacagagcttctaccacctggtggccaccgtggaggacgagggcacccccaccctgagcgccaccacccacgtgtacgtgaccatcgtggacgagaacgacaacgcccccatgttccagcagccccactacgaggtgctgctggacgagggccccgacaccctgaacaccagcctgatcaccatccaggccctggacctggacgagggccccaacggcaccgtgacctacgccatcgtggccggcaacatcgtgaacaccttcagaatcgacagacacatgggcgtgatcaccgccgccaaggagctggactacgagatcagccacggcagatacaccctgatcgtgaccgccaccgaccagtgccccatcctgagccacagactgaccagcaccaccaccgtgctggtgaacgtgaacgacatcaacgacaacgtgcccaccttccccagagactacgagggccccttcgaggtgaccgagggccagcccggccccagagtgtggaccttcctggcccacgacagagacagcggccccaacggccaggtggagtacagcatcatggacggcgaccccctgggcgagttcgtgatcagccccgtggagggcgtgctgagagtgagaaaggacgtggagctggacagagagaccatcgccttctacaacctgaccatctgcgccagagacagaggcatgccccccctgagcagcaccatgctggtgggcatcagagtgctggacatcaacgacaacgaccccgtgctgctgaacctgcccatgaacatcaccatcagcgagaacagccccgtgagcagcttcgtggcccacgtgctggccagcgacgccgacagcggctgcaacgccagactgaccttcaacatcaccgccggcaacagagagagagccttcttcatcaacgccaccaccggcatcgtgaccgtgaacagacccctggacagagagagaatccccgagtacaagctgaccatcagcgtgaaggacaaccccgagaaccccagaatcgccagaagagactacgacctgctgctgatcttcctgagcgacgagaacgacaaccaccccctgttcaccaagagcacctaccaggccgaggtgatggagaacagccccgccggcacccccctgaccgtgctgaacggccccatcctggccctggacgccgaccaggacatctacgccgtggtgacctaccagctgctgggcgcccagagcggcctgttcgacatcaacagcagcaccggcgtggtgaccgtgagaagcggcgtgatcatcgacagagaggccttcagcccccccatcctggagctgctgctgctggccgaggacatcggcctgctgaacagcaccgcccacctgctgatcaccatcctggacgacaacgacaacagacccaccttcagccccgccaccctgaccgtgcacctgctggagaactgcccccccggcttcagcgtgctgcaggtgaccgccaccgacgaggacagcggcctgaacggcgagctggtgtacagaatcgaggccggcgcccaggacagattcctgatccacctggtgaccggcgtgatcagagtgggcaacgccaccatcgacagagaggagcaggagagctacagactgaccgtggtggccaccgacagaggcaccgtgcccctgagcggcaccgccatcgtgaccatcctgatcgacgacatcaacgacagcagacccgagttcctgaaccccatccagaccgtgagcgtgctggagagcgccgagcccggcaccgtgatcgccaacatcaccgccatcgaccacgacctgaaccccaagctggagtaccacatcgtgggcatcgtggccaaggacgacaccgacagactggtgcccaaccaggaggacgccttcgccgtgaacatcaacaccggcagcgtgatggtgaagagccccatgaacagagagctggtggccacctacgaggtgaccctgagcgtgatcgacaacgccagcgacctgcccgagagaagcgtgagcgtgcccaacgccaagctgaccgtgaacgtgctggacgtgaacgacaacaccccccagttcaagcccttcggcatcacctactacatggagagaatcctggagggcgccacccccggcaccaccctgatcgccgtggccgccgtggaccccgacaagggcctgaacggcctggtgacctacaccctgctggacctggtgccccccggctacgtgcagctggaggacagcagcgccggcaaggtgatcgccaacagaaccgtggactacgaggaggtgcactggctgaacttcaccgtgagagccagcgacaacggcagcccccccagagccgccgagatccccgtgtacctggagatcgtggacatcaacgacaacaaccccatcttcgaccagcccagctaccaggaggccgtgttcgaggacgtgcccgtgggcaccatcatcctgaccgtgaccgccaccgacgccgacagcggcaacttcgccctgatcgagtacagcctgggcgacggcgagagcaagttcgccatcaaccccaccaccggcgacatctacgtgctgagcagcctggacagagagaagaaggaccactacatcctgaccgccctggccaaggacaaccccggcgacgtggccagcaacagaagagagaacagcgtgcaggtggtgatccaggtgctggacgtgaacgactgcagaccccagttcagcaagccccagttcagcaccagcgtgtacgagaacgagcccgccggcaccagcgtgatcaccatgatggccaccgaccaggacgagggccccaacggcgagctgacctacagcctggagggccccggcgtggaggccttccacgtggacatggacagcggcctggtgaccacccagagacccctgcagagctacgagaagttcagcctgaccgtggtggccaccgacggcggcgagccccccctgtggggcaccaccatgctgctggtggaggtgatcgacgtgaacgacaacagacccgtgttcgtgagaccccccaacggcaccatcctgcacatcagagaggagatccccctgagaagcaacgtgtacgaggtgtacgccaccgacaaggacgagggcctgaacggcgccgtgagatacagcttcctgaagaccgccggcaacagagactgggagttcttcatcatcgaccccatcagcggcctgatccagaccgcccagagactggacagagagagccaggccgtgtacagcctgatcctggtggccagcgacctgggccagcccgtgccctacgagaccatgcagcccctgcaggtggccctggaggacatcgacgacaacgagcccctgttcgtgagaccccccaagggcagcccccagtaccagctgctgaccgtgcccgagcacagccccagaggcaccctggtgggcaacgtgaccggcgccgtggacgccgacgagggccccaacgccatcgtgtactacttcatcgccgccggcaacgaggagaagaacttccacctgcagcccgacggctgcctgctggtgctgagagacctggacagagagagagaggccatcttcagcttcatcgtgaaggccagcagcaacagaagctggaccccccccagaggccccagccccaccctggacctggtggccgacctgaccctgcaggaggtgagagtggtgctggaggacatcaacgaccagccccccagattcaccaaggccgagtacaccgccggcgtggccaccgacgccaaggtgggcagcgagctgatccaggtgctggccctggacgccgacatcggcaacaacagcctggtgttctacagcatcctggccatccactacttcagagccctggccaacgacagcgaggacgtgggccaggtgttcaccatgggcagcatggacggcatcctgagaaccttcgacctgttcatggcctacagccccggctacttcgtggtggacatcgtggccagagacctggccggccacaacgacaccgccatcatcggcatctacatcctgagagacgaccagagagtgaagatcgtgatcaacgagatccccgacagagtgagaggcttcgaggaggagttcatccacctgctgagcaacatcaccggcgccatcgtgaacaccgacaacgtgcagttccacgtggacaagaagggcagagtgaacttcgcccagaccgagctgctgatccacgtggtgaacagagacaccaacagaatcctggacgtggacagagtgatccagatgatcgacgagaacaaggagcagctgagaaacctgttcagaaactacaacgtgctggacgtgcagcccgccatcagcgtgagactgcccgacgacatgagcgccctgcagatggccatcatcgtgctggccatcctgctgttcctggccgccatgctgttcgtgctgatgaactggtactacagaaccgtgcacaagagaaagctgaaggccatcgtggccggcagcgccggcaacagaggcttcatcgacatcatggacatgcccaacaccaacaagtacagcttcgacggcgccaaccccgtgtggctggaccccttctgcagaaacctggagctggccgcccaggccgagcacgaggacgacctgcccgagaacctgagcgagatcgccgacctgtggaacagccccaccagaacccacggcaccttcggcagagagcccgccgccgtgaagcccgacgacgacagatacctgagagccgccatccaggagtacgacaacatcgccaagctgggccagatcatcagagagggccccatcaagggcagcctgctgaaggtggtgctggaggactacctgagactgaagaagctgttcgcccagagaatggtgcagaaggccagcagctgccacagcagcatcagcgagctgatccagaccgagctggacgaggagcccggcgaccacagccccggccagggcagcctgagattcagacacaagccccccgtggagctgaagggccccgacggcatccacgtggtgcacggcagcaccggcaccctgctggccaccgacctgaacagcctgcccgaggaggaccagaagggcctgggcagaagcctggagaccctgaccgccgccgaggccaccgccttcgagagaaacgccagaaccgagagcgccaagagcacccccctgcacaagctgagagacgtgatcatggagacccccctggagatcaccgagctgtag

SEQ ID NO: 74896 - DNA, 1338 bp, synthetic construct
  misc_feature 1..1338: note = Description of Artificial Sequence: Synthetic coding sequence
  source 1..1338: mol_type = other DNA
atggacaacgaccccctggtgttcggcgtgagcggcgaggaggccagcagattcttcgccgtggagcccgacaccggcgtggtgtggctgagacagcccctggacagagagaccaagagcgagttcaccgtggagttcagcgtgagcgaccaccagggcgtgatcaccagaaaggtgaacatccaggtgggcgacgtgaacgacaacgcccccaccttccacaaccagccctacagcgtgagaatccccgagaacacccccgtgggcacccccatcttcatcgtgaacgccaccgaccccgacctgggcgccggcggcagcgtgctgtacagcttccagccccccagccagttcttcgccatcgacagcgccagaggcatcgtgaccgtgatcagagagctggactacgagaccacccaggcctaccagctgaccgtgaacgccctggccatcatcatcaccaacctgccctacagcaccaacatctacgagcacagcccccccggcaccaccgtgagaatcatcaccgccatcgaccaggacaagggcagacccagaggcatcggctacaccatcgtgagcggcaacaccaacagcatcttcgccctggactacatcagcggcgtgctgaccctgaacggcctgctggacagagagaaccccctgtacagccacggcttcatcctgaccgtgaagggcaccgagctgaacgacgacagaacccccagcgacgccaccgtgaccaccaccttcaacatcctggtgatcgacatcaacgacaacgcccccgagttcaacagcagcgagtacagcgtggccatcaccgagctggcccaggtgggcttcgccctgcccctgttcatccaggtggtggacaaggacgagggcctgaacagcatgttcgaggtgtacctggtgggcaacaacagccaccacttcatcatcagccccaccagcgtgcagggcaaggccgacatcagaatcagagtggccatccccctggactacgagaccgtggacagatacgacttcgacctgttcgccaacgagagcgtgcccgaccacgtgggctacgccaaggtgaagatcaccctgatcaacgagaacgacaacagacccatcttcagccagcccctgtacaacatcagcctgtacgagaacgtgaccgtgggcaccagcgtgctgaccgtgctggtgagccccagattcaccgccggccccctgagcagccccggccccaccgtggtgagacaccccgagggcttctgccccagagacctgagcaaccagggcagaagacacccccagatccccgagctgtgcctgctggtgtactag

SEQ ID NO: 74897 - DNA, 2187 bp, synthetic construct
  misc_feature 1..2187: note = Description of Artificial Sequence: Synthetic coding sequence
  source 1..2187: mol_type = other DNA
gccaccgacaacgacgccggcaccttcggcgaggtgagctacttcttcagcgacgaccccgacagattcagcctggacaaggacaccggcctgatcatgctgatcgccagactggactacgagctgatccagagattcaccctgaccatcatcgccagagacggcggcggcgaggagaccaccggcagagtgagaatcaacgtgctggacgtgaacgacaacgtgcccaccttccagaaggacgcctacgtgggcgccctgagagagaacgagcccagcgtgacccagctggtgagactgagagccaccgacgaggacagcccccccaacaaccagatcacctacagcatcgtgagcgccagcgccttcggcagctacttcgacatcagcctgtacgagggctacggcgtgatcagcgtgagcagacccctggactacgagcagatcagcaacggcctgatctacctgaccgtgatggccatggacgccggcaacccccccctgaacagcaccgtgcccgtgaccatcgaggtgttcgacgagaacgacaacccccccaccttcagcaagcccgcctacttcgtgagcgtggtggagaacatcatggccggcgccaccgtgctgttcctgaacgccaccgacctggacagaagcagagagtacggccaggagagcatcatctacagcctggagggcagcacccagttcagaatcaacgccagaagcggcgagatcaccaccaccagcctgctggacagagagaccaagagcgagtacatcctgatcgtgagagccgtggacggcggcgtgggccacaaccagaagaccggcatcgccaccgtgaacatcaccctgctggacatcaacgacaaccaccccacctggaaggacgccccctactacatcaacctggtggagatgaccccccccgacagcgacgtgaccaccgtggtggccgtggaccccgacctgggcgagaacggcaccctggtgtacagcatccagccccccaacaagttctacagcctgaacagcaccaccggcaagatcagaaccacccacgccatgctggacagagagaaccccgacccccacgaggccgagctgatgagaaagatcgtggtgagcgtgaccgactgcggcagaccccccctgaaggccaccagcagcgccaccgtgttcgtgaacctgctggacctgaacgacaacgaccccaccttccagaacctgcccttcgtggccgaggtgctggagggcatccccgccggcgtgagcatctaccaggtggtggccatcgacctggacgagggcctgaacggcctggtgagctacagaatgcccgtgggcatgcccagaatggacttcctgatcaacagcagcagcggcgtggtggtgaccaccaccgagctggacagagagagaatcgccgagtaccagctgagagtggtggccagcgacgccggcacccccaccaagagcagcaccagcaccctgaccatccacgtgctggacgtgaacgacgagacccccaccttcttccccgccgtgtacaacgtgagcgtgagcgaggacgtgcccagagagttcagagtggtgtggctgaactgcaccgacaacgacgtgggcctgaacgccgagctgagctacttcatcaccggcggcaacgtggacggcaagttcagcgtgggctacagagacgccgtggtgagaaccgtggtgggcctggacagagagaccaccgccgcctacatgctgatcctggaggccatcgacaacggccccgtgggcaagagacacaccggcaccgccaccgtgttcgtgaccgtgctggacgtgaacgacaacagacccatcttcctgcagagcagctacgaggccagcgtgcccgaggacatccccgagggccacagcatcctgcaggaggacctggccagcccctgcatcagccccgccccccccagaagagccttccagagcagcggcgagaaggagaccagccagttccccggcaaggagctgagaagagagcccggccccagcaaggcccagaacagagccgccttcaccgagcccctggccgaggcccccctgctgggcagcaagcaggcccaggaggagagagcccccctgcccagagagcaggcccagcagctgcagggcagcgagggcgagaagggcggcccctag

SEQ ID NO: 74898 - DNA, 2238 bp, synthetic construct
  misc_feature 1..2238: note = Description of Artificial Sequence: Synthetic coding sequence
  source 1..2238: mol_type = other DNA
atgagaagatgcagatgggccgccctggccctgggcctgctgagactgtgcctggcccaggccaacttcgccccccacttcttcgacaacggcgtgggcagcaccaacggcaacatggccctgttcagcctgcccgaggacacccccgtgggcagccacgtgtacaccctgaacggcaccgaccccgagggcgaccccatcagctaccacatcagcttcgaccccagcaccagaagcgtgttcagcgtggaccccaccttcggcaacatcaccctggtggaggagctggacagagagagagaggacgagatcgaggccatcatcagcatcagcgacggcctgaacctggtggccgagaaggtggtgatcctggtgaccgacgccaacgacgaggcccccagattcatccaggagccctacgtggccctggtgcccgaggacatccccgccggcagcatcatcttcaaggtgcacgccgtggacagagacaccggcagcggcggcagcgtgacctacttcctgcagaacctgcacagccccttcgccgtggacagacacagcggcgtgctgagactgcaggccggcgccaccctggactacgagagaagcagaacccactacatcaccgtggtggccaaggacggcggcggcagactgcacggcgccgacgtggtgttcagcgccaccaccaccgtgaccgtgaacgtggaggacgtgcaggacatggcccccgtgttcgtgggcaccccctactacggctacgtgtacgaggacaccctgcccggcagcgaggtgctgaaggtggtggccatggacggcgacagaggcaagcccaacagaatcctgtacagcctggtgaacggcaacgacggcgccttcgagatcaacgagaccagcggcgccatcagcatcacccagagccccgcccagctgcagagagaggtgtacgagctgcacgtgcaggtgaccgagatgagccccgccggcagccccgccgcccaggccaccgtgcccgtgaccatcagaatcgtggacctgaacaaccacccccccaccttctacggcgagagcggcccccagaacagattcgagctgagcatgaacgagcaccccccccagggcgagatcctgagaggcctgaagatcaccgtgaacgacagcgaccagggcgccaacgccaagttcaacctgcagctggtgggccccagaggcatcttcagagtggtgccccagaccgtgctgaacgaggcccaggtgaccatcatcgtggagaacagcgccgccatcgacttcgagaagagcaaggtgctgaccttcaagctgctggccgtggaggtgaacacccccgagaagttcagcagcaccgccgacgtggtgatccagctgctggacaccaacgacaacgtgcccaagttcgacagcctgtactacgtggccagaatccccgagaacgcccccggcggcagcagcgtggtggccgtgaccgccgtggaccccgacaccggcccctggggcgaggtgaagtacagcacctacggcaccggcgccgacctgttcctgatccaccccagcaccggcctgatctacacccagccctgggccagcctggacgccgaggccaccgccagatacaacttctacgtgaaggccgaggacatggagggcaagtacagcgtggccgaggtgttcatcaccctgctggacgtgaacgaccaccccccccagttcggcaagagcgtgcagaagaagaccatggtgctgggcacccccgtgaagatcgaggccatcgacgaggacgccgaggagcccaacaacctggtggactacagcatcacccacgccgagcccgccaacgtgttcgacatcaacagccacaccggcgagatctggctgaagaacagcatcagaagcctggacgccctgcacaacatcacccccggcagagactgcctgtggagcctggaggtgcaggccaaggacagaggcagccccagcttcagcaccaccgccctgctgaagatcgacatcaccgacgccgaggtgagaagactgagatacatgaagaacagcaacttccccggcaccaccaagagcgtgagaaagcccaagttcaagcccaagaagccccacagcagccagggcctgttcctgcacccccactgcgagatcgccctgttcaacctgagcaacgtgaacctgtacagcagagtgttccagggcgccgcccaggccagctag

SEQ ID NO: 74899 - DNA, 2580 bp, synthetic construct
  misc_feature 1..2580: note = Description of Artificial Sequence: Synthetic coding sequence
  source 1..2580: mol_type = other DNA
atgagaagatgcagatgggccgccctggccctgggcctgctgagactgtgcctggcccaggccaacttcgccccccacttcttcgacaacggcgtgggcagcaccaacggcaacatggccctgttcagcctgcccgaggacacccccgtgggcagccacgtgtacaccctgaacggcaccgaccccgagggcgaccccatcagctaccacatcagcttcgaccccagcaccagaagcgtgttcagcgtggaccccaccttcggcaacatcaccctggtggaggagctggacagagagagagaggacgagatcgaggccatcatcagcatcagcgacggcctgaacctggtggccgagaaggtggtgatcctggtgaccgacgccaacgacgaggcccccagattcatccaggagccctacgtggccctggtgcccgaggacatccccgccggcagcatcatcttcaaggtgcacgccgtggacagagacaccggcagcggcggcagcgtgacctacttcctgcagaacctgcacagccccttcgccgtggacagacacagcggcgtgctgagactgcaggccggcgccaccctggactacgagagaagcagaacccactacatcaccgtggtggccaaggacggcggcggcagactgcacggcgccgacgtggtgttcagcgccaccaccaccgtgaccgtgaacgtggaggacgtgcaggacatggcccccgtgttcgtgggcaccccctactacggctacgtgtacgaggacaccctgcccggcagcgaggtgctgaaggtggtggccatggacggcgacagaggcaagcccaacagaatcctgtacagcctggtgaacggcaacgacggcgccttcgagatcaacgagaccagcggcgccatcagcatcacccagagccccgcccagctgcagagagaggtgtacgagctgcacgtgcaggtgaccgagatgagccccgccggcagccccgccgcccaggccaccgtgcccgtgaccatcagaatcgtggacctgaacaaccacccccccaccttctacggcgagagcggcccccagaacagattcgagctgagcatgaacgagcaccccccccagggcgagatcctgagaggcctgaagatcaccgtgaacgacagcgaccagggcgccaacgccaagttcaacctgcagctggtgggccccagaggcatcttcagagtggtgccccagaccgtgctgaacgaggcccaggtgaccatcatcgtggagaacagcgccgccatcgacttcgagaagagcaaggtgctgaccttcaagctgctggccgtggaggtgaacacccccgagaagttcagcagcaccgccgacgtggtgatccagctgctggacaccaacgacaacgtgcccaagttcgacagcctgtactacgtggccagaatccccgagaacgcccccggcggcagcagcgtggtggccgtgaccgccgtggaccccgacaccggcccctggggcgaggtgaagtacagcacctacggcaccggcgccgacctgttcctgatccaccccagcaccggcctgatctacacccagccctgggccagcctggacgccgaggccaccgccagatacaacttctacgtgaaggccgaggacatggagggcaagtacagcgtggccgaggtgttcatcaccctgctggacgtgaacgaccaccccccccagttcggcaagagcgtgcagaagaagaccatggtgctgggcacccccgtgaagatcgaggccatcgacgaggacgccgaggagcccaacaacctggtggactacagcatcacccacgccgagcccgccaacgtgttcgacatcaacagccacaccggcgagatctggctgaagaacagcatcagaagcctggacgccctgcacaacatcacccccggcagagactgcctgtggagcctggaggtgcaggccaaggacagaggcagccccagcttcagcaccaccgccctgctgaagatcgacatcaccgacgccgagaccctgagcagaagccccatggccgccttcctgatccagaccaaggacaaccccatgaaggccgtgggcgtgctggccggcaccatggccaccgtggtggccatcaccgtgctgatcagcaccgccaccttctggagaaacaagaagagcaacaaggtgctgcccatgagaagagtgctgagaaagagacccagccccgcccccagaaccatcagaatcgagtggctgaagagcaagagcaccaaggccgccaccaagttcatgctgaaggagaagccccccaacgagaactgcaacaacaacagccccgagagcagcctgctgcccagagcccccgccctgccccccccccccagcgtggcccccagcaccggcgccgcccagtggaccgtgcccaccgtgagcggcagcctgaccccccagcccacccagcccccccccaagcccaagaccatgggcagccccgtgcagagcaccctgatcagcgagctgaagcagaagttcgagaagaagagcgtgcacaacaaggcctacttctag

SEQ ID NO: 74900 - DNA, 1692 bp, synthetic construct
  misc_feature 1..1692: note = Description of Artificial Sequence: Synthetic coding sequence
  source 1..1692: mol_type = other DNA
atggcccccgtgttcgtgggcaccccctactacggctacgtgtacgaggacaccctgcccggcagcgaggtgctgaaggtggtggccatggacggcgacagaggcaagcccaacagaatcctgtacagcctggtgaacggcaacgacggcgccttcgagatcaacgagaccagcggcgccatcagcatcacccagagccccgcccagctgcagagagaggtgtacgagctgcacgtgcaggtgaccgagatgagccccgccggcagccccgccgcccaggccaccgtgcccgtgaccatcagaatcgtggacctgaacaaccacccccccaccttctacggcgagagcggcccccagaacagattcgagctgagcatgaacgagcaccccccccagggcgagatcctgagaggcctgaagatcaccgtgaacgacagcgaccagggcgccaacgccaagttcaacctgcagctggtgggccccagaggcatcttcagagtggtgccccagaccgtgctgaacgaggcccaggtgaccatcatcgtggagaacagcgccgccatcgacttcgagaagagcaaggtgctgaccttcaaggccgtggaccccgacaccggcccctggggcgaggtgaagtacagcacctacggcaccggcgccgacctgttcctgatccaccccagcaccggcctgatctacacccagccctgggccagcctggacgccgaggccaccgccagatacaacttctacgtgaaggccgaggacatggagggcaagtacagcgtggccgaggtgttcatcaccctgctggacgtgaacgaccaccccccccagttcggcaagagcgtgcagaagaagaccatggtgctgggcacccccgtgaagatcgaggccatcgacgaggacgccgaggagcccaacaacctggtggactacagcatcacccacgccgagcccgccaacgtgttcgacatcaacagccacaccggcgagatctggctgaagaacagcatcagaagcctggacgccctgcacaacatcacccccggcagagactgcctgtggagcctggaggtgcaggccaaggacagaggcagccccagcttcagcaccaccgccctgctgaagatcgacatcaccgacgccgagaccctgagcagaagccccatggccgccttcctgatccagaccaaggacaaccccatgaaggccgtgggcgtgctggccggcaccatggccaccgtggtggccatcaccgtgctgatcagcaccgccaccttctggagaaacaagaagagcaacaaggtgctgcccatgagaagagtgctgagaaagagacccagccccgcccccagaaccatcagaatcgagtggctgaagagcaagagcaccaaggccgccaccaagttcatgctgaaggagaagccccccaacgagaactgcaacaacaacagccccgagagcagcctgctgcccagagcccccgccctgccccccccccccagcgtggcccccagcaccggcgccgcccagtggaccgtgcccaccgtgagcggcagcctgaccccccagcccacccagcccccccccaagcccaagaccatgggcagccccgtgcagagcaccctgatcagcgagctgaagcagaagttcgagaagaagagcgtgcacaacaaggcctacttctag

SEQ ID NO: 74901 - DNA, 1464 bp, synthetic construct
  misc_feature 1..1464: note = Description of Artificial Sequence: Synthetic coding sequence
  source 1..1464: mol_type = other DNA
atgggcagctgggccctgctgtggccccccctgctgttcaccggcctgctggtgagaccccccggcaccatggcccaggcccagtactgcagcgtgaacaaggacatcttcgaggtggaggagaacaccaacgtgaccgagcccctggtggacatccacgtgcccgagggccaggaggtgaccctgggcgccctgagcacccccttcgccttcagaatccagggcaaccagctgttcctgaacgtgacccccgactacgaggagaagagcctgctggaggcccagctgctgtgccagagcggcggcaccctggtgacccagctgagagtgttcgtgagcgtgctggacgtgaacgacaacgcccccgagttccccttcaagaccaaggagatcagagtggaggaggacaccaaggtgaacagcaccgtgatccccgagacccagctgcaggccgaggacagagacaaggacgacatcctgttctacaccctgcaggagatgaccgccggcgccagcgactacttcagcctggtgagcgtgaacagacccgccctgagactggacagacccctggacttctacgagagacccaacatgaccttctggctgctggtgagagacacccccggcgagaacgtggagcccagccacaccgccaccgccaccctggtgctgaacgtggtgcccgccgacctgagacccccctggttcctgccctgcaccttcagcgacggctacgtgtgcatccaggcccagtaccacggcgccgtgcccaccggccacatcctgcccagccccctggtgctgagacccggccccatctacgccgaggacggcgacagaggcatcaaccagcccatcatctacagcatcttcagaggcaacgtgaacggcaccttcatcatccaccccgacagcggcaacctgaccgtggccagaagcgtgcccagccccatgaccttcctgctgctggtgaagggccagcaggccgacctggccagatacagcgtgacccaggtgaccgtggaggccgtggccgccgccggcagcccccccagattcccccagagactgtacagaggcaccgtggccagaggcgccggcgccggcgtggtggtgaaggacgccgccgcccccagccagcccctgagaatccaggcccaggaccccgagttcagcgacctgaacagcgccatcacctacagaatcaccaaccacagccacttcagaatggagggcgaggtggtgctgaccaccaccaccctggcccaggccggcgccttctacgccgagccccccacctgcaccggcgacctgagacaccccgcccacctgagaccccccgcccccgaccccacccagagactgcccggcgaggccgaggagcccatgcagacccccaaggccacccacctgggcgccggcggcctgaagcacctgcccggcgtgctggtgcccttctag

SEQ ID NO: 74902 - DNA, 1956 bp, synthetic construct
  misc_feature 1..1956: note = Description of Artificial Sequence: Synthetic coding sequence
  source 1..1956: mol_type = other DNA
atgggcagctgggccctgctgtggccccccctgctgttcaccggcctgctggtgagaccccccggcaccatggcccaggcccagtactgcagcgtgaacaaggacatcttcgaggtggaggagaacaccaacgtgaccgagcccctggtggacatccacgtgcccgagggccaggaggtgaccctgggcgccctgagcacccccttcgccttcagaatccagggcaaccagctgttcctgaacgtgacccccgactacgaggagaagagcctgctggaggcccagctgctgtgccagagcggcggcaccctggtgacccagctgagagtgttcgtgagcgtgctggacgtgaacgacaacgcccccgagttccccttcaagaccaaggagatcagagtggaggaggacaccaaggtgaacagcaccgtgatccccgagacccagctgcaggccgaggacagagacaaggacgacatcctgttctacaccctgcaggagatgaccgccggcgccagcgactacttcagcctggtgagcgtgaacagacccgccctgagactggacagacccctggacttctacgagagacccaacatgaccttctggctgctggtgagagacacccccggcgagaacgtggagcccagccacaccgccaccgccaccctggtgctgaacgtggtgcccgccgacctgagacccccctggttcctgccctgcaccttcagcgacggctacgtgtgcatccaggcccagtaccacggcgccgtgcccaccggccacatcctgcccagccccctggtgctgagacccggccccatctacgccgaggacggcgacagaggcatcaaccagcccatcatctacagcatcttcagaggcaacgtgaacggcaccttcatcatccaccccgacagcggcaacctgaccgtggccagaagcgtgcccagccccatgaccttcctgctgctggtgaagggccagcaggccgacctggccagatacagcgtgacccaggtgaccgtggaggccgtggccgccgccggcagcccccccagattcccccagagactgtacagaggcaccgtggccagaggcgccggcgccggcgtggtggtgaaggacgccgccgcccccagccagcccctgagaatccaggcccaggaccccgagttcagcgacctgaacagcgccatcacctacagaatcaccaaccacagccacttcagaatggagggcgaggtggtgctgaccaccaccaccctggcccaggccggcgccttctacgccgaggtggaggcccacaacaccgtgaccagcggcaccgccaccaccgtgatcgagatccaggtgagcgagcaggagccccccagcaccggcggcggccccagcgaggacaagagattcagcgtggtggacatggccgccctgggcggcgtgctgggcgccctgctgctgctggccctgctgggcctggccgtgctggtgcacaagcactacggccccagactgaagtgctgctgcggcaaggcccccgagccccagccccagggcttcgacaaccaggccttcctgcccgaccacaaggccaactgggcccccgtgcccagccccacccacgaccccaagcccgccgaggcccccatgcccgccgagcccgccccccccggccccgccagccccggcggcgcccccgagccccccgccgccgccagagccggcggcagccccaccgccgtgagaagcatcctgaccaaggagagaagacccgagggcggctacaaggccgtgtggttcggcgaggacatcggcaccgaggccgacgtggtggtgctgaacgcccccaccctggacgtggacggcgccagcgacagcggcagcggcgacgagggcgagggcgccggcagaggcggcggcccctacgacgcccccggcggcgacgacagctacatctag

SEQ ID NO: 74903 - DNA, 2538 bp, synthetic construct
  misc_feature 1..2538: note = Description of Artificial Sequence: Synthetic coding sequence
  source 1..2538: mol_type = other DNA
atgggcagctgggccctgctgtggccccccctgctgttcaccggcctgctggtgagaccccccggcaccatggcccaggcccagtactgcagcgtgaacaaggacatcttcgaggtggaggagaacaccaacgtgaccgagcccctggtggacatccacgtgcccgagggccaggaggtgaccctgggcgccctgagcacccccttcgccttcagaatccagggcaaccagctgttcctgaacgtgacccccgactacgaggagaagagcctgctggaggcccagctgctgtgccagagcggcggcaccctggtgacccagctgagagtgttcgtgagcgtgctggacgtgaacgacaacgcccccgagttccccttcaagaccaaggagatcagagtggaggaggacaccaaggtgaacagcaccgtgatccccgagacccagctgcaggccgaggacagagacaaggacgacatcctgttctacaccctgcaggagatgaccgccggcgccagcgactacttcagcctggtgagcgtgaacagacccgccctgagactggacagacccctggacttctacgagagacccaacatgaccttctggctgctggtgagagacacccccggcgagaacgtggagcccagccacaccgccaccgccaccctggtgctgaacgtggtgcccgccgacctgagacccccctggttcctgccctgcaccttcagcgacggctacgtgtgcatccaggcccagtaccacggcgccgtgcccaccggccacatcctgcccagccccctggtgctgagacccggccccatctacgccgaggacggcgacagaggcatcaaccagcccatcatctacagcatcttcagaggcaacgtgaacggcaccttcatcatccaccccgacagcggcaacctgaccgtggccagaagcgtgcccagccccatgaccttcctgctgctggtgaagggccagcaggccgacctggccagatacagcgtgacccaggtgaccgtggaggccgtggccgccgccggcagcccccccagattcccccagagactgtacagaggcaccgtggccagaggcgccggcgccggcgtggtggtgaaggacgccgccgcccccagccagcccctgagaatccaggcccaggaccccgagttcagcgacctgaacagcgccatcacctacagaatcaccaaccacagccacttcagaatggagggcgaggtggtgctgaccaccaccaccctggcccaggccggcgccttctacgccgaggtggaggcccacaacaccgtgaccagcggcaccgccaccaccgtgatcgagatccaggtgagcgagcaggagccccccagcaccgacgtgccccccagccccgaggccggcggcaccaccggcccctggaccagcaccaccagcgaggtgcccagaccccccgagcccagccagggccccagcaccaccagcagcggcggcggcaccggcccccacccccccagcggcaccaccctgagaccccccaccagcagcacccccggcggcccccccggcgccgagaacagcaccagccaccagcccgccacccccggcggcgacaccgcccagacccccaagcccggcaccagccagcccatgccccccggcgtgggcaccagcaccagccaccagcccgccacccccagcggcggcaccgcccagacccccgagcccggcaccagccagcccatgccccccagcatgggcaccagcaccagccaccagcccgccacccccggcggcggcaccgcccagacccccgaggccggcaccagccagcccatgccccccggcatgggcaccagcaccagccaccagcccaccacccccggcggcggcaccgcccagacccccgagcccggcaccagccagcccatgcccctgagcaagagcacccccagcagcggcggcggccccagcgaggacaagagattcagcgtggtggacatggccgccctgggcggcgtgctgggcgccctgctgctgctggccctgctgggcctggccgtgctggtgcacaagcactacggccccagactgaagtgctgctgcggcaaggcccccgagccccagccccagggcttcgacaaccaggccttcctgcccgaccacaaggccaactgggcccccgtgcccagccccacccacgaccccaagcccgccgaggcccccatgcccgccgagcccgccccccccggccccgccagccccggcggcgcccccgagccccccgccgccgccagagccggcggcagccccaccgccgtgagaagcatcctgaccaaggagagaagacccgagggcggctacaaggccgtgtggttcggcgaggacatcggcaccgaggccgacgtggtggtgctgaacgcccccaccctggacgtggacggcgccagcgacagcggcagcggcgacgagggcgagggcgccggcagaggcggcggcccctacgacgcccccggcggcgacgacagctacatctag

SEQ ID NO: 74904 - DNA, 2538 bp, synthetic construct; identical to SEQ ID NO: 74903
  misc_feature 1..2538: note = Description of Artificial Sequence: Synthetic coding sequence
  source 1..2538: mol_type = other DNA

SEQ ID NO: 74905 - DNA, 786 bp, synthetic construct
  misc_feature 1..786: note = Description of Artificial Sequence: Synthetic coding sequence
  source 1..786: mol_type = other DNA
atggccgagagccacctgcagagcagcctgatcaccgccagccagttcttcgagatctggctgcacttcgacgccgacggcagcggctacctggagggcaaggagctgcagaacctgatccaggagctgcagcaggccagaaagaaggccggcctggagctgagccccgagatgaagaccttcgtggaccagtacggccagagagacgacggcaagatcggcatcgtggagctggcccacgtgctgcccaccgaggagaacttcctgctgctgttcagatgccagcagctgaagagctgcgaggagttcatgaagacctggagaaagtacgacaccgaccacagcggcttcatcgagaccgaggagctgaagaacttcctgaaggacctgctggagaaggccaacaagaccgtggacgacaccaagctggccgagtacaccgacctgatgctgaagctgttcgacagcaacaacgacggcaagctggagctgaccgagatggccagactgctgcccgtgcaggagaacttcctgctgaagttccagggcatcaagatgtgcggcaaggagttcaacaaggccttcgagctgtacgaccaggacggcaacggctacatcgacgagaacgagctggacgccctgctgaaggacctgtgcgagaagaacaagcaggacctggacatcaacaacatcaccacctacaagaagaacatcatggccctgagcgacggcggcaagctgtacagaaccgacctggccctgatcctgtgcgccggcgacaactag

SEQ ID NO: 74906 - DNA, 615 bp, synthetic construct
  misc_feature 1..615: note = Description of Artificial Sequence: Synthetic coding sequence
  source 1..615: mol_type = other DNA
atgaagaccttcgtggaccagtacggccagagagacgacggcaagatcggcatcgtggagctggcccacgtgctgcccaccgaggagaacttcctgctgctgttcagatgccagcagctgaagagctgcgaggagttcatgaagacctggagaaagtacgacaccgaccacagcggcttcatcgagaccgaggagctgaagaacttcctgaaggacctgctggagaaggccaacaagaccgtggacgacaccaagctggccgagtacaccgacctgatgctgaagctgttcgacagcaacaacgacggcaagctggagctgaccgagatggccagactgctgcccgtgcaggagaacttcctgctgaagttccagggcatcaagatgtgcggcaaggagttcaacaaggccttcgagctgtacgaccaggacggcaacggctacatcgacgagaacgagctggacgccctgctgaaggacctgtgcgagaagaacaagcaggacctggacatcaacaacatcaccacctacaagaagaacatcatggccctgagcgacggcggcaagctgtacagaaccgacctggccctgatcctgtgcgccggcgacaactag

SEQ ID NO: 74907 - DNA, 816 bp, synthetic construct
  misc_feature 1..816: note = Description of Artificial Sequence: Synthetic coding sequence
  source 1..816: mol_type = other DNA
atggccggcccccagcagcagcccccctacctgcacctggccgagctgaccgccagccagttcctggagatctggaagcacttcgacgccgacggcaacggctacatcgagggcaaggagctggagaacttcttccaggagctggagaaggccagaaagggcagcggcatgatgagcaagagcgacaacttcggcgagaagatgaaggagttcatgcagaagtacgacaagaacagcgacggcaagatcgagatggccgagctggcccagatcctgcccaccgaggagaacttcctgctgtgcttcagacagcacgtgggcagcagcgccgagttcatggaggcctggagaaagtacgacaccgacagaagcggctacatcgaggccaacgagctgaagggcttcctgagcgacctgctgaagaaggccaacagaccctacgacgagcccaagctgcaggagtacacccagaccatcctgagaatgttcgacctgaacggcgacggcaagctgggcctgagcgagatgagcagactgctgcccgtgcaggagaacttcctgctgaagttccagggcatgaagctgaccagcgaggagttcaacgccatcttcaccttctacgacaaggacagaagcggctacatcgacgagcacgagctggacgccctgctgaaggacctgtacgagaagaacaagaaggagatgaacatccagcagctgaccaactacagaaagagcgtgatgagcctggccgaggccggcaagctgtacagaaaggacctggagatcgtgctgtgcagcgagccccccatgtag

SEQ ID NO: 74908 - DNA, 579 bp, synthetic construct
  misc_feature 1..579: note = Description of Artificial Sequence: Synthetic coding sequence
  source 1..579: mol_type = other DNA
atggccggcccccagcagcagcccccctacctgcacctggccgagctgaccgccagccagttcctggagatctggaagcacttcgacgccgacggcaacggctacatcgagggcaaggagctggagaacttcttccaggagctggagaaggccagaaagggcagcggcatgatgagcaagagcgacaacttcggcgagaagatgaaggagttcatgcagaagtacgacaagaacagcgacggcaagatcgagatggccgagctggcccagatcctgcccaccgaggagaacttcctgctgtgcttcagacagcacgtgggcagcagcgccgagttcatggaggcctggagaaagtacgacaccgacagaagcggctacatcgaggccaacgagctgaagggcttcctgagcgacctgctgaagaaggccaacagaccctacgacgagcccaagctgcaggagtacacccagaccatcctgagaatgttcgacctgaacggcgacggcaagctgggcctgagcgagatgagcagaatcgaggccgccaccctgaccagcatgagctggatgcccttctag

SEQ ID NO: 74909 - DNA, 6663 bp, synthetic construct
  misc_feature 1..6663: note = Description of Artificial Sequence: Synthetic coding sequence
  source 1..6663: mol_type = other DNA
atgatcagaatcgccgccctgaacgccagcagcaccatcgaggacgaccacgagggcagcttcaagagccacaagacccagaccaaggaggcccaggaggccgaggccttcgccctgtaccacaaggccctggacctgcagaagcacgacagattcgaggagagcgccaaggcctaccacgagctgctggaggccagcctgctgagagaggccgtgagcagcggcgacgagaaggagggcctgaagcaccccggcctgatcctgaagtacagcacctacaagaacctggcccagctggccgcccagagagaggacctggagaccgccatggagttctacctggaggccgtgatgctggacagcaccgacgtgaacctgtggtacaagatcggccacgtggccctgagactgatcagaatccccctggccagacacgccttcgaggagggcctgagatgcaaccccgaccactggccctgcctggacaacctgatcaccgtgctgtacaccctgagcgactacaccacctgcctgtacttcatctgcaaggccctggagaaggactgcagatacagcaagggcctggtgctgaaggagaagatcttcgaggagcagccctgcctgagaaaggacagcctgagaatgttcctgaagtgcgacatgagcatccacgacgtgagcgtgagcgccgccgagacccaggccatcgtggacgaggccctgggcctgagaaagaagagacaggccctgatcgtgagagagaaggagcccgacctgaagctggtgcagcccatccccttcttcacctggaagtgcctgggcgagagcctgctggccatgtacaaccacctgaccacctgcgagccccccagacccagcctgggcaagagaatcgacctgagcgactaccaggaccccagccagcccctggagagcagcatggtggtgacccccgtgaacgtgatccagcccagcaccgtgagcaccaaccccgccgtggccgtggccgagcccgtggtgagctacaccagcgtggccaccaccagcttccccctgcacagccccggcctgctggagaccggcgcccccgtgggcgacatcagcggcggcgacaagagcaagaagggcgtgaagagaaagaagatcagcgaggagagcggcgagaccgccaagagaagaagcgccagagtgagaaacaccaagtgcaagaaggaggagaaggtggacttccaggagctgctgatgaagttcctgcccagcagactgagaaagctggaccccgaggaggaggacgacagcttcaacaactacgaggtgcagagcgaggccaagctggagagcttccccagcatcggcccccagagactgagcttcgacagcgccaccttcatggagagcgagaagcaggacgtgcacgagttcctgctggagaacctgaccaacggcggcatcctggagctgatgatgagatacctgaaggccatgggccacaagttcctggtgagatggccccccggcctggccgaggtggtgctgagcgtgtaccacagctggagaagacacagcaccagcctgcccaaccccctgctgagagactgcagcaacaagcacatcaaggacatgatgctgatgagcctgagctgcatggagctgcagctggaccagtggctgctgaccaagggcagaagcagcgccgtgagccccagaaactgccccgccggcatggtgaacggcagattcggccccgacttccccggcacccactgcctgggcgacctgctgcagctgagcttcgccagcagccagagagacctgttcgaggacggctggctggagttcgtggtgagagtgtactggctgaaggccagattcctggccctgcagggcgacatggagcaggccctggagaactacgacatctgcaccgagatgctgcagagcagcaccgccatccaggtggaggccggcgccgagagaagagacatcgtgatcagactgcccaacctgcacaacgacagcgtggtgagcctggaggagatcgacaagaacctgaagagcctggagagatgccagagcctggaggagatccagagactgtacgaggccggcgactacaaggccgtggtgcacctgctgagacccaccctgtgcaccagcggcttcgacagagccaagcacctggagttcatgaccagcatccccgagagacccgcccagctgctgctgctgcaggacagcctgctgagactgaaggactacagacagtgcttcgagtgcagcgacgtggccctgaacgaggccgtgcagcagatggtgaacagcggcgaggccgccgccaaggaggagtgggtggccaccgtgacccagctgctgatgggcatcgagcaggccctgagcgccgacagcagcggcagcatcctgaaggtgagcagcagcaccaccggcctggtgagactgaccaacaacctgatccaggtgatcgactgcagcatggccgtgcaggaggaggccaaggagccccacgtgagcagcgtgctgccctggatcatcctgcacagaatcatctggcaggaggaggacaccttccacagcctgtgccaccagcagcagctgcagaaccccgccgaggagggcatgagcgagacccccatgctgcccagcagcctgatgctgctgaacaccgcccacgagtacctgggcagaagaagctggtgctgcaacagcgacggcgccctgctgagattctacgtgagagtgctgcagaaggagctggccgccagcaccagcgaggacacccacccctacaaggaggagctggagaccgccctggagcagtgcttctactgcctgtacagcttccccagcaagaagagcaaggccagatacctggaggagcacagcgcccagcaggtggacctgatctgggaggacgccctgttcatgttcgagtacttcaagcccaagaccctgcccgagttcgacagctacaagaccagcaccgtgagcgccgacctggccaacctgctgaagagaatcgccaccatcgtgcccagaaccgagagacccgccctgagcctggacaaggtgagcgcctacatcgagggcaccagcaccgaggtgccctgcctgcccgagggcgccgaccccagcccccccgtggtgaacgagctgtactacctgctggccgactaccacttcaagaacaaggagcagagcaaggccatcaagttctacatgcacgacatctgcatctgccccaacagattcgacagctgggccggcatggccctggccagagccagcagaatccaggacaagctgaacagcaacgagctgaagagcgacggccccatctggaagcacgccacccccgtgctgaactgcttcagaagagccctggagatcgacagcagcaacctgagcctgtggatcgagtacggcaccatgagctacgccctgcacagcttcgccagcagacagctgaagcagtggagaggcgagctgccccccgagctggtgcagcagatggagggcagaagagacagcatgctggagaccgccaagcactgcttcaccagcgccgccagatgcgagggcgacggcgacgaggaggagtggctgatccactacatgctgggcaaggtggccgagaagcagcagcagccccccaccgtgtacctgctgcactacagacaggccggccactacctgcacgaggaggccgccagataccccaagaagatccactaccacaacccccccgagctggccatggaggccctggaggtgtacttcagactgcacgccagcatcctgaagctgctgggcaagcccgacagcggcgtgggcgccgaggtgctggtgaacttcatgaaggaggccgccgagggccccttcgccagaggcgaggagaagaacacccccaaggccagcgagaaggagaaggcctgcctggtggacgaggacagccacagcagcgccggcaccctgcccggccccggcgccagcctgcccagcagcagcggccccggcctgaccagccccccctacaccgccacccccatcgaccacgactacgtgaagtgcaagaagccccaccagcaggccacccccgacgacagaagccaggacagcaccgccgtggccctgagcgacagcagcagcacccaggacttcttcaacgagcccaccagcctgctggagggcagcagaaagagctacaccgagaagagactgcccatcctgagcagccaggccggcgccaccggcaaggacctgcagggcgccaccgaggagagaggcaagaacgaggagagcctggagagcaccgagggcttcagagccgccgagcagggcgtgcagaagcccgccgccgagacccccgccagcgcctgcatccccggcaagcccagcgccagcacccccaccctgtgggacggcaagaagagaggcgacctgcccggcgagcccgtggccttcccccagggcctgcccgccggcgccgaggagcagagacagttcctgaccgagcagtgcatcgccagcttcagactgtgcctgagcagattcccccagcactacaagagcctgtacagactggccttcctgtacacctacagcaagacccacagaaacctgcagtgggccagagacgtgctgctgggcagcagcatcccctggcagcagctgcagcacatgcccgcccagggcctgttctgcgagagaaacaagaccaacttcttcaacggcatctggagaatccccgtggacgagatcgacagacccggcagcttcgcctggcacatgaacagaagcatcgtgctgctgctgaaggtgctggcccagctgagagaccacagcaccctgctgaaggtgagcagcatgctgcagagaacccccgaccagggcaagaagtacctgagagacgccgacagacaggtgctggcccagagagccttcatcctgaccgtgaaggtgctggaggacaccctgagcgagctggccgagggcagcgagagacccggccccaaggtgtgcggcctgcccggcgccagaatgaccaccgacgtgagccacaaggccagccccgaggacggccaggagggcctgccccagcccaagaagccccccctggccgacggcagcggccccggccccgagcccggcggcaaggtgggcctgctgaaccacagacccgtggccatggacgccggcgacagcgccgaccagagcggcgagagaaaggacaaggagagccccagagccggccccaccgagcccatggacaccagcgaggccaccgtgtgccacagcgacctggagagaaccccccccctgctgcccggcagacccgccagagacagaggccccgagagcagacccaccgagctgagcctggaggagctgagcatcagcgccagacagcagcccacccccctgacccccgcccagcccgcccccgcccccgcccccgccaccaccaccggcaccagagccggcggccaccccgaggagcccctgagcagactgagcagaaagagaaagctgctggaggacaccgagagcggcaagaccctgctgctggacgcctacagagtgtggcagcagggccagaagggcgtggcctacgacctgggcagagtggagagaatcatgagcgagacctacatgctgatcaagcaggtggacgaggaggccgccctggagcaggccgtgaagttctgccaggtgcacctgggcgccgccgcccagagacaggccagcggcgacacccccaccacccccaagcaccccaaggacagcagagagaacttcttccccgtgaccgtggtgcccaccgcccccgaccccgtgcccgccgacagcgtgcagagacccagcgacgcccacaccaagcccagacccgccctggccgccgccaccaccatcatcacctgcccccccagcgccagcgccagcaccctggaccagagcaaggaccccggcccccccagaccccacagacccgaggccacccccagcatggccagcctgggccccgagggcgaggagctggccagagtggccgagggcaccagcttccccccccaggagcccagacacagcccccaggtgaagatggcccccaccagcagccccgccgagccccactgctggcccgccgaggccgccctgggcaccggcgccgagcccacctgcagccaggagggcaagctgagacccgagcccagaagagacggcgaggcccaggaggccgccagcgagacccagcccctgagcagcccccccaccgccgccagcagcaaggcccccagcagcggcagcgcccagccccccgagggccaccccggcaagcccgagcccagcagagccaagagcagacccctgcccaacatgcccaagctggtgatccccagcgccgccaccaagttcccccccgagatcaccgtgaccccccccacccccaccctgctgagccccaagggcagcatcagcgaggagaccaagcagaagctgaagagcgccatcctgagcgcccagagcgccgccaacgtgagaaaggagagcctgtgccagcccgccctggaggtgctggagaccagcagccaggagagcagcctggagagcgagaccgacgaggacgacgactacatggacatctag

SEQ ID NO: 74910 - DNA, 6663 bp, synthetic construct; identical to SEQ ID NO: 74909
  misc_feature 1..6663: note = Description of Artificial Sequence: Synthetic coding sequence
  source 1..6663: mol_type = other DNA

SEQ ID NO: 74911 - DNA, 1770 bp, synthetic construct
  misc_feature 1..1770: note = Description of Artificial Sequence: Synthetic coding sequence
  source 1..1770: mol_type = other DNA
atgcccagaagaagcagaagaggcatctggagaatccccgtggacgagatcgacagacccggcagcttcgcctggcacatgaacagaagcatcgtgctgctgctgaaggtgctggcccagctgagagaccacagcaccctgctgaaggtgagcagcatgctgcagagaacccccgaccagggcaagaagtacctgagagacgccgacagacaggtgctggcccagagagccttcatcctgaccgtgaaggtgctggaggacaccctgagcgagctggccgagggcagcgagagacccggccccaaggtgtgcggcctgcccggcgccagaatgaccaccgacgtgagccacaaggccagccccgaggacggccaggagggcctgccccagcccaagaagccccccctggccgacggcagcggccccggccccgagcccggcggcaaggtgggcctgctgaaccacagacccgtggccatggacgccggcgacagcgccgaccagagcggcgagagaaaggacaaggagagccccagagccggccccaccgagcccatggacaccagcgaggccaccgtgtgccacagcgacctggagagaaccccccccctgctgcccggcagacccgccagagacagaggccccgagagcagacccaccgagctgagcctggaggagctgagcatcagcgccagacagcagcccacccccctgacccccgcccagcccgcccccgcccccgcccccgccaccaccaccggcaccagagccggcggccaccccgaggagcccctgagcagactgagcagaaagagaaagctgctggaggacaccgagagcggcaagaccctgctgctggacgcctacagagtgtggcagcagggccagaagggcgtggcctacgacctgggcagagtggagagaatcatgagcgagacctacatgctgatcaagcaggtggacgaggaggccgccctggagcaggccgtgaagttctgccaggtgcacctgggcctgccccccagagacagacccagagacacccccaccacccccaagcaccccaaggacagcagagagaacttcttccccgtgaccgtggtgcccaccgcccccgaccccgtgcccgccgacagcgtgcagagacccagcgacgcccacaccaagcccagacccgccctggccgccgccaccaccatcatcacctgcccccccagcgccagcgccagcaccctggaccagagcaaggaccccggcccccccagaccccacagacccgaggccacccccagcatggccagcctgggccccgagggcaagctgagacccgagcccagaagagacggcgaggcccaggaggccgccagcgagacccagcccctgagcagcccccccaccgccgccagcagcaaggcccccagcagcggcagcgcccagccccccgagggccaccccggcaagcccgagcccagcagagccaagagcagacccctgcccaacatgcccaagctggtgatccccagcgccgccaccaagttcccccccgagatcaccgtgaccccccccacccccaccctgctgagccccaagggcagcatcagcgaggagaccaagcagaagctgaagagcgccatcctgagcgcccagagcgccgccaacgtgagaaaggagagcctgtgccagcccgccctggaggtgctggagaccagcagccaggagagcagcctggagagcgagaccgacgaggacgacgactacatggacatctag

SEQ ID NO: 74912 - DNA, 1224 bp, synthetic construct
  misc_feature 1..1224: note = Description of Artificial Sequence: Synthetic coding sequence
  source 1..1224: mol_type = other DNA
atgatcagaatcgccgccctgaacgccagcagcaccatcgaggacgaccacgagggcagcttcaagagccacaagacccagaccaaggaggcccaggaggccgaggccttcgccctgtaccacaaggccctggacctgcagaagcacgacagattcgaggagagcgccaaggcctaccacgagctgctggaggccagcctgctgagagaggccgtgagcagcggcgacgagaaggagggcctgaagcaccccggcctgatcctgaagtacagcacctacaagaacctggcccagctggccgcccagagagaggacctggagaccgccatggagttctacctggaggccgtgatgctggacagcaccgacgtgaacctgtggtacaagatcggccacgtggccctgagactgatcagaatccccctggccagacacgccttcgaggagggcctgagatgcaaccccgaccactggccctgcctggacaacctgatcaccgtgctgtacaccctgagcgactacaccacctgcctgtacttcatctgcaaggccctggagaaggactgcagatacagcaagggcctggtgctgaaggagaagatcttcgaggagcagccctgcctgagaaaggacagcctgagaatgttcctgaagtgcgacatgagcatccacgacgtgagcgtgagcgccgccgagacccaggccatcgtggacgaggccctgggcctgagaaagaagagacaggccctgatcgtgagagagaaggagcccgacctgaagctggtgcagcccatccccttcttcacctggaagtgcctgggcgagagcctgctggccatgtacaaccacctgaccacctgcgagccccccagacccagcctgggcaagagaatcgacctgagcgactaccaggaccccagccagcccctggagagcagcatggtggtgacccccgtgaacgtgatccagcccagcaccgtgagcaccaaccccgccgtggccgtggccgagcccgtggtgagctacaccagcgtggccaccaccagcttccccctgcacagccccggcctgctggagaccggcgcccccgtgggcgacatcagcggcggcgacaagagcaagaagggcgtgaagagaaagaagatcagcgaggagagcggcgagaccgccaagagaagaagcgccagagtgagaaacaccaagtgcaagaaggaggagaagtag

SEQ ID NO: 74913 - DNA, 1527 bp, synthetic construct
  misc_feature 1..1527: note = Description of Artificial Sequence: Synthetic coding sequence
  source 1..1527: mol_type = other DNA
atgcagttcagcggcgagaagatcagcggccagagagacctgcagaagagcaagatgagattcaccttcaccagcagatgcctggccctgttcctgctgctgaaccaccccacccccatcctgcccgccttcagcaaccagacctaccccaccatcgagcccaagcccttcctgtacgtggtgggcagaaagaagatgatggacgcccagtacaagtgctacgacagaatgcagcagctgcccgcctaccagggcgagggcccctactgcaacagaacctgggacggctggctgtgctgggacgacacccccgccggcgtgctgagctaccagttctgccccgactacttccccgacttcgaccccagcgagaaggtgaccaagtactgcgacgagaagggcgtgtggttcaagcaccccgagaacaacagaacctggagcaactacaccatgtgcaacgccttcacccccgagaagctgaagaacgcctacgtgctgtactacctggccatcgtgggccacagcctgagcatcttcaccctggtgatcagcctgggcatcttcgtgttcttcagaaagctgaccaccatcttccccctgaactggaagtacagaaaggccctgagcctgggctgccagagagtgaccctgcacaagaacatgttcctgacctacatcctgaacagcatgatcatcatcatccacctggtggaggtggtgcccaacggcgagctggtgagaagagaccccgtgagctgcaagatcctgcacttcttccaccagtacatgatggcctgcaactacttctggatgctgtgcgagggcatctacctgcacaccctgatcgtggtggccgtgttcaccgagaagcagagactgagatggtactacctgctgggctggggcttccccctggtgcccaccaccatccacgccatcaccagagccgtgtacttcaacgacaactgctggctgagcgtggagacccacctgctgtacatcatccacggccccgtgatggccgccctggtggtgaacttcttcttcctgctgaacatcgtgagagtgctggtgaccaagatgagagagacccacgaggccgagagccacatgtacctgaaggccgtgaaggccaccatgatcctggtgcccctgctgggcatccagttcgtggtgttcccctggagacccagcaacaagatgctgggcaagatctacgactacgtgatgcacagcctgatccacttccagggcttcttcgtggccaccatctactgcttctgcaacaacgaggtgcagaccaccgtgaagagacagtgggcccagttcaagatccagtggaaccagagatggggcagaagacccagcaacagaagcgccagagccgccgccgccgccgccgaggccggcgacatccccatctacatctgccaccaggagctgagaaacgagcccgccaacaaccagggcgaggagagcgccgagatcatccccctgaacatcatcgagcaggagagcagcgcctag

SEQ ID NO: 74914 - DNA, 1473 bp, synthetic construct
  misc_feature 1..1473: note = Description of Artificial Sequence: Synthetic coding sequence
  source 1..1473: mol_type = other DNA
atgagattcaccttcaccagcagatgcctggccctgttcctgctgctgaaccaccccacccccatcctgcccgccttcagcaaccagacctaccccaccatcgagcccaagcccttcctgtacgtggtgggcagaaagaagatgatggacgcccagtacaagtgctacgacagaatgcagcagctgcccgcctaccagggcgagggcccctactgcaacagaacctgggacggctggctgtgctgggacgacacccccgccggcgtgctgagctaccagttctgccccgactacttccccgacttcgaccccagcgagaaggtgaccaagtactgcgacgagaagggcgtgtggttcaagcaccccgagaacaacagaacctggagcaactacaccatgtgcaacgccttcacccccgagaagctgaagaacgcctacgtgctgtactacctggccatcgtgggccacagcctgagcatcttcaccctggtgatcagcctgggcatcttcgtgttcttcagaaagctgaccaccatcttccccctgaactggaagtacagaaaggccctgagcctgggctgccagagagtgaccctgcacaagaacatgttcctgacctacatcctgaacagcatgatcatcatcatccacctggtggaggtggtgcccaacggcgagctggtgagaagagaccccgtgagctgcaagatcctgcacttcttccaccagtacatgatggcctgcaactacttctggatgctgtgcgagggcatctacctgcacaccctgatcgtggtggccgtgttcaccgagaagcagagactgagatggtactacctgctgggctggggcttccccctggtgcccaccaccatccacgccatcaccagagccgtgtacttcaacgacaactgctggctgagcgtggagacccacctgctgtacatcatccacggccccgtgatggccgccctggtggtgaacttcttcttcctgctgaacatcgtgagagtgctggtgaccaagatgagagagacccacgaggccgagagccacatgtacctgaaggccgtgaaggccaccatgatcctggtgcccctgctgggcatccagttcgtggtgttcccctggagacccagcaacaagatgctgggcaagatctacgactacgtgatgcacagcctgatccacttccagggcttcttcgtggccaccatctactgcttctgcaacaacgaggtgcagaccaccgtgaagagacagtgggcccagttcaagatccagtggaaccagagatggggcagaagacccagcaacagaagcgccagagccgccgccgccgccgccgaggccggcgacatccccatctacatctgccaccaggagctgagaaacgagcccgccaacaaccagggcgaggagagcgccgagatcatccccctgaacatcatcgagcaggagagcagcgcctag

SEQ ID NO: 74915 - DNA, 1425 bp, synthetic construct
  misc_feature 1..1425: note = Description of Artificial Sequence: Synthetic coding sequence
  source 1..1425: mol_type = other DNA
atgagattcaccttcaccagcagatgcctggccctgttcctgctgctgaaccaccccacccccatcctgcccgccttcagcaaccagacctaccccaccatcgagcccaagcccttcctgtacgtggtgggcagaaagaagatgatggacgcccagtacaagtgctacgacagaatgcagcagctgcccgcctaccagggcgagggcccctactgcaacagaacctgggacggctggctgtgctgggacgacacccccgccggcgtgctgagctaccagttctgccccgactacttccccgacttcgaccccagcgagaaggtgaccaagtactgcgacgagaagggcgtgtggttcaagcaccccgagaacaacagaacctggagcaactacaccatgtgcaacgccttcacccccgagaagctgaagaacgcctacgtgctgtactacctggccatcgtgggccacagcctgagcatcttcaccctggtgatcagcctgggcatcttcgtgttcttcagaagcctgggctgccagagagtgaccctgcacaagaacatgttcctgacctacatcctgaacagcatgatcatcatcatccacctggtggaggtggtgcccaacggcgagctggtgagaagagaccccgtgagctgcaagatcctgcacttcttccaccagtacatgatggcctgcaactacttctggatgctgtgcgagggcatctacctgcacaccctgatcgtggtggccgtgttcaccgagaagcagagactgagatggtactacctgctgggctggggcttccccctggtgcccaccaccatccacgccatcaccagagccgtgtacttcaacgacaactgctggctgagcgtggagacccacctgctgtacatcatccacggccccgtgatggccgccctggtggtgaacttcttcttcctgctgaacatcgtgagagtgctggtgaccaagatgagagagacccacgaggccgagagccacatgtacctgaaggccgtgaaggccaccatgatcctggtgcccctgctgggcatccagttcgtggtgttcccctggagacccagcaacaagatgctgggcaagatctacgactacgtgatgcacagcctgatccacttccagggcttcttcgtggccaccatctactgcttctgcaacaacgaggtgcagaccaccgtgaagagacagtgggcccagttcaagatccagtggaaccagagatggggcagaagacccagcaacagaagcgccagagccgccgccgccgccgccgaggccggcgacatccccatctacatctgccaccaggagctgagaaacgagcccgccaacaaccagggcgaggagagcgccgagatcatccccctgaacatcatcgagcaggagagcagcgcctag

SEQ ID NO: 74916 - DNA, 825 bp, synthetic construct
  misc_feature 1..825: note = Description of Artificial Sequence: Synthetic coding sequence
  source 1..825: mol_type = other DNA
atgagattcaccttcaccagcagatgcctggccctgttcctgctgctgaaccaccccacccccatcctgcccgccttcagcaaccagacctaccccaccatcgagcccaagcccttcctgtacgtggtgggcagaaagaagatgatggacgcccagtacaagtgctacgacagaatgcagcagctgcccgcctaccagggcgagggcccctactgcaacagaacctgggacggctggctgtgctgggacgacacccccgccggcgtgctgagctaccagttctgccccgactacttccccgacttcgaccccagcgagaaggtgaccaagtactgcgacgagaagggcgtgtggttcaagcaccccgagaacaacagaacctggagcaactacaccatgtgcaacgccttcacccccgagaagctgaagaacgcctacgtgctgtactacctggccatcgtgggccacagcctgagcatcttcaccctggtgatcagcctgggcatcttcgtgttcttcagaagcctgggctgccagagagtgaccctgcacaagaacatgttcctgacctacatcctgaacagcatgatcatcatcatccacctggtggaggtggtgcccaacggcgagctggtgagaagagaccccgtgagctgcaagatcctgcacttcttccaccagtacatgatggcctgcaactacttctggatgctgtgcgagggcatctacctgcacaccctgatcgtggtggccgtgttcaccgagaagcagagactgagatggtactacctgctgggctgggcccccgccttccacagagactag

SEQ ID NO: 74917 - DNA, 1473 bp, synthetic construct; identical to SEQ ID NO: 74914
  misc_feature 1..1473: note = Description of Artificial Sequence: Synthetic coding sequence
  source 1..1473: mol_type = other DNA

SEQ ID NO: 74918 - DNA, 873 bp, synthetic construct
  misc_feature 1..873: note = Description of Artificial Sequence: Synthetic coding sequence
  source 1..873: mol_type = other DNA
atgagattcaccttcaccagcagatgcctggccctgttcctgctgctgaaccaccccacccccatcctgcccgccttcagcaaccagacctaccccaccatcgagcccaagcccttcctgtacgtggtgggcagaaagaagatgatggacgcccagtacaagtgctacgacagaatgcagcagctgcccgcctaccagggcgagggcccctactgcaacagaacctgggacggctggctgtgctgggacgacacccccgccggcgtgctgagctaccagttctgccccgactacttccccgacttcgaccccagcgagaaggtgaccaagtactgcgacgagaagggcgtgtggttcaagcaccccgagaacaacagaacctggagcaactacaccatgtgcaacgccttcacccccgagaagctgaagaacgcctacgtgctgtactacctggccatcgtgggccacagcctgagcatcttcaccctggtgatcagcctgggcatcttcgtgttcttcagaaagctgaccaccatcttccccctgaactggaagtacagaaaggccctgagcctgggctgccagagagtgaccctgcacaagaacatgttcctgacctacatcctgaacagcatgatcatcatcatccacctggtggaggtggtgcccaacggcgagctggtgagaagagaccccgtgagctgcaagatcctgcacttcttccaccagtacatgatggcctgcaactacttctggatgctgtgcgagggcatctacctgcacaccctgatcgtggtggccgtgttcaccgagaagcagagactgagatggtactacctgctgggctgggcccccgccttccacagagactag

SEQ ID NO: 74919 - DNA, 1425 bp, synthetic construct; identical to SEQ ID NO: 74915
  misc_feature 1..1425: note = Description of Artificial Sequence: Synthetic coding sequence
  source 1..1425: mol_type = other DNA

SEQ ID NO: 74920 - DNA, 489 bp, synthetic construct
  misc_feature 1..489: note = Description of Artificial Sequence: Synthetic coding sequence
  source 1..489: mol_type = other DNA
atgagattcaccttcaccagcagatgcctggccctgttcctgctgctgaaccaccccacccccatcctgcccgccttcagcaaccagacctaccccaccatcgagcccaagcccttcctgtacgtggtgggcagaaagaagatgatggacgcccagtacaagtgctacgacagaatgcagcagctgcccgcctaccagggcgagggcccctactgcaacagaacctgggacggctggctgtgctgggacgacacccccgccggcgtgctgagctaccagttctgccccgactacttccccgacttcgaccccagcgagaaggtgaccaagtactgcgacgagaagggcgtgtggttcaagcaccccgagaacaacagaacctggagcaactacaccatgtgcaacgccttcacccccgagaagctgaagaacgcctacgtgctgtactacctggccatcgtgggccacagctgccagttcagcccctag

SEQ ID NO: 74921 - DNA, 1386 bp, synthetic construct
  misc_feature 1..1386: note = Description of Artificial Sequence: Synthetic coding sequence
  source 1..1386: mol_type = other DNA
atggagaagaagtgcaccctgaacttcctggtgctgctgcccttcttcatgatcctggtgaccgccgagctggaggagagccccgaggacagcatccagctgggcgtgaccagaaacaagatcatgaccgcccagtacgagtgctaccagaagatcatgcaggaccccatccagcaggccgagggcgtgtactgcaacagaacctgggacggctggctgtgctggaacgacgtggccgccggcaccgagagcatgcagctgtgccccgactacttccaggacttcgaccccagcgagaaggtgaccaagatctgcgaccaggacggcaactggttcagacaccccgccagcaacagaacctggaccaactacacccagtgcaacgtgaacacccacgagaaggtgaagaccgccctgaacctgttctacctgaccatcatcggccacggcctgagcatcgccagcctgctgatcagcctgggcatcttcttctacttcaagagcctgagctgccagagaatcaccctgcacaagaacctgttcttcagcttcgtgtgcaacagcgtggtgaccatcatccacctgaccgccgtggccaacaaccaggccctggtggccaccaaccccgtgagctgcaaggtgagccagttcatccacctgtacctgatgggctgcaactacttctggatgctgtgcgagggcatctacctgcacaccctgatcgtggtggccgtgttcgccgagaagcagcacctgatgtggtactacttcctgggctggggcttccccctgatccccgcctgcatccacgccatcgccagaagcctgtactacaacgacaactgctggatcagcagcgacacccacctgctgtacatcatccacggccccatctgcgccgccctgctggtgaacctgttcttcctgctgaacatcgtgagagtgctgatcaccaagctgaaggtgacccaccaggccgagagcaacctgtacatgaaggccgtgagagccaccctgatcctggtgcccctgctgggcatcgagttcgtgctgatcccctggagacccgagggcaagatcgccgaggaggtgtacgactacatcatgcacatcctgatgcacttccagggcctgctggtgagcaccatcttctgcttcttcaacggcgaggtgcaggccatcctgagaagaaactggaaccagtacaagatccagttcggcaacagcttcagcaacagcgaggccctgagaagcgccagctacaccgtgagcaccatcagcgacggccccggctacagccacgactgccccagcgagcacctgaacggcaagagcatccacgacatcgagaacgtgctgctgaagcccgagaacctgtacaactag

SEQ ID NO: 74922 - DNA, 1386 bp, synthetic construct; identical to SEQ ID NO: 74921
  misc_feature 1..1386: note = Description of Artificial Sequence: Synthetic coding sequence
  source 1..1386: mol_type = other DNA

SEQ ID NO: 74923 - DNA, 1386 bp, synthetic construct; identical to SEQ ID NO: 74921
  misc_feature 1..1386: note = Description of Artificial Sequence: Synthetic coding sequence
  source 1..1386: mol_type = other DNA

SEQ ID NO: 74924 - DNA, 114 bp, synthetic construct
  misc_feature 1..114: note = Description of Artificial Sequence: Synthetic coding sequence
  source 1..114: mol_type = other DNA
atggagaagaagtgcaccctgaacttcctggtgctgctgcccttcttcatgatcctggtgaccgccgagctggaggagagccccgaggacagcatccagctgggcgtgacctag

SEQ ID NO: 74925 - DNA, 237 bp, synthetic construct
  misc_feature 1..237: note = Description of Artificial Sequence: Synthetic coding sequence
  source 1..237: mol_type = other DNA
atggagaagaagtgcaccctgaacttcctggtgctgctgcccttcttcatgatcctggtgaccgccgagctggaggagagccccgaggacagcatccagctgggcgtgaccagaaacaagatcatgaccgcccagtacgagtgctaccagaagatcatgcaggaccccatccagcaggccgagggcgtgtactgcaacagaacctgggacggctggctgtgctggaacgacgtgtag

SEQ ID NO: 74926 - DNA, 426 bp, synthetic construct
  misc_feature 1..426: note = Description of Artificial Sequence: Synthetic coding sequence
  source 1..426: mol_type = other DNA
atgggcttccagaagttcagccccttcctggccctgagcatcctggtgctgctgcaggccggcagcctgcacgccgcccccttcagaagcgccctggagagcagccccgccgaccccgccaccctgagcgaggacgaggccagactgctgctggccgccctggtgcagaactacgtgcagatgaaggccagcgagctggagcaggagcaggagagagagggcagcagcctggacagccccagaagcaagagatgcggcaacctgagcacctgcatgctgggcacctacacccaggacttcaacaagttccacaccttcccccagaccgccatcggcgtgggcgcccccggcaagaagagagacatgagcagcgacctggagagagaccacagaccccacgtgagcatgccccagaacgccaactag

SEQ ID NO: 74927 - DNA, 426 bp, synthetic construct
  misc_feature 1..426: note = Description of Artificial Sequence: Synthetic coding sequence
  source 1..426: mol_type = other DNA
atgggcttccagaagttcagccccttcctggccctgagcatcctggtgctgctgcaggccggcagcctgcacgccgcccccttcagaagcgccctggagagcagccccgccgaccccgccaccctgagcgaggacgaggccagactgctgctggccgccctggtgcagaactacgtgcagatgaaggccagcgagctggagcaggagcaggagagagagggcagcagcctggacagccccagaagcaagagatgcggcaacctgagcacctgcatgctgggcacctacacccaggacttcaacaagttccacaccttcccccagaccgccatcggcgtgggcgcccccggcaagaagagagacatgagcagcgacctggagagagaccacagaccccacaaccactgccccgaggagagcctgtag

SEQ ID NO: 74928 - DNA, 387 bp, synthetic construct
  misc_feature 1..387: note = Description of Artificial Sequence: Synthetic coding sequence
  source 1..387: mol_type = other DNA
atgggcttccagaagttcagccccttcctggccctgagcatcctggtgctgctgcaggccggcagcctgcacgccgcccccttcagaagcgccctggagagcagccccgccgaccccgccaccctgagcgaggacgaggccagactgctgctggccgccctggtgcagaactacgtgcagatgaaggccagcgagctggagcaggagcaggagagagagggcagcagaatcatcgcccagaagagagcctgcgacaccgccacctgcgtgacccacagactggccggcctgctgagcagaagcggcggcgtggtgaagaacaacttcgtgcccaccaacgtgggcagcaaggccttcggcagaagaagaagagacctgcaggcctag

SEQ ID NO: 74929 - DNA, 426 bp, synthetic construct; identical to SEQ ID NO: 74926
  misc_feature 1..426: note = Description of Artificial Sequence: Synthetic coding sequence
  source 1..426: mol_type = other DNA

SEQ ID NO: 74930 - DNA, 387 bp, synthetic construct; identical to SEQ ID NO: 74928
  misc_feature 1..387: note = Description of Artificial Sequence: Synthetic coding sequence
  source 1..387: mol_type = other DNA

SEQ ID NO: 74931 - DNA, 384 bp, synthetic construct
  misc_feature 1..384: note = Description of Artificial Sequence: Synthetic coding sequence
  source 1..384: mol_type = other DNA
atgggcttcagaaagttcagccccttcctggccctgagcatcctggtgctgtaccaggccggcagcctgcaggccgcccccttcagaagcgccctggagagcagccccgaccccgccaccctgagcaaggaggacgccagactgctgctggccgccctggtgcaggactacgtgcagatgaaggccagcgagctgaagcaggagcaggagacccagggcagcagcagcgccgcccagaagagagcctgcaacaccgccacctgcgtgacccacagactggccggcctgctgagcagaagcggcggcatggtgaagagcaacttcgtgcccaccaacgtgggcagcaaggccttcggcagaagaagaagagacctgcaggcctag

SEQ ID NO: 74932 - DNA, 417 bp, synthetic construct
  misc_feature 1..417: note = Description of Artificial Sequence: Synthetic coding sequence
  source 1..417: mol_type = other DNA
atgaagaaggaggccaacctgcagagaggcggcatgggcttcagaaagttcagccccttcctggccctgagcatcctggtgctgtaccaggccggcagcctgcaggccgcccccttcagaagcgccctggagagcagccccgaccccgccaccctgagcaaggaggacgccagactgctgctggccgccctggtgcaggactacgtgcagatgaaggccagcgagctgaagcaggagcaggagacccagggcagcagcagcgccgcccagaagagagcctgcaacaccgccacctgcgtgacccacagactggccggcctgctgagcagaagcggcggcatggtgaagagcaacttcgtgcccaccaacgtgggcagcaaggccttcggcagaagaagaagagacctgcaggcctag

SEQ ID NO: 74933 - DNA, 384 bp, synthetic construct; identical to SEQ ID NO: 74931
  misc_feature 1..384: note = Description of Artificial Sequence: Synthetic coding sequence
  source 1..384: mol_type = other DNA

SEQ ID NO: 74934 - DNA, 1206 bp, synthetic construct
  misc_feature 1..1206: note = Description of Artificial Sequence: Synthetic coding sequence
  source 1..1206: mol_type = other DNA
atgcccgtgcagctgagcgagcaccccgagtggaacgagagcatgcacagcctgagaatcagcgtgggcggcctgcccgtgctggccagcatgaccaaggccgccgaccccagattcagacccagatggaaggtgatcctgaccttcttcgtgggcgccgccatcctgtggctgctgtgcagccacagacccgcccccggcagaccccccacccacaacgcccacaactggagactgggccaggcccccgccaactggtacaacgacacctaccccctgagccccccccagagaacccccgccggcatcagatacagaatcgccgtgatcgccgacctggacaccgagagcagagcccaggaggagaacacctggttcagctacctgaagaagggctacctgaccctgagcgacagcggcgacaaggtggccgtggagtgggacaaggaccacggcgtgctggagagccacctggccgagaagggcagaggcatggagctgagcgacctgatcgtgttcaacggcaagctgtacagcgtggacgacagaaccggcgtggtgtaccagatcgagggcagcaaggccgtgccctgggtgatcctgagcgacggcgacggcaccgtggagaagggcttcaaggccgagtggctggccgtgaaggacgagagactgtacgtgggcggcctgggcaaggagtggaccaccaccaccggcgacgtggtgaacgagaaccccgagtgggtgaaggtggtgggctacaagggcagcgtggaccacgagaactgggtgagcaactacaacgccctgagagccgccgccggcatccagccccccggctacctgatccacgagagcgcctgctggagcgacaccctgcagagatggttcttcctgcccagaagagccagccaggagagatacagcgagaaggacgacgagagaaagggcgccaacctgctgctgagcgccagccccgacttcggcgacatcgccgtgagccacgtgggcgccgtggtgcccacccacggcttcagcagcttcaagttcatccccaacaccgacgaccagatcatcgtggccctgaagagcgaggaggacagcggcagagtggccagctacatcatggccttcaccctggacggcagattcctgctgcccgagaccaagatcggcagcgtgaagtacgagggcatcgagttcatctag

SEQ ID NO: 74935 - DNA, 1053 bp, synthetic construct
  misc_feature 1..1053: note = Description of Artificial Sequence: Synthetic coding sequence
  source 1..1053: mol_type = other DNA
atgcccgtgcagctgagcgagcaccccgagtggaacgagagcatgcacagcctgagaatcagcgtgggcggcctgcccgtgctggccagcatgaccaaggccgccgaccccagattcagacccagaagccccccccagagaacccccgccggcatcagatacagaatcgccgtgatcgccgacctggacaccgagagcagagcccaggaggagaacacctggttcagctacctgaagaagggctacctgaccctgagcgacagcggcgacaaggtggccgtggagtgggacaaggaccacggcgtgctggagagccacctggccgagaagggcagaggcatggagctgagcgacctgatcgtgttcaacggcaagctgtacagcgtggacgacagaaccggcgtggtgtaccagatcgagggcagcaaggccgtgccctgggtgatcctgagcgacggcgacggcaccgtggagaagggcttcaaggccgagtggctggccgtgaaggacgagagactgtacgtgggcggcctgggcaaggagtggaccaccaccaccggcgacgtggtgaacgagaaccccgagtgggtgaaggtggtgggctacaagggcagcgtggaccacgagaactgggtgagcaactacaacgccctgagagccgccgccggcatccagccccccggctacctgatccacgagagcgcctgctggagcgacaccctgcagagatggttcttcctgcccagaagagccagccaggagagatacagcgagaaggacgacgagagaaagggcgccaacctgctgctgagcgccagccccgacttcggcgacatcgccgtgagccacgtgggcgccgtggtgcccacccacggcttcagcagcttcaagttcatccccaacaccgacgaccagatcatcgtggccctgaagagcgaggaggacagcggcagagtggccagctacatcatggccttcaccctggacggcagattcctgctgcccgagaccaagatcggcagcgtgaagtacgagggcatcgagttcatctag

SEQ ID NO: 74936 - DNA, 1206 bp, synthetic construct; identical to SEQ ID NO: 74934
  misc_feature 1..1206: note = Description of Artificial Sequence: Synthetic coding sequence
  source 1..1206: mol_type = other DNA

SEQ ID NO: 74937 - DNA, 738 bp, synthetic construct
  misc_feature 1..738: note = Description of Artificial Sequence: Synthetic coding sequence
  source 1..738: mol_type = other DNA
atgcccgtgcagctgagcgagcaccccgagtggaacgagagcatgcacagcctgagaatcagcgtgggcggcctgcccgtgctggccagcatgaccaaggccgccgaccccagattcagacccagatggaaggtgatcctgaccttcttcgtgggcgccgccatcctgtggctgctgtgcagccacagacccgcccccggcagaccccccacccacaacgcccacaactggagactgggccaggcccccgccaactggtacaacgacacctaccccctgagccccccccagagaacccccgccggcatcagatacagaatcgccgtgatcgccgacctggacaccgagagcagagcccaggaggagaacacctggttcagctacctgaagaagggctacctgaccctgagcgacagcggcgacaaggtggccgtggagtgggacaaggaccacggcgtgctggagagccacctggccgagaagggcagaggcatggagctgagcgacctgatcgtgttcaacggcaagctgtacagcgtggacgacagaaccggcgtggtgtaccagatcgagggcagcaaggccgtgccctgggtgatcctgagcgacggcgacggcaccgtggagaagggcgtgggcggcgagtgggaggccgtgagagagatcgtgagaaagagatggagactggtgaagcaggtgagccacgtgggcgtgctgggccagtggatccagagatag

SEQ ID NO: 74938 - DNA, 663 bp, synthetic construct
  misc_feature 1..663: note = Description of Artificial Sequence: Synthetic coding sequence
  source 1..663: mol_type = other DNA
atgggcaactgcgccaagagaccctggagaagaggccccaaggaccccctgcagtggctgggcagcccccccagaggcagctgccccagccccagcagcagccccaaggagcagggcgaccccgcccccggcgtgcagggctacagcgtgctgaacagcctggtgggccccgcctgcatcttcctgagacccagcatcgccgccacccagctggacagagagctgagacccgaggagatcgaggagctgcaggtggccttccaggagttcgacagagacagagacggctacatcggctgcagagagctgggcgcctgcatgagaaccctgggctacatgcccaccgagatggagctgatcgagatcagccagcagatcagcggcggcaaggtggacttcgaggacttcgtggagctgatgggccccaagctgctggccgagaccgccgacatgatcggcgtgagagagctgagagacgccttcagagagttcgacaccaacggcgacggcagaatcagcgtgggcgagctgagagccgccctgaaggccctgctgggcgagagactgagccagagagaggtggacgagatcctgcaggacgtggacctgaacggcgacggcctggtggacttcgaggagttcgtgagaatgatgagcagatag

SEQ ID NO: 74939 - DNA, 1026 bp, synthetic construct
  misc_feature 1..1026: note = Description of Artificial Sequence: Synthetic coding sequence
  source 1..1026: mol_type = other DNA
atgcccttccccttcggcaagagccacaagagccccgccgacatcgtgaagaacctgaaggagagcatggccgtgctggagaagcaggacatcagcgacaagaaggccgagaaggccaccgaggaggtgagcaagaacctggtggccatgaaggagatcctgtacggcaccaacgagaaggagccccagaccgaggccgtggcccagctggcccaggagctgtacaacagcggcctgctgagcaccctggtggccgacctgcagctgatcgacttcgagggcaagaaggacgtggcccagatcttcaacaacatcctgagaagacagatcggcaccagaacccccaccgtggagtacatctgcacccagcagaacatcctgttcatgctgctgaagggctacgagagccccgagatcgccctgaactgcggcatcatgctgagagagtgcatcagacacgagcccctggccaagatcatcctgtggagcgagcagttctacgacttcttcagatacgtggagatgagcaccttcgacatcgccagcgacgccttcgccaccttcaaggacctgctgaccagacacaagctgctgagcgccgagttcctggagcagcactacgacagattcttcagcgagtacgagaagctgctgcacagcgagaactacgtgaccaagagacagagcctgaagctgctgggcgagctgctgctggacagacacaacttcaccatcatgaccaagtacatcagcaagcccgagaacctgaagctgatgatgaacctgctgagagacaagagcagaaacatccagttcgaggccttccacgtgttcaaggtgttcgtggccaaccccaacaagacccagcccatcctggacatcctgctgaagaaccaggccaagctgatcgagttcctgagcaagttccagaacgacagaaccgaggacgagcagttcaacgacgagaagacctacctggtgaagcagatcagagacctgaagagacccgcccagcaggaggcctag

SEQ ID NO: 74940 - DNA, 1026 bp, synthetic construct; identical to SEQ ID NO: 74939
  misc_feature 1..1026: note = Description of Artificial Sequence: Synthetic coding sequence
  source 1..1026: mol_type = other DNA

SEQ ID NO: 74941 - DNA, 1026 bp, synthetic construct; identical to SEQ ID NO: 74939
  misc_feature 1..1026: note = Description of Artificial Sequence: Synthetic coding sequence
  source 1..1026: mol_type = other DNA

SEQ ID NO: 74942 - DNA, 1014 bp, synthetic construct
  misc_feature 1..1014: note = Description of Artificial Sequence: Synthetic coding sequence
  source 1..1014: mol_type = other DNA
atgaagaagatgcccctgttcagcaagagccacaagaaccccgccgagatcgtgaagatcctgaaggacaacctggccatcctggagaagcaggacaagaagaccgacaaggccagcgaggaggtgagcaagagcctgcaggccatgaaggagatcctgtgcggcaccaacgagaaggagccccccaccgaggccgtggcccagctggcccaggagctgtacagcagcggcctgctggtgaccctgatcgccgacctgcagctgatcgacttcgagggcaagaaggacgtgacccagatcttcaacaacatcctgagaagacagatcggcaccagaagccccaccgtggagtacatcagcgcccacccccacatcctgttcatgctgctgaagggctacgaggccccccagatcgccctgagatgcggcatcatgctgagagagtgcatcagacacgagcccctggccaagatcatcctgttcagcaaccagttcagagacttcttcaagtacgtggagctgagcaccttcgacatcgccagcgacgccttcgccaccttcaaggacctgctgaccagacacaaggtgctggtggccgacttcctggagcagaactacgacaccatcttcgaggactacgagaagctgctgcagagcgagaactacgtgaccaagagacagagcctgaagctgctgggcgagctgatcctggacagacacaacttcgccatcatgaccaagtacatcagcaagcccgagaacctgaagctgatgatgaacctgctgagagacaagagccccaacatccagttcgaggccttccacgtgttcaaggtgttcgtggccagcccccacaagacccagcccatcgtggagatcctgctgaagaaccagcccaagctgatcgagttcctgagcagcttccagaaggagagaaccgacgacgagcagttcgccgacgagaagaactacctgatcaagcagatcagagacctgaagaagaccgccccctag

SEQ ID NO: 74943 - DNA, 1014 bp, synthetic construct; identical to SEQ ID NO: 74942
  misc_feature 1..1014: note = Description of Artificial Sequence: Synthetic coding sequence
  source 1..1014: mol_type = other DNA

SEQ ID NO: 74944 - DNA, 945 bp, synthetic construct
  misc_feature 1..945: note = Description of Artificial Sequence: Synthetic coding sequence
  source 1..945: mol_type = other DNA
atgcccctgttcagcaagagccacaagaaccccgccgagatcgtgaagatcctgaaggacaacctggccatcctggagaagcaggacaagaagaccgacaaggccagcgaggaggtgagcaagagcctgcaggccatgaaggagatcctgtgcggcaccaacgagaaggagccccccaccgaggccgtggcccagctggcccaggagctgtacagcagcggcctgctggtgaccctgatcgccgacctgcagctgatcgacttcgagggcaagaaggacgtgacccagatcttcaacaacatcctgagaagacagatcggcaccagaagccccaccgtggagtacatcagcgcccacccccacatcctgttcatgctgctgaagggctacgaggccccccagatcgccctgagatgcggcatcatgctgagagagtgcatcagacacgagcccctggccaagatcatcctgttcagcaaccagttcagagacttcttcaagtacgtggagctgagcaccttcgacatcgccagcgacgccttcgccaccttcaagatcttcgaggactacgagaagctgctgcagagcgagaactacgtgaccaagagacagagcctgaagctgctgggcgagctgatcctggacagacacaacttcgccatcatgaccaagtacatcagcaagcccgagaacctgaagctgatgatgaacctgctgagagacaagagccccaacatccagttcgaggccttccacgtgttcaaggtgttcgtggccagcccccacaagacccagcccatcgtggagatcctgctgaagaaccagcccaagctgatcgagttcctgagcagcttccagaaggagagaaccgacgacgagcagttcgccgacgagaagaactacctgatcaagcagatcagagacctgaagaagaccgccccctag

SEQ ID NO: 74945 - DNA, 282 bp, synthetic construct
  misc_feature 1..282: note = Description of Artificial Sequence: Synthetic coding sequence
  source 1..282: mol_type = other DNA
atgaagaagatgcccctgttcagcaagagccacaagaaccccgccgagatcgtgaagatcctgaaggacaacctggccatcctggagaagcaggacaagaagaccgacaaggccagcgaggaggtgagcaagagcctgcaggccatgaaggagatcctgtgcggcaccaacgagaaggagccccccaccgaggccgtggcccagctggcccaggagctgtacagcagcggcctgctggtgaccctgatcgccgacctgcagctgatcgacttcgaggtgtag

SEQ ID NO: 74946 - DNA, 1014 bp, synthetic construct; identical to SEQ ID NO: 74942
  misc_feature 1..1014: note = Description of Artificial Sequence: Synthetic coding sequence
  source 1..1014: mol_type = other DNA

SEQ ID NO: 74947 - DNA, 1014 bp, synthetic construct; identical to SEQ ID NO: 74942
  misc_feature 1..1014: note = Description of Artificial Sequence: Synthetic coding sequence
  source 1..1014: mol_type = other DNA

SEQ ID NO: 74948 - DNA, 387 bp, synthetic construct
  misc_feature 1..387: note = Description of Artificial Sequence: Synthetic coding sequence
  source 1..387: mol_type = other DNA
atgaagaagatgcccctgttcagcaagagccacaagaaccccgccgagatcgtgaagatcctgaaggacaacctggccatcctggagaagcaggacaagaagaccgacaaggccagcgaggaggtgagcaagagcctgcaggccatgaaggagatcctgtgcggcaccaacgagaaggagccccccaccgaggccgtggcccagctggcccaggagctgtacagcagcggcctgctggtgaccctgatcgccgacctgcagctgatcgacttcgagggcaagaaggacgtgacccagatcttcaacaacatcctgagaagacagatcggcaccagaagccccaccgtggagtacatcagcgcccacccccacatcctgttcatgtag

SEQ ID NO: 74949 - DNA, 567 bp, synthetic construct
  misc_feature 1..567: note = Description of Artificial Sequence: Synthetic coding sequence
  source 1..567: mol_type = other DNA
atgaagaagatgcccctgttcagcaagagccacaagaaccccgccgagatcgtgaagatcctgaaggacaacctggccatcctggagaagcaggacaagaagaccgacaaggccagcgaggaggtgagcaagagcctgcaggccatgaaggagatcctgtgcggcaccaacgagaaggagccccccaccgaggccgtggcccagctggcccaggagctgtacagcagcggcctgctggtgaccctgatcgccgacctgcagctgatcgacttcgagggcaagaaggacgtgacccagatcttcaacaacatcctgagaagacagatcggcaccagaagccccaccgtggagtacatcagcgcccacccccacatcctgttcatgctgctgaagggctacgaggccccccagatcgccctgagatgcggcatcatgctgagagagtgcatcagacacgagcccctggccaagatcatcctgttcagcaaccagttcagagacttcttcaagtacgtggagctgagcaccttcgacatcgccagcgacgccttcgccaccttcaagtag

SEQ ID NO: 74950 - DNA, 828 bp, synthetic construct
  misc_feature 1..828: note = Description of Artificial Sequence: Synthetic coding sequence
  source 1..828: mol_type = other DNA
atgaccaccgagcaggccagaggccagcagggccccaacctggccatcggcagacagaagccccccgccggcgtggtgacccccaagagcgacgccgaggagccccccctgaccagaaagagaagcaagaaggagagaggcctgagaggcagcagaaagagaaccggcagcagcggcgagcagaccggccccgaggcccccggcagcagcaacaacccccccagcaccggcgagggccccgccggcgccccccccgccagccccggccccgccagcagcagacagagccacagacacagacccgacagcctgcacgacgccgcccagagaacctacggccccctgctgaacagagtgttcggcaaggacagagagctgggccccgaggagctggacgagctgcaggccgccttcgaggagttcgacaccgacagagacggctacatcagccacagagagctgggcgactgcatgagaaccctgggctacatgcccaccgagatggagctgctggaggtgagccagcacatcaagatgagaatgggcggcagagtggacttcgaggagttcgtggagctgatcggccccaagctgagagaggagaccgcccacatgctgggcgtgagagagctgagaatcgccttcagagagttcgacagagacagagacggcagaatcaccgtggccgagctgagagaggccgtgcccgccctgctgggcgagcccctggccggccccgagctggacgagatgctgagagaggtggacctgaacggcgacggcaccgtggacttcgacgagttcgtgatgatgctgagcagacactag

SEQ ID NO: 74951 - DNA, 513 bp, synthetic construct
  misc_feature 1..513: note = Description of Artificial Sequence: Synthetic coding sequence
  source 1..513: mol_type = other DNA
atgaccgagccctggctggccctgggcaccagctggaccctgcccctgcaggacagagagctgggccccgaggagctggacgagctgcaggccgccttcgaggagttcgacaccgacagagacggctacatcagccacagagagctgggcgactgcatgagaaccctgggctacatgcccaccgagatggagctgctggaggtgagccagcacatcaagatgagaatgggcggcagagtggacttcgaggagttcgtggagctgatcggccccaagctgagagaggagaccgcccacatgctgggcgtgagagagctgagaatcgccttcagagagttcgacagagacagagacggcagaatcaccgtggccgagctgagagaggccgtgcccgccctgctgggcgagcccctggccggccccgagctggacgagatgctgagagaggtggacctgaacggcgacggcaccgtggacttcgacgagttcgtgatgatgctgagcagacactag

SEQ ID NO: 74952 - DNA, 522 bp, synthetic construct
  misc_feature 1..522: note = Description of Artificial Sequence: Synthetic coding sequence
  source 1..522: mol_type = other DNA
atgcagttccccatgggccccgcctgcatcttcctgagaaagggcatcgccgagaagcagagagagagacccctgggccaggacgagatcgaggagctgagagaggccttcctggagttcgacaaggacagagacggcttcatcagctgcaaggacctgggcaacctgatgagaaccatgggctacatgcccaccgagatggagctgatcgagctgggccagcagatcagaatgaacctgggcggcagagtggacttcgacgacttcgtggagctgatgacccccaagctgctggccgagaccgccggcatgatcggcgtgcaggagatgagagacgccttcaaggagttcgacaccaacggcgacggcgagatcaccctggtggagctgcagcaggccatgcagagactgctgggcgagagactgacccccagagagatcagcgaggtggtgagagaggccgacgtgaacggcgacggcaccgtggacttcgaggagttcgtgaagatgatgagcagatag

SEQ ID NO: 74953 - DNA, 846 bp, synthetic construct
  misc_feature 1..846: note = Description of Artificial Sequence: Synthetic coding sequence
  source 1..846: mol_type = other DNA
atggagaagagcaccgacaccgacgaggacaacgtgaccagaaccgagtacagcgacaagaccacccagttccccagcgtgtacgccgtgcccggcaccgagcagaccgaggccgtgggcggcctgagcagcaagcccgccacccccaagaccaccaccccccccagcagccccccccccaccgccgtgagccccgagttcgcctacgtgcccgccgaccccgcccagctggccgcccagatgctggccatggccaccagcgagagaggccagccccccccctgcagcaacatgtggaccctgtactgcctgaccgacaagaaccagcagggccaccccagccccccccccgcccccggccccttcccccaggccaccctgtacctgcccaaccccaaggacccccagttccagcagcacccccccaaggtgaccttccccacctacgtgatgggcgacaccaagaagaccagcgccccccccttcatcctggtgggcagcaacgtgcaggaggcccagggctggaagcccctgcccggccacgccgtggtgagccagagcgacgtgctgagatacgtggccatgcaggtgcccatcgccgtgcccgccgacgagaagtaccagaagcacaccctgagcccccagaacgccaacccccccagcggccaggacgtgcccagacccaagagccccgtgttcctgagcgtggccttccccgtggaggacgtggccaagaagagcagcggcagcggcgacaagtgcgcccccttcggcagctacggcatcgccggcgaggtgaccgtgaccaccgcccacaagagaagaaaggccgagaccgagaactag

SEQ ID NO: 74954 - DNA, 1188 bp, synthetic construct
  misc_feature 1..1188: note = Description of Artificial Sequence: Synthetic coding sequence
  source 1..1188: mol_type = other DNA
atggagaagagcaccgacaccgacgaggacaacgtgaccagaaccgagtacagcgacaagaccacccagttccccagcgtgtacgccgtgcccggcaccgagcagaccgaggccgtgggcggcctgagcagcaagcccgccacccccaagaccaccaccccccccagcagccccccccccaccgccgtgagccccgagttcgcctacgtgcccgccgaccccgcccagctggccgcccagatgctgggcaaggtgagcagcatccacagcgaccagagcgacgtgctgatggtggacgtggccaccagcatgcccgtggtgatcaaggaggtgcccagcagcgaggccgccgaggacgtgatggtggccgcccccctggtgtgcagcggcaaggtgctggaggtgcaggtggtgaaccagaccagcgtgcacgtggacctgggcagccagcccaaggagaacgaggccgagcccagcaccgccagcagcgtgcccctgcaggacgagcaggagccccccgcctacgaccaggcccccgaggtgaccctgcaggccgacatcgaggtgatgagcaccgtgcacatcagcagcgtgtacaacgacgtgcccgtgaccgagggcgtggtgtacatcgagcagctgcccgagcagatcgtgatccccttcaccgaccaggtggcctgcctgaaggagaacgagcagagcaaggagaacgagcagagccccagagtgagccccaagagcgtggtggagaagaccaccagcggcatgagcaagaagagcgtggagagcgtgaagctggcccagctggaggagaacgccaagtacagcagcgtgtacatggaggccgaggccaccgccctgctgagcgacaccagcctgaagggccagcccgaggtgcccgcccagctgctggacgccgagggcgccatcaagatcggcagcgagaagagcctgcacctggaggtggagatcaccagcatcgtgagcgacaacaccggccaggaggagagcggcgagaacagcgtgccccaggagatggagggcaagcccgtgctgagcggcgaggccgccgaggccgtgcacagcggcaccagcgtgaagagcagcagcggccccttcccccccgcccccgagggcctgaccgcccccgagatcgagcccgagggcgagagcaccgccgagtag

SEQ ID NO: 74955 - DNA, 1140 bp, synthetic construct
  misc_feature 1..1140: note = Description of Artificial Sequence: Synthetic coding sequence
  source 1..1140: mol_type = other DNA
atgatcagcagcaagcccagactggtggtgccctacggcctgaagaccctgctggagggcatcagcagagccgtgctgaagaccaaccccagcaacatcaaccagttcgccgccgcctacttccaggagctgaccatgtacagaggcaacaccaccatggacatcaaggacctggtgaagcagttccaccagatcaaggtggagaagtggagcgagggcaccaccccccagaagaagctggagtgcctgaaggagcccggcaagaccagcgtggagagcaaggtgcccacccagatggagaagagcaccgacaccgacgaggacaacgtgaccagaaccgagtacagcgacaagaccacccagttccccagcgtgtacgccgtgcccggcaccgagcagaccgaggccgtgggcggcctgagcagcaagcccgccacccccaagaccaccaccccccccagcagccccccccccaccgccgtgagccccgagttcgcctacgtgcccgccgaccccgcccagctggccgcccagatgctggccatggccaccagcgagagaggccagccccccccctgcagcaacatgtggaccctgtactgcctgaccgacaagaaccagcagggccaccccagccccccccccgcccccggccccttcccccaggccaccctgtacctgcccaaccccaaggacccccagttccagcagcacccccccaaggtgaccttccccacctacgtgatgggcgacaccaagaagaccagcgccccccccttcatcctggtgggcagcaacgtgcaggaggcccagggctggaagcccctgcccggccacgccgtggtgagccagagcgacgtgctgagatacgtggccatgcaggtgcccatcgccgtgcccgccgacgagaagtaccagaagcacaccctgagcccccagaacgccaacccccccagcggccaggacgtgcccagacccaagagccccgtgttcctgagcgtggccttccccgtggaggacgtggccaagaagagcagcggcagcggcgacaagtgcgcccccttcggcagctacggcatcgccggcgaggtgaccgtgaccaccgcccacaagagaagaaaggccgagaccgagaactag

SEQ ID NO: 74956 - DNA, 1140 bp, synthetic construct; identical to SEQ ID NO: 74955
  misc_feature 1..1140: note = Description of Artificial Sequence: Synthetic coding sequence
  source 1..1140: mol_type = other DNA

SEQ ID NO: 74957 - DNA, 666 bp, synthetic construct
  misc_feature 1..666: note = Description of Artificial Sequence: Synthetic coding sequence
  source 1..666: mol_type = other DNA
atgatcagcagcaagcccagactggtggtgccctacggcctgaagaccctgctggagggcatcagcagagccgtgctgaagaccaaccccagcaacatcaaccagttcgccgccgcctacttccaggagctgaccatgtacagaggcaacaccaccatggacatcaaggacctggtgaagcagttccaccagatcaaggtggagaagtggagcgagggcaccaccccccagaagaagctggagtgcctgaaggagcccggcaagaccagcgtggagagcaaggtgcccacccagatggagaagagcaccgacaccgacgaggacaacgtgaccagaaccgagtacagcgacaagaccacccagttccccagcgtgtacgccgtgcccggcaccgagcagaccgaggccgtgggcggcctgagcagcaagcccgccacccccaagaccaccaccccccccagcagccccccccccaccgccgtgagccccgagttcgcctacgtgcccgccgaccccgcccagctggccgcccagatgctggaggacgtggccaagaagagcagcggcagcggcgacaagtgcgcccccttcggcagctacggcatcgccggcgaggtgaccgtgaccaccgcccacaagagaagaaaggccgagaccgagaactag

SEQ ID NO: 74958 - DNA, 1482 bp, synthetic construct
  misc_feature 1..1482: note = Description of Artificial Sequence: Synthetic coding sequence
  source 1..1482: mol_type = other DNA
atgatcagcagcaagcccagactggtggtgccctacggcctgaagaccctgctggagggcatcagcagagccgtgctgaagaccaaccccagcaacatcaaccagttcgccgccgcctacttccaggagctgaccatgtacagaggcaacaccaccatggacatcaaggacctggtgaagcagttccaccagatcaaggtggagaagtggagcgagggcaccaccccccagaagaagctggagtgcctgaaggagcccggcaagaccagcgtggagagcaaggtgcccacccagatggagaagagcaccgacaccgacgaggacaacgtgaccagaaccgagtacagcgacaagaccacccagttccccagcgtgtacgccgtgcccggcaccgagcagaccgaggccgtgggcggcctgagcagcaagcccgccacccccaagaccaccaccccccccagcagccccccccccaccgccgtgagccccgagttcgcctacgtgcccgccgaccccgcccagctggccgcccagatgctgggcaaggtgagcagcatccacagcgaccagagcgacgtgctgatggtggacgtggccaccagcatgcccgtggtgatcaaggaggtgcccagcagcgaggccgccgaggacgtgatggtggccgcccccctggtgtgcagcggcaaggtgctggaggtgcaggtggtgaaccagaccagcgtgcacgtggacctgggcagccagcccaaggagaacgaggccgagcccagcaccgccagcagcgtgcccctgcaggacgagcaggagccccccgcctacgaccaggcccccgaggtgaccctgcaggccgacatcgaggtgatgagcaccgtgcacatcagcagcgtgtacaacgacgtgcccgtgaccgagggcgtggtgtacatcgagcagctgcccgagcagatcgtgatccccttcaccgaccaggtggcctgcctgaaggagaacgagcagagcaaggagaacgagcagagccccagagtgagccccaagagcgtggtggagaagaccaccagcggcatgagcaagaagagcgtggagagcgtgaagctggcccagctggaggagaacgccaagtacagcagcgtgtacatggaggccgaggccaccgccctgctgagcgacaccagcctgaagggccagcccgaggtgcccgcccagctgctggacgccgagggcgccatcaagatcggcagcgagaagagcctgcacctggaggtggagatcaccagcatcgtgagcgacaacaccggccaggaggagagcggcgagaacagcgtgccccaggagatggagggcaagcccgtgctgagcggcgaggccgccgaggccgtgcacagcggcaccagcgtgaagagcagcagcggccccttcccccccgcccccgagggcctgaccgcccccgagatcgagcccgagggcgagagcaccgccgagtag

SEQ ID NO: 74959 - DNA, 1428 bp, synthetic construct
  misc_feature 1..1428: note = Description of Artificial Sequence: Synthetic coding sequence
  source 1..1428: mol_type = other DNA
atgatcagcagcaagcccagactggtggtgccctacggcctgaagaccctgctggagggcatcagcagagccgtgctgaagaccaaccccagcaacatcaaccagttcgccgccgcctacttccaggagctgaccatgtacagagtggagaagtggagcgagggcaccaccccccagaagaagctggagtgcctgaaggagcccggcaagaccagcgtggagagcaaggtgcccacccagatggagaagagcaccgacaccgacgaggacaacgtgaccagaaccgagtacagcgacaagaccacccagttccccagcgtgtacgccgtgcccggcaccgagcagaccgaggccgtgggcggcctgagcagcaagcccgccacccccaagaccaccaccccccccagcagccccccccccaccgccgtgagccccgagttcgcctacgtgcccgccgaccccgcccagctggccgcccagatgctgggcaaggtgagcagcatccacagcgaccagagcgacgtgctgatggtggacgtggccaccagcatgcccgtggtgatcaaggaggtgcccagcagcgaggccgccgaggacgtgatggtggccgcccccctggtgtgcagcggcaaggtgctggaggtgcaggtggtgaaccagaccagcgtgcacgtggacctgggcagccagcccaaggagaacgaggccgagcccagcaccgccagcagcgtgcccctgcaggacgagcaggagccccccgcctacgaccaggcccccgaggtgaccctgcaggccgacatcgaggtgatgagcaccgtgcacatcagcagcgtgtacaacgacgtgcccgtgaccgagggcgtggtgtacatcgagcagctgcccgagcagatcgtgatccccttcaccgaccaggtggcctgcctgaaggagaacgagcagagcaaggagaacgagcagagccccagagtgagccccaagagcgtggtggagaagaccaccagcggcatgagcaagaagagcgtggagagcgtgaagctggcccagctggaggagaacgccaagtacagcagcgtgtacatggaggccgaggccaccgccctgctgagcgacaccagcctgaagggccagcccgaggtgcccgcccagctgctggacgccgagggcgccatcaagatcggcagcgagaagagcctgcacctggaggtggagatcaccagcatcgtgagcgacaacaccggccaggaggagagcggcgagaacagcgtgccccaggagatggagggcaagcccgtgctgagcggcgaggccgccgaggccgtgcacagcggcaccagcgtgaagagcagcagcggccccttcccccccgcccccgagggcctgaccgcccccgagatcgagcccgagggcgagagcaccgccgagtag

SEQ ID NO: 74960 - DNA, 1452 bp, synthetic construct
  misc_feature 1..1452: note = Description of Artificial Sequence: Synthetic coding sequence
  source 1..1452: mol_type = other DNA
atgagcttcagcgacagcagcgccaccttcctgctgaacgagggcagcgccgacagctacaccagcagacccagcctggacagcgacgtgagcctggaggaggacagagagagcgccagaagagaggtggagagccaggcccagcagcagctggagagagccaagcacaagcccgtggccttcgccgtgagaaccaacgtgagctactgcggcgtgctggacgaggagtgccccgtgcagggcagcggcgtgaacttcgaggccaaggacttcctgcacatcaaggagaagtacagcaacgactggtggatcggcagactggtgaaggagggcggcgacatcgccttcatccccagcccccagagactggagagcatcagactgaagcaggagcagaaggccagaagaagcggcaaccccagcagcctgagcgacatcggcaacagaagaagccccccccccagcctggccaagcagaagcagaagcaggccgagcacgtgcccccctacgacgtggtgcccagcatgagacccgtggtgctggtgggccccagcctgaagggctacgaggtgaccgacatgatgcagaaggccctgttcgacttcctgaagcacagattcgacggcagaatcagcatcaccagagtgaccgccgacctgagcctggccaagagaagcgtgctgaacaaccccggcaagagaaccatcatcgagagaagcagcgccagaagcagcatcgccgaggtgcagagcgagatcgagagaatcttcgagctggccaagagcctgcagctggtggtgctggacgccgacaccatcaaccaccccgcccagctggccaagaccagcctggcccccatcatcgtgttcgtgaaggtgagcagccccaaggtgctgcagagactgatcagaagcagaggcaagagccagatgaagcacctgaccgtgcagatgatggcctacgacaagctggtgcagtgcccccccgagagcttcgacgtgatcctggacgagaaccagctggaggacgcctgcgagcacctggccgagtacctggaggtgtactggagagccacccaccaccccgcccccggccccggcctgctgggcccccccagcgccatccccggcctgcagaaccagcagctgctgggcgagagaggcgaggagcacagccccctggagagagacagcctgatgcccagcgacgaggccagcgagagcagcagacaggcctggaccggcagcagccagagaagcagcagacacctggaggaggactacgccgacgcctaccaggacctgtaccagccccacagacagcacaccagcggcctgcccagcgccaacggccacgacccccaggacagactgctggcccaggacagcgagcacaaccacagcgacagaaactggcagagaaacagaccctggcccaaggacagctactag

SEQ ID NO: 74961 - DNA, 1416 bp, synthetic construct
  misc_feature 1..1416: note = Description of Artificial Sequence: Synthetic coding sequence
  source 1..1416: mol_type = other DNA
atggagggcagcgccgacagctacaccagcagacccagcctggacagcgacgtgagcctggaggaggacagagagagcgccagaagagaggtggagagccaggcccagcagcagctggagagagccaagcacaagcccgtggccttcgccgtgagaaccaacgtgagctactgcggcgtgctggacgaggagtgccccgtgcagggcagcggcgtgaacttcgaggccaaggacttcctgcacatcaaggagaagtacagcaacgactggtggatcggcagactggtgaaggagggcggcgacatcgccttcatccccagcccccagagactggagagcatcagactgaagcaggagcagaaggccagaagaagcggcaaccccagcagcctgagcgacatcggcaacagaagaagccccccccccagcctggccaagcagaagcagaagcaggccgagcacgtgcccccctacgacgtggtgcccagcatgagacccgtggtgctggtgggccccagcctgaagggctacgaggtgaccgacatgatgcagaaggccctgttcgacttcctgaagcacagattcgacggcagaatcagcatcaccagagtgaccgccgacctgagcctggccaagagaagcgtgctgaacaaccccggcaagagaaccatcatcgagagaagcagcgccagaagcagcatcgccgaggtgcagagcgagatcgagagaatcttcgagctggccaagagcctgcagctggtggtgctggacgccgacaccatcaaccaccccgcccagctggccaagaccagcctggcccccatcatcgtgttcgtgaaggtgagcagccccaaggtgctgcagagactgatcagaagcagaggcaagagccagatgaagcacctgaccgtgcagatgatggcctacgacaagctggtgcagtgcccccccgagagcttcgacgtgatcctggacgagaaccagctggaggacgcctgcgagcacctggccgagtacctggaggtgtactggagagccacccaccaccccgcccccggccccggcctgctgggcccccccagcgccatccccggcctgcagaaccagcagctgctgggcgagagaggcgaggagcacagccccctggagagagacagcctgatgcccagcgacgaggccagcgagagcagcagacaggcctggaccggcagcagccagagaagcagcagacacctggaggaggactacgccgacgcctaccaggacctgtaccagccccacagacagcacaccagcggcctgcccagcgccaacggccacgacccccaggacagactgctggcccaggacagcgagcacaaccacagcgacagaaactggcagagaaacagaccctggcccaaggacagctactag

SEQ ID NO: 74962 - DNA, 1332 bp, synthetic construct
  misc_feature 1..1332: note = Description of Artificial Sequence: Synthetic coding sequence
  source 1..1332: mol_type = other DNA
atgtacgacgacagctacgtgcccggcttcgaggacagcgaggccggcagcgccgacagctacaccagcagacccagcctggacagcgacgtgagcctggaggaggacagagagagcgccagaagagaggtggagagccaggcccagcagcagctggagagagccaagaagtacagcaacgactggtggatcggcagactggtgaaggagggcggcgacatcgccttcatccccagcccccagagactggagagcatcagactgaagcaggagcagaaggccagaagaagcggcaaccccagcagcctgagcgacatcggcaacagaagaagccccccccccagcctggccaagcagaagcagaagcaggccgagcacgtgcccccctacgacgtggtgcccagcatgagacccgtggtgctggtgggccccagcctgaagggctacgaggtgaccgacatgatgcagaaggccctgttcgacttcctgaagcacagattcgacggcagaatcagcatcaccagagtgaccgccgacctgagcctggccaagagaagcgtgctgaacaaccccggcaagagaaccatcatcgagagaagcagcgccagaagcagcatcgccgaggtgcagagcgagatcgagagaatcttcgagctggccaagagcctgcagctggtggtgctggacgccgacaccatcaaccaccccgcccagctggccaagaccagcctggcccccatcatcgtgttcgtgaaggtgagcagccccaaggtgctgcagagactgatcagaagcagaggcaagagccagatgaagcacctgaccgtgcagatgatggcctacgacaagctggtgcagtgcccccccgagagcttcgacgtgatcctggacgagaaccagctggaggacgcctgcgagcacctggccgagtacctggaggtgtactggagagccacccaccaccccgcccccggccccggcctgctgggcccccccagcgccatccccggcctgcagaaccagcagctgctgggcgagagaggcgaggagcacagccccctggagagagacagcctgatgcccagcgacgaggccagcgagagcagcagacaggcctggaccggcagcagccagagaagcagcagacacctggaggaggactacgccgacgcctaccaggacctgtaccagccccacagacagcacaccagcggcctgcccagcgccaacggccacgacccccaggacagactgctggcccaggacagcgagcacaaccacagcgacagaaactggcagagaaacagaccctggcccaaggacagctactag

SEQ ID NO: 74963 - DNA, 1377 bp, synthetic construct
  misc_feature 1..1377: note = Description of Artificial Sequence: Synthetic coding sequence
  source 1..1377: mol_type = other DNA
atgagcagcagcagctacgccaagaacggcaccgccgacggcccccacagccccaccagccaggtggccagaggcaccaccaccagaagaagcagactgaagagaagcgacggcagcaccaccagcaccagcttcatcctgagacagggcagcgccgacagctacaccagcagacccagcgacagcgacgtgagcctggaggaggacagagaggccatcagacaggagagagagcagcaggccgccatccagctggagagagccaagagcaagcccgtggccttcgccgtgaagaccaacgtgagctactgcggcgccctggacgaggacgtgcccgtgcccagcaccgccatcagcttcgacgccaaggacttcctgcacatcaaggagaagtacaacaacgactggtggatcggcagactggtgaaggagggctgcgagatcggcttcatccccagccccctgagactggagaacatcagaatccagcaggagcagaagagaggcagattccacggcggcaagagcagcggcaacagcagcagcagcctgggcgagatggtgagcggcaccttcagagccacccccaccagcaccgccaagcagaagcagaaggtgaccgagcacatccccccctacgacgtggtgcccagcatgagacccgtggtgctggtgggccccagcctgaagggctacgaggtgaccgacatgatgcagaaggccctgttcgacttcctgaagcacagattcgacggcagaatcagcatcaccagagtgaccgccgacatcagcctggccaagagaagcgtgctgaacaaccccagcaagagagccatcatcgagagaagcaacaccagaagcagcctggccgaggtgcagagcgagatcgagagaatcttcgagctggccagaagcctgcagctggtggtgctggacgccgacaccatcaaccaccccgcccagctgatcaagaccagcctggcccccatcatcgtgcacgtgaaggtgagcagccccaaggtgctgcagagactgatcaagagcagaggcaagagccagagcaagcacctgaacgtgcagctggtggccgccgacaagctggcccagtgcccccccagccagagaatgagacacagcaaccacagcaccgagaacagccccatcgagagaagaagcctgatgaccagcgacgagaactaccacaacgagagagccagaaagagcagaaacagactgagcagcagcagccagcacagcagagaccactaccccctggtggaggaggactaccccgacagctaccaggacacctacaagccccacagaaacagaggcagccccggcggctacagccacgacagcagacacagactgtag

SEQ ID NO: 74964 - DNA, 1509 bp, synthetic construct
  misc_feature 1..1509: note = Description of Artificial Sequence: Synthetic coding sequence
  source 1..1509: mol_type = other DNA
atggacgtggtggccagaggcaccaccaccagaagaagcagactgaagagaagcgacggcagcaccaccagcaccagcttcatcctgagacagggcagcgccgacagctacaccagcagacccagcgacagcgacgtgagcctggaggaggacagagaggccatcagacaggagagagagcagcaggccgccatccagctggagagagccaagagcaagcccgtggccttcgccgtgaagaccaacgtgagctactgcggcgccctggacgaggacgtgcccgtgcccagcaccgccatcagcttcgacgccaaggacttcctgcacatcaaggagaagtacaacaacgactggtggatcggcagactggtgaaggagggctgcgagatcggcttcatccccagccccctgagactggagaacatcagaatccagcaggagcagaagagaggcagattccacggcggcaagagcagcggcaacagcagcagcagcctgggcgagatggtgagcggcaccttcagagccacccccaccagcaccgccaagcagaagcagaaggtgaccgagcacatccccccctacgacgtggtgcccagcatgagacccgtggtgctggtgggccccagcctgaagggctacgaggtgaccgacatgatgcagaaggccctgttcgacttcctgaagcacagattcgacggcagaatcagcatcaccagagtgaccgccgacatcagcctggccaagagaagcgtgctgaacaaccccagcaagagagccatcatcgagagaagcaacaccagaagcagcctggccgaggtgcagagcgagatcgagagaatcttcgagctggccagaagcctgcagctggtggtgctggacgccgacaccatcaaccaccccgcccagctgatcaagaccagcctggcccccatcatcgtgcacgtgaaggtgagcagccccaaggtgctgcagagactgatcaagagcagaggcaagagccagagcaagcacctgaacgtgcagctggtggccgccgacaagctggcccagtgcccccccgagatgttcgacgtgatcctggacgagaaccagctggaggacgcctgcgagcacctgggcgagtacctggaggcctactggagagccacccacaccaccagcagcacccccatgacccccctgctgggcagaaacctgggcagcaccgccctgagcccctaccccaccgccatcagcggcctgcagagccagagaatgagacacagcaaccacagcaccgagaacagccccatcgagagaagaagcctgatgaccagcgacgagaactaccacaacgagagagccagaaagagcagaaacagactgagcagcagcagccagcacagcagagaccactaccccctggtggaggaggactaccccgacagctaccaggacacctacaagccccacagaaacagaggcagccccggcggctacagccacgacagcagacacagactgtag

SEQ ID NO: 74965 - DNA, 3438 bp, synthetic construct
  misc_feature 1..3438: note = Description of Artificial Sequence: Synthetic coding sequence
  source 1..3438: mol_type = other DNA
atggccgtgcccgccagaacctgcggcgccagcagacccggccccgccagaaccgccagaccctggcccggctgcggcccccaccccggccccggcaccagaagacccaccagcggcccccccagacccctgtggctgctgctgcccctgctgcccctgctggccgcccccggcgccagcgcctacagcttcccccagcagcacaccatgcagcactgggccagaagactggagcaggaggtggacggcgtgatgagaatcttcggcggcgtgcagcagctgagagagatctacaaggacaacagaaacctgttcgaggtgcaggagaacgagccccagaagctggtggagaaggtggccggcgacatcgagagcctgctggacagaaaggtgcaggccctgaagagactggccgacgccgccgagaacttccagaaggcccacagatggcaggacaacatcaaggaggaggacatcgtgtactacgacgccaaggccgacgccgagctggacgaccccgagagcgaggacgtggagagaggcagcaaggccagcaccctgagactggacttcatcgaggaccccaacttcaagaacaaggtgaactacagctacgccgccgtgcagatccccaccgacatctacaagggcagcaccgtgatcctgaacgagctgaactggaccgaggccctggagaacgtgttcatggagaacagaagacaggaccccaccctgctgtggcaggtgttcggcagcgccaccggcgtgaccagatactaccccgccaccccctggagagcccccaagaagatcgacctgtacgacgtgagaagaagaccctggtacatccagggcgccagcagccccaaggacatggtgatcatcgtggacgtgagcggcagcgtgagcggcctgaccctgaagctgatgaagaccagcgtgtgcgagatgctggacaccctgagcgacgacgactacgtgaacgtggccagcttcaacgagaaggcccagcccgtgagctgcttcacccacctggtgcaggccaacgtgagaaacaagaaggtgttcaaggaggccgtgcagggcatggtggccaagggcaccaccggctacaaggccggcttcgagtacgccttcgaccagctgcagaacagcaacatcaccagagccaactgcaacaagatgatcatgatgttcaccgacggcggcgaggacagagtgcaggacgtgttcgagaagtacaactggcccaacagaaccgtgagagtgttcaccttcagcgtgggccagcacaactacgacgtgacccccctgcagtggatggcctgcgccaacaagggctactacttcgagatccccagcatcggcgccatcagaatcaacacccaggagtacctggacgtgctgggcagacccatggtgctggccggcaaggaggccaagcaggtgcagtggaccaacgtgtacgaggacgccctgggcctgggcctggtggtgaccggcaccctgcccgtgttcaacctgacccaggacggccccggcgagaagaagaaccagctgatcctgggcgtgatgggcatcgacgtggccctgaacgacatcaagagactgacccccaactacaccctgggcgccaacggctacgtgttcgccatcgacctgaacggctacgtgctgctgcaccccaacctgaagccccagaccaccaacttcagagagcccgtgaccctggacttcctggacgccgagctggaggacgagaacaaggaggagatcagaagaagcatgatcgacggcaacaagggccacaagcagatcagaaccctggtgaagagcctggacgagagatacatcgacgaggtgaccagaaactacacctgggtgcccatcagaagcaccaactacagcctgggcctggtgctgcccccctacagcaccttctacctgcaggccaacctgagcgaccagatcctgcaggtgaagtacttcgagttcctgctgcccagcagcttcgagagcgagggccacgtgttcatcgcccccagagagtactgcaaggacctgaacgccagcgacaacaacaccgagttcctgaagaacttcatcgagctgatggagaaggtgacccccgacagcaagcagtgcaacaacttcctgctgcacaacctgatcctggacaccggcatcacccagcagctggtggagagagtgtggagagaccaggacctgaacacctacagcctgctggccgtgttcgccgccaccgacggcggcatcaccagagtgttccccaacaaggccgccgaggactggaccgagaaccccgagcccttcaacgccagcttctacagaagaagcctggacaaccacggctacgtgttcaagcccccccaccaggacgccctgctgagacccctggagctggagaacgacaccgtgggcatcctggtgagcaccgccgtggagctgagcctgggcagaagaaccctgagacccgccgtggtgggcgtgaagctggacctggaggcctgggccgagaagttcaaggtgctggccagcaacagaacccaccaggaccagccccagaagtgcggccccaacagccactgcgagatggactgcgaggtgaacaacgaggacctgctgtgcgtgctgatcgacgacggcggcttcctggtgctgagcaaccagaaccaccagtgggaccaggtgggcagattcttcagcgaggtggacgccaacctgatgctggccctgtacaacaacagcttctacaccagaaaggagagctacgactaccaggccgcctgcgccccccagccccccggcaacctgggcgccgcccccagaggcgtgttcgtgcccaccgtggccgacttcctgaacctggcctggtggaccagcgccgccgcctggagcctgttccagcagctgctgtacggcctgatctaccacagctggttccaggccgaccccgccgaggccgagggcagccccgagaccagagagagcagctgcgtgatgaagcagacccagtactacttcggcagcgtgaacgccagctacaacgccatcatcgactgcggcaactgcagcagactgttccacgcccagagactgaccaacaccaacctgctgttcgtggtggccgagaagcccctgtgcagccagtgcgaggccggcagactgctgcagaaggagacccactgccccgccgacggccccgagcagtgcgagctggtgcagagacccagatacagaagaggcccccacatctgcttcgactacaacgccaccgaggacaccagcgactgcggcagaggcgccagcttcccccccagcctgggcgtgctggtgagcctgcagctgctgctgctgctgggcctgccccccagaccccagccccaggtgctggtgcacgccagcagaagactgtag

SEQ ID NO: 74966 - DNA, 3231 bp, synthetic construct
  misc_feature 1..3231: note = Description of Artificial Sequence: Synthetic coding sequence
  source 1..3231: mol_type = other DNA
atgcagcactgggccagaagactggagcaggaggtggacggcgtgatgagaatcttcggcggcgtgcagcagctgagagagatctacaaggacaacagaaacctgttcgaggtgcaggagaacgagccccagaagctggtggagaaggtggccggcgacatcgagagcctgctggacagaaaggtgcaggccctgaagagactggccgacgccgccgagaacttccagaaggcccacagatggcaggacaacatcaaggaggaggacatcgtgtactacgacgccaaggccgacgccgagctggacgaccccgagagcgaggacgtggagagaggcagcaaggccagcaccctgagactggacttcatcgaggaccccaacttcaagaacaaggtgaactacagctacgccgccgtgcagatccccaccgacatctacaagggcagcaccgtgatcctgaacgagctgaactggaccgaggccctggagaacgtgttcatggagaacagaagacaggaccccaccctgctgtggcaggtgttcggcagcgccaccggcgtgaccagatactaccccgccaccccctggagagcccccaagaagatcgacctgtacgacgtgagaagaagaccctggtacatccagggcgccagcagccccaaggacatggtgatcatcgtggacgtgagcggcagcgtgagcggcctgaccctgaagctgatgaagaccagcgtgtgcgagatgctggacaccctgagcgacgacgactacgtgaacgtggccagcttcaacgagaaggcccagcccgtgagctgcttcacccacctggtgcaggccaacgtgagaaacaagaaggtgttcaaggaggccgtgcagggcatggtggccaagggcaccaccggctacaaggccggcttcgagtacgccttcgaccagctgcagaacagcaacatcaccagagccaactgcaacaagatgatcatgatgttcaccgacggcggcgaggacagagtgcaggacgtgttcgagaagtacaactggcccaacagaaccgtgagagtgttcaccttcagcgtgggccagcacaactacgacgtgacccccctgcagtggatggcctgcgccaacaagggctactacttcgagatccccagcatcggcgccatcagaatcaacacccaggagtacctggacgtgctgggcagacccatggtgctggccggcaaggaggccaagcaggtgcagtggaccaacgtgtacgaggacgccctgggcctgggcctggtggtgaccggcaccctgcccgtgttcaacctgacccaggacggccccggcgagaagaagaaccagctgatcctgggcgtgatgggcatcgacgtggccctgaacgacatcaagagactgacccccaactacaccctgggcgccaacggctacgtgttcgccatcgacctgaacggctacgtgctgctgcaccccaacctgaagccccagaccaccaacttcagagagcccgtgaccctggacttcctggacgccgagctggaggacgagaacaaggaggagatcagaagaagcatgatcgacggcaacaagggccacaagcagatcagaaccctggtgaagagcctggacgagagatacatcgacgaggtgaccagaaactacacctgggtgcccatcagaagcaccaactacagcctgggcctggtgctgcccccctacagcaccttctacctgcaggccaacctgagcgaccagatcctgcaggtgaagtacttcgagttcctgctgcccagcagcttcgagagcgagggccacgtgttcatcgcccccagagagtactgcaaggacctgaacgccagcgacaacaacaccgagttcctgaagaacttcatcgagctgatggagaaggtgacccccgacagcaagcagtgcaacaacttcctgctgcacaacctgatcctggacaccggcatcacccagcagctggtggagagagtgtggagagaccaggacctgaacacctacagcctgctggccgtgttcgccgccaccgacggcggcatcaccagagtgttccccaacaaggccgccgaggactggaccgagaaccccgagcccttcaacgccagcttctacagaagaagcctggacaaccacggctacgtgttcaagcccccccaccaggacgccctgctgagacccctggagctggagaacgacaccgtgggcatcctggtgagcaccgccgtggagctgagcctgggcagaagaaccctgagacccgccgtggtgggcgtgaagctggacctggaggcctgggccgagaagttcaaggtgctggccagcaacagaacccaccaggaccagccccagaagtgcggccccaacagccactgcgagatggactgcgaggtgaacaacgaggacctgctgtgcgtgctgatcgacgacggcggcttcctggtgctgagcaaccagaaccaccagtgggaccaggtgggcagattcttcagcgaggtggacgccaacctgatgctggccctgtacaacaacagcttctacaccagaaaggagagctacgactaccaggccgcctgcgccccccagccccccggcaacctgggcgccgcccccagaggcgtgttcgtgcccaccgtggccgacttcctgaacctggcctggtggaccagcgccgccgcctggagcctgttccagcagctgctgtacggcctgatctaccacagctggttccaggccgaccccgccgaggccgagggcagccccgagaccagagagagcagctgcgtgatgaagcagacccagtactacttcggcagcgtgaacgccagctacaacgccatcatcgactgcggcaactgcagcagactgttccacgcccagagactgaccaacaccaacctgctgttcgtggtggccgagaagcccctgtgcagccagtgcgaggccggcagactgctgcagaaggagacccactgccccgccgacggccccgagcagtgcgagctggtgcagagacccagatacagaagaggcccccacatctgcttcgactacaacgccaccgaggacaccagcgactgcggcagaggcgccagcttcccccccagcctgggcgtgctggtgagcctgcagctgctgctgctgctgggcctgccccccagaccccagccccaggtgctggtgcacgccagcagaagactgtag

SEQ ID NO: 74967 - DNA, 3441 bp, synthetic construct
  misc_feature 1..3441: note = Description of Artificial Sequence: Synthetic coding sequence
  source 1..3441: mol_type = other DNA
atggccgtgcccgccagaacctgcggcgccagcagacccggccccgccagaaccgccagaccctggcccggctgcggcccccaccccggccccggcaccagaagacccaccagcggcccccccagacccctgtggctgctgctgcccctgctgcccctgctggccgcccccggcgccagcgcctacagcttcccccagcagcacaccatgcagcactgggccagaagactggagcaggaggtggacggcgtgatgagaatcttcggcggcgtgcagcagctgagagagatctacaaggacaacagaaacctgttcgaggtgcaggagaacgagccccagaagctggtggagaaggtggccggcgacatcgagagcctgctggacagaaaggtgcaggccctgaagagactggccgacgccgccgagaacttccagaaggcccacagatggcaggacaacatcaaggaggaggacatcgtgtactacgacgccaaggccgacgccgagctggacgaccccgagagcgaggacgtggagagaggcagcaaggccagcaccctgagactggacttcatcgaggaccccaacttcaagaacaaggtgaactacagctacgccgccgtgcagatccccaccgacatctacaagggcagcaccgtgatcctgaacgagctgaactggaccgaggccctggagaacgtgttcatggagaacagaagacaggaccccaccctgctgtggcaggtgttcggcagcgccaccggcgtgaccagatactaccccgccaccccctggagagcccccaagaagatcgacctgtacgacgtgagaagaagaccctggtacatccagggcgccagcagccccaaggacatggtgatcatcgtggacgtgagcggcagcgtgagcggcctgaccctgaagctgatgaagaccagcgtgtgcgagatgctggacaccctgagcgacgacgactacgtgaacgtggccagcttcaacgagaaggcccagcccgtgagctgcttcacccacctggtgcaggccaacgtgagaaacaagaaggtgttcaaggaggccgtgcagggcatggtggccaagggcaccaccggctacaaggccggcttcgagtacgccttcgaccagctgcagaacagcaacatcaccagagccaactgcaacaagatgatcatgatgttcaccgacggcggcgaggacagagtgcaggacgtgttcgagaagtacaactggcccaacagaaccgtgagagtgttcaccttcagcgtgggccagcacaactacgacgtgacccccctgcagtggatggcctgcgccaacaagggctactacttcgagatccccagcatcggcgccatcagaatcaacacccaggagtacctggacgtgctgggcagacccatggtgctggccggcaaggaggccaagcaggtgcagtggaccaacgtgtacgaggacgccctgggcctgggcctggtggtgaccggcaccctgcccgtgttcaacctgacccaggacggccccggcgagaagaagaaccagctgatcctgggcgtgatgggcatcgacgtggccctgaacgacatcaagagactgacccccaactacaccctgggcgccaacggctacgtgttcgccatcgacctgaacggctacgtgctgctgcaccccaacctgaagccccagaccaccaacttcagagagcccgtgaccctggacttcctggacgccgagctggaggacgagaacaaggaggagatcagaagaagcatgatcgacggcaacaagggccacaagcagatcagaaccctggtgaagagcctggacgagagatacatcgacgaggtgaccagaaactacacctgggtgcccatcagaagcaccaactacagcctgggcctggtgctgcccccctacagcaccttctacctgcaggccaacctgagcgaccagatcctgcaggtgaagtacttcgagttcctgctgcccagcagcttcgagagcgagggccacgtgttcatcgcccccagagagtactgcaaggacctgaacgccagcgacaacaacaccgagttcctgaagaacttcatcgagctgatggagaaggtgacccccgacagcaagcagtgcaacaacttcctgctgcacaacctgatcctggacaccggcatcacccagcagctggtggagagagtgtggagagaccaggacctgaacacctacagcctgctggccgtgttcgccgccaccgacggcggcatcaccagagtgttccccaacaaggccgccgaggactggaccgagaaccccgagcccttcaacgccagcttctacagaagaagcctggacaaccacggctacgtgttcaagcccccccaccaggacgccctgctgagacccctggagctggagaacgacaccgtgggcatcctggtgagcaccgccgtggagctgagcctgggcagaagaaccctgagacccgccgtggtgggcgtgaagctggacctggaggcctgggccgagaagttcaaggtgctggccagcaacagaacccaccaggaccagccccagaagtgcggccccaacagccactgcgagatggactgcgaggtgaacaacgaggacctgctgtgcgtgctgatcgacgacggcggcttcctggtgctgagcaaccagaaccaccagtgggaccaggtgggcagattcttcagcgaggtggacgccaacctgatgctggccctgtacaacaacagcttctacaccagaaaggagagctacgactaccaggccgcctgcgccccccagccccccggcaacctgggcgccgcccccagaggcgtgttcgtgcccaccgtggccgacttcctgaacctggcctggtggaccagcgccgccgcctggagcctgttccagcagctgctgtacggcctgatctaccacagctggttccaggccgaccccgccgaggccgagggcagccccgagaccagagagagcagctgcgtgatgaagcagacccagtactacttcggcagcgtgaacgccagctacaacgccatcatcgactgcggcaactgcagcagactgttccacgcccagagactgaccaacaccaacctgctgttcgtggtggccgagaagcccctgtgcagccagtgcgaggccggcagactgctgcagaaggagacccactgctgccccgccgacggccccgagcagtgcgagctggtgcagagacccagatacagaagaggcccccacatctgcttcgactacaacgccaccgaggacaccagcgactgcggcagaggcgccagcttcccccccagcctgggcgtgctggtgagcctgcagctgctgctgctgctgggcctgccccccagaccccagccccaggtgctggtgcacgccagcagaagactgtag

SEQ ID NO: 74968 - DNA, 3432 bp, synthetic construct
  misc_feature 1..3432: note = Description of Artificial Sequence: Synthetic coding sequence
  source 1..3432: mol_type = other DNA
atggccgtgcccgccagaacctgcggcgccagcagacccggccccgccagaaccgccagaccctggcccggctgcggcccccaccccggccccggcaccagaagacccaccagcggcccccccagacccctgtggctgctgctgcccctgctgcccctgctggccgcccccggcgccagcgcctacagcttcccccagcagcacaccatgcagcactgggccagaagactggagcaggaggtggacggcgtgatgagaatcttcggcggcgtgcagcagctgagagagatctacaaggacaacagaaacctgttcgaggtgcaggagaacgagccccagaagctggtggagaaggtggccggcgacatcgagagcctgctggacagaaaggtgcaggccctgaagagactggccgacgccgccgagaacttccagaaggcccacagatggcaggacaacatcaaggaggaggacatcgtgtactacgacgccaaggccgacgccgagctggacgaccccgagagcgaggacgtggagagaggcagcaaggccagcaccctgagactggacttcatcgaggaccccaacttcaagaacaaggtgaactacagctacgccgccgtgcagatccccaccgacatctacaagggcagcaccgtgatcctgaacgagctgaactggaccgaggccctggagaacgtgttcatggagaacagaagacaggaccccaccctgctgtggcaggtgttcggcagcgccaccggcgtgaccagatactaccccgccaccccctggagagcccccaagaagatcgacctgtacgacgtgagaagaagaccctggtacatccagggcgccagcagccccaaggacatggtgatcatcgtggacgtgagcggcagcgtgagcggcctgaccctgaagctgatgaagaccagcgtgtgcgagatgctggacaccctgagcgacgacgactacgtgaacgtggccagcttcaacgagaaggcccagcccgtgagctgcttcacccacctggtgcaggccaacgtgagaaacaagaaggtgttcaaggaggccgtgcagggcatggtggccaagggcaccaccggctacaaggccggcttcgagtacgccttcgaccagctgcagaacagcaacatcaccagagccaactgcaacaagatgatcatgatgttcaccgacggcggcgaggacagagtgcaggacgtgttcgagaagtacaactggcccaacagaaccgtgagagtgttcaccttcagcgtgggccagcacaactacgacgtgacccccctgcagtggatggcctgcgccaacaagggctactacttcgagatccccagcatcggcgccatcagaatcaacacccaggagtacctggacgtgctgggcagacccatggtgctggccggcaaggaggccaagcaggtgcagtggaccaacgtgtacgaggacgccctgggcctgggcctggtggtgaccggcaccctgcccgtgttcaacctgacccaggacggccccggcgagaagaagaaccagctgatcctgggcgtgatgggcatcgacgtggccctgaacgacatcaagagactgacccccaactacaccctgggcgccaacggctacgtgttcgccatcgacctgaacggctacgtgctgctgcaccccaacctgaagccccagaccaccaacttcagagagcccgtgaccctggacttcctggacgccgagctggaggacgagaacaaggaggagatcagaagaagcatgatcgacggcaacaagggccacaagcagatcagaaccctggtgaagagcctggacgagagatacatcgacgaggtgaccagaaactacacctgggtgcccatcagaagcaccaactacagcctgggcctggtgctgcccccctacagcaccttctacctgcaggccaacctgagcgaccagatcctgcaggtgaagtacttcgagttcctgctgcccagcagcttcgagagcgagggccacgtgttcatcgcccccagagagtactgcaaggacctgaacgccagcgacaacaacaccgagttcctgaagaacttcatcgagctgatggagaaggtgacccccgacagcaagcagtgcaacaacttcctgctgcacaacctgatcctggacaccggcatcacccagcagctggtggagagagtgtggagagaccaggacctgaacacctacagcctgctggccgtgttcgccgccaccgacggcggcatcaccagagtgttccccaacaaggccgccgaggactggaccgagaaccccgagcccttcaacgccagcttctacagaagaagcctggacaaccacggctacgtgttcaagcccccccaccaggacgccctgctgagacccctggagctggagaacgacaccgtgggcatcctggtgagcaccgccgtggagctgagcctgggcagaagaaccctgagacccgccgtggtgggcgtgaagctggacctggaggcctgggccgagaagttcaaggtgctggccagcaacagaacccaccaggaccagccccagaagtgcggccccaacagccactgcgagatggactgcgaggtgaacaacgaggacctgctgtgcgtgctgatcgacgacggcggcttcctggtgctgagcaaccagaaccaccagtgggaccaggtgggcagattcttcagcgaggtggacgccaacctgatgctggccctgtacaacaacagcttctacaccagaaaggagagctacgactaccaggccgcctgcgccccccagccccccggcaacctgggcgccgcccccagaggcgtgttcgtgcccaccgtggccgacttcctgaacctggcctggtggaccagcgccgccgcctggagcctgttccagcagctgctgtacggcctgatctaccacagctggttccaggccgaccccgccgaggccgagggcagccccgagaccagagagagcagctgcgtgatgaagcagacccagtactacttcggcagcgtgaacgccagctacaacgccatcatcgactgcggcaactgcagcagactgttccacgcccagagactgaccaacaccaacctgctgttcgtggtggccgagaagcccctgtgcagccagtgcgaggccggcagactgctgcagaaggagacccacagcgacggccccgagcagtgcgagctggtgcagagacccagatacagaagaggcccccacatctgcttcgactacaacgccaccgaggacaccagcgactgcggcagaggcgccagcttcccccccagcctgggcgtgctggtgagcctgcagctgctgctgctgctgggcctgccccccagaccccagccccaggtgctggtgcacgccagcagaagactgtag

SEQ ID NO: 74969 - DNA, 3462 bp, synthetic construct
  misc_feature 1..3462: note = Description of Artificial Sequence: Synthetic coding sequence
  source 1..3462: mol_type = other DNA
atggccgtgcccgccagaacctgcggcgccagcagacccggccccgccagaaccgccagaccctggcccggctgcggcccccaccccggccccggcaccagaagacccaccagcggcccccccagacccctgtggctgctgctgcccctgctgcccctgctggccgcccccggcgccagcgcctacagcttcccccagcagcacaccatgcagcactgggccagaagactggagcaggaggtggacggcgtgatgagaatcttcggcggcgtgcagcagctgagagagatctacaaggacaacagaaacctgttcgaggtgcaggagaacgagccccagaagctggtggagaaggtggccggcgacatcgagagcctgctggacagaaaggtgcaggccctgaagagactggccgacgccgccgagaacttccagaaggcccacagatggcaggacaacatcaaggaggaggacatcgtgtactacgacgccaaggccgacgccgagctggacgaccccgagagcgaggacgtggagagaggcagcaaggccagcaccctgagactggacttcatcgaggaccccaacttcaagaacaaggtgaactacagctacgccgccgtgcagatccccaccgacatctacaagggcagcaccgtgatcctgaacgagctgaactggaccgaggccctggagaacgtgttcatggagaacagaagacaggaccccaccctgctgtggcaggtgttcggcagcgccaccggcgtgaccagatactaccccgccaccccctggagagcccccaagaagatcgacctgtacgacgtgagaagaagaccctggtacatccagggcgccagcagccccaaggacatggtgatcatcgtggacgtgagcggcagcgtgagcggcctgaccctgaagctgatgaagaccagcgtgtgcgagatgctggacaccctgagcgacgacgactacgtgaacgtggccagcttcaacgagaaggcccagcccgtgagctgcttcacccacctggtgcaggccaacgtgagaaacaagaaggtgttcaaggaggccgtgcagggcatggtggccaagggcaccaccggctacaaggccggcttcgagtacgccttcgaccagctgcagaacagcaacatcaccagagccaactgcaacaagatgatcatgatgttcaccgacggcggcgaggacagagtgcaggacgtgttcgagaagtacaactggcccaacagaaccgtgagagtgttcaccttcagcgtgggccagcacaactacgacgtgacccccctgcagtggatggcctgcgccaacaagggctactacttcgagatccccagcatcggcgccatcagaatcaacacccaggagtacctggacgtgctgggcagacccatggtgctggccggcaaggaggccaagcaggtgcagtggaccaacgtgtacgaggacgccctgggcctgggcctggtggtgaccggcaccctgcccgtgttcaacctgacccaggacggccccggcgagaagaagaaccagctgatcctgggcgtgatgggcatcgacgtggccctgaacgacatcaagagactgacccccaactacaccctgggcgccaacggctacgtgttcgccatcgacctgaacggctacgtgctgctgcaccccaacctgaagccccagaccaccaacttcagagagcccgtgaccctggacttcctggacgccgagctggaggacgagaacaaggaggagatcagaagaagcatgatcgacggcaacaagggccacaagcagatcagaaccctggtgaagagcctggacgagagatacatcgacgaggtgaccagaaactacacctgggtgcccatcagaagcaccaactacagcctgggcctggtgctgcccccctacagcaccttctacctgcaggccaacctgagcgaccagatcctgcaggtgaagctgcccatcagcaagctgaaggacttcgagttcctgctgcccagcagcttcgagagcgagggccacgtgttcatcgcccccagagagtactgcaaggacctgaacgccagcgacaacaacaccgagttcctgaagaacttcatcgagctgatggagaaggtgacccccgacagcaagcagtgcaacaacttcctgctgcacaacctgatcctggacaccggcatcacccagcagctggtggagagagtgtggagagaccaggacctgaacacctacagcctgctggccgtgttcgccgccaccgacggcggcatcaccagagtgttccccaacaaggccgccgaggactggaccgagaaccccgagcccttcaacgccagcttctacagaagaagcctggacaaccacggctacgtgttcaagcccccccaccaggacgccctgctgagacccctggagctggagaacgacaccgtgggcatcctggtgagcaccgccgtggagctgagcctgggcagaagaaccctgagacccgccgtggtgggcgtgaagctggacctggaggcctgggccgagaagttcaaggtgctggccagcaacagaacccaccaggaccagccccagaagtgcggccccaacagccactgcgagatggactgcgaggtgaacaacgaggacctgctgtgcgtgctgatcgacgacggcggcttcctggtgctgagcaaccagaaccaccagtgggaccaggtgggcagattcttcagcgaggtggacgccaacctgatgctggccctgtacaacaacagcttctacaccagaaaggagagctacgactaccaggccgcctgcgccccccagccccccggcaacctgggcgccgcccccagaggcgtgttcgtgcccaccgtggccgacttcctgaacctggcctggtggaccagcgccgccgcctggagcctgttccagcagctgctgtacggcctgatctaccacagctggttccaggccgaccccgccgaggccgagggcagccccgagaccagagagagcagctgcgtgatgaagcagacccagtactacttcggcagcgtgaacgccagctacaacgccatcatcgactgcggcaactgcagcagactgttccacgcccagagactgaccaacaccaacctgctgttcgtggtggccgagaagcccctgtgcagccagtgcgaggccggcagactgctgcagaaggagacccactgctgccccgccgacggccccgagcagtgcgagctggtgcagagacccagatacagaagaggcccccacatctgcttcgactacaacgccaccgaggacaccagcgactgcggcagaggcgccagcttcccccccagcctgggcgtgctggtgagcctgcagctgctgctgctgctgggcctgccccccagaccccagccccaggtgctggtgcacgccagcagaagactgtag

SEQ ID NO: 74970 - DNA, 3453 bp, synthetic construct
  misc_feature 1..3453: note = Description of Artificial Sequence: Synthetic coding sequence
  source 1..3453: mol_type = other DNA
atggccgtgcccgccagaacctgcggcgccagcagacccggccccgccagaaccgccagaccctggcccggctgcggcccccaccccggccccggcaccagaagacccaccagcggcccccccagacccctgtggctgctgctgcccctgctgcccctgctggccgcccccggcgccagcgcctacagcttcccccagcagcacaccatgcagcactgggccagaagactggagcaggaggtggacggcgtgatgagaatcttcggcggcgtgcagcagctgagagagatctacaaggacaacagaaacctgttcgaggtgcaggagaacgagccccagaagctggtggagaaggtggccggcgacatcgagagcctgctggacagaaaggtgcaggccctgaagagactggccgacgccgccgagaacttccagaaggcccacagatggcaggacaacatcaaggaggaggacatcgtgtactacgacgccaaggccgacgccgagctggacgaccccgagagcgaggacgtggagagaggcagcaaggccagcaccctgagactggacttcatcgaggaccccaacttcaagaacaaggtgaactacagctacgccgccgtgcagatccccaccgacatctacaagggcagcaccgtgatcctgaacgagctgaactggaccgaggccctggagaacgtgttcatggagaacagaagacaggaccccaccctgctgtggcaggtgttcggcagcgccaccggcgtgaccagatactaccccgccaccccctggagagcccccaagaagatcgacctgtacgacgtgagaagaagaccctggtacatccagggcgccagcagccccaaggacatggtgatcatcgtggacgtgagcggcagcgtgagcggcctgaccctgaagctgatgaagaccagcgtgtgcgagatgctggacaccctgagcgacgacgactacgtgaacgtggccagcttcaacgagaaggcccagcccgtgagctgcttcacccacctggtgcaggccaacgtgagaaacaagaaggtgttcaaggaggccgtgcagggcatggtggccaagggcaccaccggctacaaggccggcttcgagtacgccttcgaccagctgcagaacagcaacatcaccagagccaactgcaacaagatgatcatgatgttcaccgacggcggcgaggacagagtgcaggacgtgttcgagaagtacaactggcccaacagaaccgtgagagtgttcaccttcagcgtgggccagcacaactacgacgtgacccccctgcagtggatggcctgcgccaacaagggctactacttcgagatccccagcatcggcgccatcagaatcaacacccaggagtacctggacgtgctgggcagacccatggtgctggccggcaaggaggccaagcaggtgcagtggaccaacgtgtacgaggacgccctgggcctgggcctggtggtgaccggcaccctgcccgtgttcaacctgacccaggacggccccggcgagaagaagaaccagctgatcctgggcgtgatgggcatcgacgtggccctgaacgacatcaagagactgacccccaactacaccctgggcgccaacggctacgtgttcgccatcgacctgaacggctacgtgctgctgcaccccaacctgaagccccagaccaccaacttcagagagcccgtgaccctggacttcctggacgccgagctggaggacgagaacaaggaggagatcagaagaagcatgatcgacggcaacaagggccacaagcagatcagaaccctggtgaagagcctggacgagagatacatcgacgaggtgaccagaaactacacctgggtgcccatcagaagcaccaactacagcctgggcctggtgctgcccccctacagcaccttctacctgcaggccaacctgagcgaccagatcctgcaggtgaagctgcccatcagcaagctgaaggacttcgagttcctgctgcccagcagcttcgagagcgagggccacgtgttcatcgcccccagagagtactgcaaggacctgaacgccagcgacaacaacaccgagttcctgaagaacttcatcgagctgatggagaaggtgacccccgacagcaagcagtgcaacaacttcctgctgcacaacctgatcctggacaccggcatcacccagcagctggtggagagagtgtggagagaccaggacctgaacacctacagcctgctggccgtgttcgccgccaccgacggcggcatcaccagagtgttccccaacaaggccgccgaggactggaccgagaaccccgagcccttcaacgccagcttctacagaagaagcctggacaaccacggctacgtgttcaagcccccccaccaggacgccctgctgagacccctggagctggagaacgacaccgtgggcatcctggtgagcaccgccgtggagctgagcctgggcagaagaaccctgagacccgccgtggtgggcgtgaagctggacctggaggcctgggccgagaagttcaaggtgctggccagcaacagaacccaccaggaccagccccagaagtgcggccccaacagccactgcgagatggactgcgaggtgaacaacgaggacctgctgtgcgtgctgatcgacgacggcggcttcctggtgctgagcaaccagaaccaccagtgggaccaggtgggcagattcttcagcgaggtggacgccaacctgatgctggccctgtacaacaacagcttctacaccagaaaggagagctacgactaccaggccgcctgcgccccccagccccccggcaacctgggcgccgcccccagaggcgtgttcgtgcccaccgtggccgacttcctgaacctggcctggtggaccagcgccgccgcctggagcctgttccagcagctgctgtacggcctgatctaccacagctggttccaggccgaccccgccgaggccgagggcagccccgagaccagagagagcagctgcgtgatgaagcagacccagtactacttcggcagcgtgaacgccagctacaacgccatcatcgactgcggcaactgcagcagactgttccacgcccagagactgaccaacaccaacctgctgttcgtggtggccgagaagcccctgtgcagccagtgcgaggccggcagactgctgcagaaggagacccacagcgacggccccgagcagtgcgagctggtgcagagacccagatacagaagaggcccccacatctgcttcgactacaacgccaccgaggacaccagcgactgcggcagaggcgccagcttcccccccagcctgggcgtgctggtgagcctgcagctgctgctgctgctgggcctgccccccagaccccagccccaggtgctggtgcacgccagcagaagactgtag

SEQ ID NO: 74971 - DNA, 3276 bp, synthetic construct
  misc_feature 1..3276: note = Description of Artificial Sequence: Synthetic coding sequence
  source 1..3276: mol_type = other DNA
atggccggccccggcagccccagaagagccagcagaggcgccagcgccctgctggccgccgccctgctgtacgccgccctgggcgacgtggtgagaagcgagcagcagatccccctgagcgtggtgaagctgtgggccagcgccttcggcggcgagatcaagagcatcgccgccaagtacagcggcagccagctgctgcagaagaagtacaaggagtacgagaaggacgtggccatcgaggagatcgacggcctgcagctggtgaagaagctggccaagaacatggaggagatgttccacaagaagagcgaggccgtgagaagactggtggaggccgccgaggaggcccacctgaagcacgagttcgacgccgacctgcagtacgagtacttcaacgccgtgctgatcaacgagagagacaaggacggcaacttcctggagctgggcaaggagttcatcctggcccccaacgaccacttcaacaacctgcccgtgaacatcagcctgagcgacgtgcaggtgcccaccaacatgtacaacaaggaccccgccatcgtgaacggcgtgtactggagcgagagcctgaacaaggtgttcgtggacaacttcgacagagaccccagcctgatctggcagtacttcggcagcgccaagggcttcttcagacagtaccccggcatcaagtgggagcccgacgagaacggcgtgatcgccttcgactgcagaaacagaaagtggtacatccaggccgccaccagccccaaggacgtggtgatcctggtggacgtgagcggcagcatgaagggcctgagactgaccatcgccaagcagaccgtgagcagcatcctggacaccctgggcgacgacgacttcttcaacatcatcgcctacaacgaggagctgcactacgtggagccctgcctgaacggcaccctggtgcaggccgacagaaccaacaaggagcacttcagagagcacctggacaagctgttcgccaagggcatcggcatgctggacatcgccctgaacgaggccttcaacatcctgagcgacttcaaccacaccggccagggcagcatctgcagccaggccatcatgctgatcaccgacggcgccgtggacacctacgacaccatcttcgccaagtacaactggcccgacagaaaggtgagaatcttcacctacctgatcggcagagaggccgccttcgccgacaacctgaagtggatggcctgcgccaacaagggcttcttcacccagatcagcaccctggccgacgtgcaggagaacgtgatggagtacctgcacgtgctgagcagacccaaggtgatcgaccaggagcacgacgtggtgtggaccgaggcctacatcgacagcaccctgccccaggcccagaagctgaccgacgaccagggccccgtgctgatgaccaccgtggccatgcccgtgttcagcaagcagaacgagaccagaagcaagggcatcctgctgggcgtggtgggcaccgacgtgcccgtgaaggagctgctgaagaccatccccaagtacaagctgggcatccacggctacgccttcgccatcaccaacaacggctacatcctgacccaccccgagctgagactgctgtacgaggagggcaagaagagaagaaagcccaactacagcagcgtggacctgagcgaggtggagtgggaggacagagacgacgtgctgagaaacgccatggtgaacagaaagaccggcaagttcagcatggaggtgaagaagaccgtggacaagggcaagagagtgctggtgatgaccaacgactactactacaccgacatcaagggcacccccttcagcctgggcgtggccctgagcagaggccacggcaagtacttcttcagaggcaacgtgaccatcgaggagggcctgcacgacctggagcaccccgacgtgagcctggccgacgagtggagctactgcaacaccgacctgcaccccgagcacagacacctgagccagctggaggccatcaagctgtacctgaagggcaaggagcccctgctgcagtgcgacaaggagctgatccaggaggtgctgttcgacgccgtggtgagcgcccccatcgaggcctactggaccagcctggccctgaacaagagcgagaacagcgacaagggcgtggaggtggccttcctgggcaccagaaccggcctgagcagaatcaacctgttcgtgggcgccgagcagctgaccaaccaggacttcctgaaggccggcgacaaggagaacatcttcaacgccgaccacttccccctgtggtacagaagagccgccgagcagatccccggcagcttcgtgtacagcatccccttcagcaccggccccgtgaacaagagcaacgtggtgaccgccagcaccagcatccagctgctggacgagagaaagagccccgtggtggccgccgtgggcatccagatgaagctggagttcttccagagaaagttctggaccgccagcagacagtgcgccagcctggacggcaagtgcagcatcagctgcgacgacgagaccgtgaactgctacctgatcgacaacaacggcttcatcctggtgagcgaggactacacccagaccggcgacttcttcggcgagatcgagggcgccgtgatgaacaagctgctgaccatgggcagcttcaagagaatcaccctgtacgactaccaggccatgtgcagagccaacaaggagagcagcgacggcgcccacggcctgctggacccctacaacgccttcctgagcgccgtgaagtggatcatgaccgagctggtgctgttcctggtggagttcaacctgtgcagctggtggcacagcgacatgaccgccaaggcccagaagctgaagcagaccctggagccctgcgacaccgagtaccccgccttcgtgagcgagagaaccatcaaggagaccaccggcaacatcgcctgcgaggactgcagcaagagcttcgtgatccagcagatccccagcagcaacctgttcatggtggtggtggacagcagctgcctgtgcgagagcgtggcccccatcaccatggcccccatcgagatcagatacaacgagagcctgaagtgcgagagactgaaggcccagaagatcagaagaagacccgagagctgccacggcttccaccccgaggagaacgccagagagtgcggcggcgcccccagcctgcaggcccagaccgtgctgctgctgctgcccctgctgctgatgctgttcagcagatag

SEQ ID NO: 74972 - DNA, 2997 bp, synthetic construct
  misc_feature 1..2997: note = Description of Artificial Sequence: Synthetic coding sequence
  source 1..2997: mol_type = other DNA
atgggcgagctgagacaggagagaagcaccgccctgcagagactggtggaggccgccgaggaggcccacctgaagcacgagttcgacgccgacctgcagtacgagtacttcaacgccgtgctgatcaacgagagagacaaggacggcaacttcctggagctgggcaaggagttcatcctggcccccaacgaccacttcaacaacctgcccgtgaacatcagcctgagcgacgtgcaggtgcccaccaacatgtacaacaaggaccccgccatcgtgaacggcgtgtactggagcgagagcctgaacaaggtgttcgtggacaacttcgacagagaccccagcctgatctggcagtacttcggcagcgccaagggcttcttcagacagtaccccggcatcaagtgggagcccgacgagaacggcgtgatcgccttcgactgcagaaacagaaagtggtacatccaggccgccaccagccccaaggacgtggtgatcctggtggacgtgagcggcagcatgaagggcctgagactgaccatcgccaagcagaccgtgagcagcatcctggacaccctgggcgacgacgacttcttcaacatcatcgcctacaacgaggagctgcactacgtggagccctgcctgaacggcaccctggtgcaggccgacagaaccaacaaggagcacttcagagagcacctggacaagctgttcgccaagggcatcggcatgctggacatcgccctgaacgaggccttcaacatcctgagcgacttcaaccacaccggccagggcagcatctgcagccaggccatcatgctgatcaccgacggcgccgtggacacctacgacaccatcttcgccaagtacaactggcccgacagaaaggtgagaatcttcacctacctgatcggcagagaggccgccttcgccgacaacctgaagtggatggcctgcgccaacaagggcttcttcacccagatcagcaccctggccgacgtgcaggagaacgtgatggagtacctgcacgtgctgagcagacccaaggtgatcgaccaggagcacgacgtggtgtggaccgaggcctacatcgacagcaccgtgagccaggccgagcagctgaccgacgaccagggccccgtgctgatgaccaccgtggccatgcccgtgttcagcaagcagaacgagaccagaagcaagggcatcctgctgggcgtggtgggcaccgacgtgcccgtgaaggagctgctgaagaccatccccaagtacaagctgggcatccacggctacgccttcgccatcaccaacaacggctacatcctgacccaccccgagctgagactgctgtacgaggagggcaagaagagaagaaagcccaactacagcagcgtggacctgagcgaggtggagtgggaggacagagacgacgtgctgagaaacgccatggtgaacagaaagaccggcaagttcagcatggaggtgaagaagaccgtggacaagggcaagagagtgctggtgatgaccaacgactactactacaccgacatcaagggcacccccttcagcctgggcgtggccctgagcagaggccacggcaagtacttcttcagaggcaacgtgaccatcgaggagggcctgcacgacctggagcaccccgacgtgagcctggccgacgagtggagctactgcaacaccgacctgcaccccgagcacagacacctgagccagctggaggccatcaagctgtacctgaagggcaaggagcccctgctgcagtgcgacaaggagctgatccaggaggtgctgttcgacgccgtggtgagcgcccccatcgaggcctactggaccagcctggccctgaacaagagcgagaacagcgacaagggcgtggaggtggccttcctgggcaccagaaccggcctgagcagaatcaacctgttcgtgggcgccgagcagctgaccaaccaggacttcctgaaggccggcgacaaggagaacatcttcaacgccgaccacttccccctgtggtacagaagagccgccgagcagatccccggcagcttcgtgtacagcatccccttcagcaccggccccgtgaacaagagcaacgtggtgaccgccagcaccagcatccagctgctggacgagagaaagagccccgtggtggccgccgtgggcatccagatgaagctggagttcttccagagaaagttctggaccgccagcagacagtgcgccagcctggacggcaagtgcagcatcagctgcgacgacgagaccgtgaactgctacctgatcgacaacaacggcttcatcctggtgagcgaggactacacccagaccggcgacttcttcggcgagatcgagggcgccgtgatgaacaagctgctgaccatgggcagcttcaagagaatcaccctgtacgactaccaggccatgtgcagagccaacaaggagagcagcgacggcgcccacggcctgctggacccctacaacgccttcctgagcgccgtgaagtggatcatgaccgagctggtgctgttcctggtggagttcaacctgtgcagctggtggcacagcgacatgaccgccaaggcccagaagctgaagcagaccctggagccctgcgacaccgagtaccccgccttcgtgagcgagagaaccatcaaggagaccaccggcaacatcgcctgcgaggactgcagcaagagcttcgtgatccagcagatccccagcagcaacctgttcatggtggtggtggacagcagctgcctgtgcgagagcgtggcccccatcaccatggcccccatcgagatcagccagcacaacgagagcctgaagtgcgagagactgaaggcccagaagatcagaagaagacccgagagctgccacggcttccaccccgaggagaacgccagagagtgcggcggcgcccccagcctgcaggcccagaccgtgctgctgctgctgcccctgctgctgatgctgttcagcagatag

SEQ ID NO: 74973 - DNA, 3276 bp, synthetic construct; identical to SEQ ID NO: 74971
  misc_feature 1..3276: note = Description of Artificial Sequence: Synthetic coding sequence
  source 1..3276: mol_type = other DNA

SEQ ID NO: 74974 - DNA, 1557 bp, synthetic construct
  misc_feature 1..1557: note = Description of Artificial Sequence: Synthetic coding sequence
  source 1..1557: mol_type = other DNA
gagatcctgttccaccagatgcagaaccagatcaagagactggtggaggccgccgaggaggcccacctgaagcacgagttcgacgccgacctgcagtacgagtacttcaacgccgtgctgatcaacgagagagacaaggacggcaacttcctggagctgggcaaggagttcatcctggcccccaacgaccacttcaacaacctgcccgtgaacatcagcctgagcgacgtgcaggtgcccaccaacatgtacaacaaggaccccgccatcgtgaacggcgtgtactggagcgagagcctgaacaaggtgttcgtggacaacttcgacagagaccccagcctgatctggcagtacttcggcagcgccaagggcttcttcagacagtaccccggcatcaagtgggagcccgacgagaacggcgtgatcgccttcgactgcagaaacagaaagtggtacatccaggccgccaccagccccaaggacgtggtgatcctggtggacgtgagcggcagcatgaagggcctgagactgaccatcgccaagcagaccgtgagcagcatcctggacaccctgggcgacgacgacttcttcaacatcatcgcctacaacgaggagctgcactacgtggagccctgcctgaacggcaccctggtgcaggccgacagaaccaacaaggagcacttcagagagcacctggacaagctgttcgccaagggcatcggcatgctggacatcgccctgaacgaggccttcaacatcctgagcgacttcaaccacaccggccagggcagcatctgcagccaggccatcatgctgatcaccgacggcgccgtggacacctacgacaccatcttcgccaagtacaactggcccgacagaaaggtgagaatcttcacctacctgatcggcagagaggccgccttcgccgacaacctgaagtggatggcctgcgccaacaagggcttcttcacccagatcagcaccctggccgacgtgcaggagaacgtgatggagtacctgcacgtgctgagcagacccaaggtgatcgaccaggagcacgacgtggtgtggaccgaggcctacatcgacagcaccctgaccgacgaccagggccccgtgctgatgaccaccgtggccatgcccgtgttcagcaagcagaacgagaccagaagcaagggcatcctgctgggcgtggtgggcaccgacgtgcccgtgaaggagctgctgaagaccatccccaagtacaagctgggcatccacggctacgccttcgccatcaccaacaacggctacatcctgacccaccccgagctgagactgctgtacgaggagggcaagaagagaagaaagcccaactacagcagcgtggacctgagcgaggtggagtgggaggacagagacgacgtgctgagaaacgccatggtgaacagaaagaccggcaagttcagcatggaggtgaagaagaccgtggacaagggcttcagatgcggcgccttccagagaagctgggagatcttcctgcccagagagtgcaaccacagaagaagacccgcctag

SEQ ID NO: 74975 - DNA, 3276 bp, synthetic construct; identical to SEQ ID NO: 74971
  misc_feature 1..3276: note = Description of Artificial Sequence: Synthetic coding sequence
  source 1..3276: mol_type = other DNA

SEQ ID NO: 74976 - DNA, 1578 bp, synthetic construct
  misc_feature 1..1578: note = Description of Artificial Sequence: Synthetic coding sequence
  source 1..1578: mol_type = other DNA
atggaggagatgttccacaagaagagcgaggccgtgagaagactggtggaggccgccgaggaggcccacctgaagcacgagttcgacgccgacctgcagtacgagtacttcaacgccgtgctgatcaacgagagagacaaggacggcaacttcctggagctgggcaaggagttcatcctggcccccaacgaccacttcaacaacctgcccgtgaacatcagcctgagcgacgtgcaggtgcccaccaacatgtacaacaaggaccccgccatcgtgaacggcgtgtactggagcgagagcctgaacaaggtgttcgtggacaacttcgacagagaccccagcctgatctggcagtacttcggcagcgccaagggcttcttcagacagtaccccggcatcaagtgggagcccgacgagaacggcgtgatcgccttcgactgcagaaacagaaagtggtacatccaggccgccaccagccccaaggacgtggtgatcctggtggacgtgagcggcagcatgaagggcctgagactgaccatcgccaagcagaccgtgagcagcatcctggacaccctgggcgacgacgacttcttcaacatcatcgcctacaacgaggagctgcactacgtggagccctgcctgaacggcaccctggtgcaggccgacagaaccaacaaggagcacttcagagagcacctggacaagctgttcgccaagggcatcggcatgctggacatcgccctgaacgaggccttcaacatcctgagcgacttcaaccacaccggccagggcagcatctgcagccaggccatcatgctgatcaccgacggcgccgtggacacctacgacaccatcttcgccaagtacaactggcccgacagaaaggtgagaatcttcacctacctgatcggcagagaggccgccttcgccgacaacctgaagtggatggcctgcgccaacaagggcttcttcacccagatcagcaccctggccgacgtgcaggagaacgtgatggagtacctgcacgtgctgagcagacccaaggtgatcgaccaggagcacgacgtggtgtggaccgaggcctacatcgacagcaccctgccccaggcccagaagctgaccgacgaccagggccccgtgctgatgaccaccgtggccatgcccgtgttcagcaagcagaacgagaccagaagcaagggcatcctgctgggcgtggtgggcaccgacgtgcccgtgaaggagctgctgaagaccatccccaagtacaagctgggcatccacggctacgccttcgccatcaccaacaacggctacatcctgacccaccccgagctgagactgctgtacgaggagggcaagaagagaagaaagcccaactacagcagcgtggacctgagcgaggtggagtgggaggacagagacgacgtgctgagaaacgccatggtgaacagaaagaccggcaagttcagcatggaggtgaagaagaccgtggacaagggcttcagatgcggcgccttccagagaagctgggagatcttcctgcccagagagtgcaaccacagaagaagacccgcctag

SEQ ID NO: 74977 - DNA, 2994 bp, synthetic construct
  misc_feature 1..2994: note = Description of Artificial Sequence: Synthetic coding sequence
  source 1..2994: mol_type = other DNA
atggaggagatgttccacaagaagagcgaggccgtgagaagactggtggaggccgccgaggaggcccacctgaagcacgagttcgacgccgacctgcagtacgagtacttcaacgccgtgctgatcaacgagagagacaaggacggcaacttcctggagctgggcaaggagttcatcctggcccccaacgaccacttcaacaacctgcccgtgaacatcagcctgagcgacgtgcaggtgcccaccaacatgtacaacaaggaccccgccatcgtgaacggcgtgtactggagcgagagcctgaacaaggtgttcgtggacaacttcgacagagaccccagcctgatctggcagtacttcggcagcgccaagggcttcttcagacagtaccccggcatcaagtgggagcccgacgagaacggcgtgatcgccttcgactgcagaaacagaaagtggtacatccaggccgccaccagccccaaggacgtggtgatcctggtggacgtgagcggcagcatgaagggcctgagactgaccatcgccaagcagaccgtgagcagcatcctggacaccctgggcgacgacgacttcttcaacatcatcgcctacaacgaggagctgcactacgtggagccctgcctgaacggcaccctggtgcaggccgacagaaccaacaaggagcacttcagagagcacctggacaagctgttcgccaagggcatcggcatgctggacatcgccctgaacgaggccttcaacatcctgagcgacttcaaccacaccggccagggcagcatctgcagccaggccatcatgctgatcaccgacggcgccgtggacacctacgacaccatcttcgccaagtacaactggcccgacagaaaggtgagaatcttcacctacctgatcggcagagaggccgccttcgccgacaacctgaagtggatggcctgcgccaacaagggcttcttcacccagatcagcaccctggccgacgtgcaggagaacgtgatggagtacctgcacgtgctgagcagacccaaggtgatcgaccaggagcacgacgtggtgtggaccgaggcctacatcgacagcaccctgccccaggcccagaagctgaccgacgaccagggccccgtgctgatgaccaccgtggccatgcccgtgttcagcaagcagaacgagaccagaagcaagggcatcctgctgggcgtggtgggcaccgacgtgcccgtgaaggagctgctgaagaccatccccaagtacaagctgggcatccacggctacgccttcgccatcaccaacaacggctacatcctgacccaccccgagctgagactgctgtacgaggagggcaagaagagaagaaagcccaactacagcagcgtggacctgagcgaggtggagtgggaggacagagacgacgtgctgagaaacgccatggtgaacagaaagaccggcaagttcagcatggaggtgaagaagaccgtggacaagggcaagagagtgctggtgatgaccaacgactactactacaccgacatcaagggcacccccttcagcctgggcgtggccctgagcagaggccacggcaagtacttcttcagaggcaacgtgaccatcgaggagggcctgcacgacctggagcaccccgacgtgagcctggccgacgagtggagctactgcaacaccgacctgcaccccgagcacagacacctgagccagctggaggccatcaagctgtacctgaagggcaaggagcccctgctgcagtgcgacaaggagctgatccaggaggtgctgttcgacgccgtggtgagcgcccccatcgaggcctactggaccagcctggccctgaacaagagcgagaacagcgacaagggcgtggaggtggccttcctgggcaccagaaccggcctgagcagaatcaacctgttcgtgggcgccgagcagctgaccaaccaggacttcctgaaggccggcgacaaggagaacatcttcaacgccgaccacttccccctgtggtacagaagagccgccgagcagatccccggcagcttcgtgtacagcatccccttcagcaccggccccgtgaacaagagcaacgtggtgaccgccagcaccagcatccagctgctggacgagagaaagagccccgtggtggccgccgtgggcatccagatgaagctggagttcttccagagaaagttctggaccgccagcagacagtgcgccagcctggacggcaagtgcagcatcagctgcgacgacgagaccgtgaactgctacctgatcgacaacaacggcttcatcctggtgagcgaggactacacccagaccggcgacttcttcggcgagatcgagggcgccgtgatgaacaagctgctgaccatgggcagcttcaagagaatcaccctgtacgactaccaggccatgtgcagagccaacaaggagagcagcgacggcgcccacggcctgctggacccctacaacgccttcctgagcgccgtgaagtggatcatgaccgagctggtgctgttcctggtggagttcaacctgtgcagctggtggcacagcgacatgaccgccaaggcccagaagctgaagcagaccctggagccctgcgacaccgagtaccccgccttcgtgagcgagagaaccatcaaggagaccaccggcaacatcgcctgcgaggactgcagcaagagcttcgtgatccagcagatccccagcagcaacctgttcatggtggtggtggacagcagctgcctgtgcgagagcgtggcccccatcaccatggcccccatcgagatcagatacaacgagagcctgaagtgcgagagactgaaggcccagaagatcagaagaagacccgagagctgccacggcttccaccccgaggagaacgccagagagtgcggcggcgcccccagcctgcaggcccagaccgtgctgctgctgctgcccctgctgctgatgctgttcagcagatag

SEQ ID NO: 74978 - DNA, 381 bp, synthetic construct
  misc_feature 1..381: note = Description of Artificial Sequence: Synthetic coding sequence
  source 1..381: mol_type = other DNA
atggaggagatgttccacaagaagagcgaggccgtgagaagactggtggaggccgccgaggaggcccacctgaagcacgagttcgacgccgacctgcagtacgagtacttcaacgccgtgctgatcaacgagagagacaaggacggcaacttcctggagctgggcaaggagttcatcctggcccccaacgaccacttcaacaacctgcccgtgaacatcagcctgagcgacgtgcaggtgcccaccaacatgtacaacaaggaccccgccatcgtgaacggcgtgtactggagcgagagcctgaacaaggtgttcgtggacaacttcgacagagaccccagcctgatctggcagtacttcggcagcgccaagggcttctag

SEQ ID NO: 74979 - DNA, 2925 bp, synthetic construct
  misc_feature 1..2925: note = Description of Artificial Sequence: Synthetic coding sequence
  source 1..2925: mol_type = other DNA
atggtgtgcggctgcagcgccctgctgcccctgcccaaccccagacccaccatgcccgccacccccaacttcctggccaaccccagcagcagcagcagatggatccccctgcagcccatgcccgtggcctgggccttcgtgcagaagaccagcgccctgctgtggctgctgctgctgggcaccagcctgagccccgcctggggccaggccaagatccccctggagaccgtgaagctgtgggccgacaccttcggcggcgacctgtacaacaccgtgaccaagtacagcggcagcctgctgctgcagaagaagtacaaggacgtggagagcagcctgaagatcgaggaggtggacggcctggagctggtgagaaagttcagcgaggacatggagaacatgctgagaagaaaggtggaggccgtgcagaacctggtggaggccgccgaggaggccgacctgaaccacgagttcaacgagagcctggtgttcgactactacaacagcgtgctgatcaacgagagagacgagaagggcaacttcgtggagctgggcgccgagttcctgctggagagcaacgcccacttcagcaacctgcccgtgaacaccagcatcagcagcgtgcagctgcccaccaacgtgtacaacaaggaccccgacatcctgaacggcgtgtacatgagcgaggccctgaacgccgtgttcgtggagaacttccagagagaccccaccctgacctggcagtacttcggcagcgccaccggcttcttcagaatctaccccggcatcaagtggacccccgacgagaacggcgtgatcaccttcgactgcagaaacagaggctggtacatccaggccgccaccagccccaaggacatcgtgatcctggtggacgtgagcggcagcatgaagggcctgagaatgaccatcgccaagcacaccatcaccaccatcctggacaccctgggcgagaacgacttcatcaacatcatcgcctacaacgactacgtgcactacatcgagccctgcttcaagggcatcctggtgcaggccgacagagacaacagagagcacttcaagctgctggtggaggagctgatggtgaagggcgtgggcgtggtggaccaggccctgagagaggccttccagatcctgaagcagttccaggaggccaagcagggcagcctgtgcaaccaggccatcatgctgatcagcgacggcgccgtggaggactacgagcccgtgttcgagaagtacaactggcccgactgcaaggtgagagtgttcacctacctgatcggcagagaggtgagcttcgccgacagaatgaagtggatcgcctgcaacaacaagggctactacacccagatcagcaccctggccgacacccaggagaacgtgatggagtacctgcacgtgctgagcagacccatggtgatcaaccacgaccacgacatcatctggaccgaggcctacatggacagcaagctgctgagcagccaggcccagagcctgaccctgctgaccaccgtggccatgcccgtgttcagcaagaagaacgagaccagaagccacggcatcctgctgggcgtggtgggcagcgacgtggccctgagagagctgatgaagctggcccccagatacaagctgggcgtgcacggctacgccttcctgaacaccaacaacggctacatcctgagccaccccgacctgagacccctgtacagagagggcaagaagctgaagcccaagcccaactacaacagcgtggacctgagcgaggtggagtgggaggaccaggccgagagcctgagaaccgccatgatcaacagagagaccggcaccctgagcatggacgtgaaggtgcccatggacaagggcaagagagtgctgttcctgaccaacgactacttcttcaccgacatcagcgacacccccttcagcctgggcgtggtgctgagcagaggccacggcgagtacatcctgctgggcaacaccagcgtggaggagggcctgcacgacctgctgcaccccgacctggccctggccggcgactggatctactgcatcaccgacatcgaccccgaccacagaaagctgagccagctggaggccatgatcagattcctgaccagaaaggaccccgacctggagtgcgacgaggagctggtgagagaggtgctgttcgacgccgtggtgaccgcccccatggaggcctactggaccgccctggccctgaacatgagcgaggagagcgagcacgtggtggacatggccttcctgggcaccagagccggcctgctgagaagcagcctgttcgtgggcagcgagaaggtgagcgacagaaagttcctgacccccgaggacgaggccagcgtgttcaccctggacagattccccctgtggtacagacaggccagcgagcaccccgccggcagcttcgtgttcaacctgagatgggccgagggccccgagagcgccggcgagcccatggtggtgaccgccagcaccgccgtggccgtgaccgtggacaagagaaccgccatcgccgccgccgccggcgtgcagatgaagctggagttcctgcagagaaagttctgggccgccaccagacagtgcagcaccgtggacggcccctgcacccagagctgcgaggacagcgacctggactgcttcgtgatcgacaacaacggcttcatcctgatcagcaagagaagcagagagaccggcagattcctgggcgaggtggacggcgccgtgctgacccagctgctgagcatgggcgtgttcagccaggtgaccatgtacgactaccaggccatgtgcaagcccagcagccaccaccacagcgccgcccagcccctggtgagccccatcagcgccttcctgaccgccaccagatggctgctgcaggagctggtgctgtag

SEQ ID NO: 74980 - DNA, 3414 bp, synthetic construct
  misc_feature 1..3414: note = Description of Artificial Sequence: Synthetic coding sequence
  source 1..3414: mol_type = other DNA
atggtgtgcggctgcagcgccctgctgcccctgcccaaccccagacccaccatgcccgccacccccaacttcctggccaaccccagcagcagcagcagatggatccccctgcagcccatgcccgtggcctgggccttcgtgcagaagaccagcgccctgctgtggctgctgctgctgggcaccagcctgagccccgcctggggccaggccaagatccccctggagaccgtgaagctgtgggccgacaccttcggcggcgacctgtacaacaccgtgaccaagtacagcggcagcctgctgctgcagaagaagtacaaggacgtggagagcagcctgaagatcgaggaggtggacggcctggagctggtgagaaagttcagcgaggacatggagaacatgctgagaagaaaggtggaggccgtgcagaacctggtggaggccgccgaggaggccgacctgaaccacgagttcaacgagagcctggtgttcgactactacaacagcgtgctgatcaacgagagagacgagaagggcaacttcgtggagctgggcgccgagttcctgctggagagcaacgcccacttcagcaacctgcccgtgaacaccagcatcagcagcgtgcagctgcccaccaacgtgtacaacaaggaccccgacatcctgaacggcgtgtacatgagcgaggccctgaacgccgtgttcgtggagaacttccagagagaccccaccctgacctggcagtacttcggcagcgccaccggcttcttcagaatctaccccggcatcaagtggacccccgacgagaacggcgtgatcaccttcgactgcagaaacagaggctggtacatccaggccgccaccagccccaaggacatcgtgatcctggtggacgtgagcggcagcatgaagggcctgagaatgaccatcgccaagcacaccatcaccaccatcctggacaccctgggcgagaacgacttcatcaacatcatcgcctacaacgactacgtgcactacatcgagccctgcttcaagggcatcctggtgcaggccgacagagacaacagagagcacttcaagctgctggtggaggagctgatggtgaagggcgtgggcgtggtggaccaggccctgagagaggccttccagatcctgaagcagttccaggaggccaagcagggcagcctgtgcaaccaggccatcatgctgatcagcgacggcgccgtggaggactacgagcccgtgttcgagaagtacaactggcccgactgcaaggtgagagtgttcacctacctgatcggcagagaggtgagcttcgccgacagaatgaagtggatcgcctgcaacaacaagggctactacacccagatcagcaccctggccgacacccaggagaacgtgatggagtacctgcacgtgctgagcagacccatggtgatcaaccacgaccacgacatcatctggaccgaggcctacatggacagcaagctgctgagcagccaggcccagagcctgaccctgctgaccaccgtggccatgcccgtgttcagcaagaagaacgagaccagaagccacggcatcctgctgggcgtggtgggcagcgacgtggccctgagagagctgatgaagctggcccccagatacaagctgggcgtgcacggctacgccttcctgaacaccaacaacggctacatcctgagccaccccgacctgagacccctgtacagagagggcaagaagctgaagcccaagcccaactacaacagcgtggacctgagcgaggtggagtgggaggaccaggccgagagcctgagaaccgccatgatcaacagagagaccggcaccctgagcatggacgtgaaggtgcccatggacaagggcaagagagtgctgttcctgaccaacgactacttcttcaccgacatcagcgacacccccttcagcctgggcgtggtgctgagcagaggccacggcgagtacatcctgctgggcaacaccagcgtggaggagggcctgcacgacctgctgcaccccgacctggccctggccggcgactggatctactgcatcaccgacatcgaccccgaccacagaaagctgagccagctggaggccatgatcagattcctgaccagaaaggaccccgacctggagtgcgacgaggagctggtgagagaggtgctgttcgacgccgtggtgaccgcccccatggaggcctactggaccgccctggccctgaacatgagcgaggagagcgagcacgtggtggacatggccttcctgggcaccagagccggcctgctgagaagcagcctgttcgtgggcagcgagaaggtgagcgacagaaagttcctgacccccgaggacgaggccagcgtgttcaccctggacagattccccctgtggtacagacaggccagcgagcaccccgccggcagcttcgtgttcaacctgagatgggccgagggccccgagagcgccggcgagcccatggtggtgaccgccagcaccgccgtggccgtgaccgtggacaagagaaccgccatcgccgccgccgccggcgtgcagatgaagctggagttcctgcagagaaagttctgggccgccaccagacagtgcagcaccgtggacggcccctgcacccagagctgcgaggacagcgacctggactgcttcgtgatcgacaacaacggcttcatcctgatcagcaagagaagcagagagaccggcagattcctgggcgaggtggacggcgccgtgctgacccagctgctgagcatgggcgtgttcagccaggtgaccatgtacgactaccaggccatgtgcaagcccagcagccaccaccacagcgccgcccagcccctggtgagccccatcagcgccttcctgaccgccaccagatggctgctgcaggagctggtgctgttcctgctggagtggagcgtgtggggcagctggtacgacagaggcgccgaggccaagagcgtgttccaccacagccacaagcacaagaagcaggaccccctgcagccctgcgacaccgagtaccccgtgttcgtgtaccagcccgccatcagagaggccaacggcatcgtggagtgcggcccctgccagaaggtgttcgtggtgcagcagatccccaacagcaacctgctgctgctggtgaccgaccccacctgcgactgcagcatcttcccccccgtgctgcaggaggccaccgaggtgaagtacaacgccagcgtgaagtgcgacagaatgagaagccagaagctgagaagaagacccgacagctgccacgccttccaccccgaggagaacgcccaggactgcggcggcgccagcgacaccagcgccagcccccccctgctgctgctgcccgtgtgcgcctggggcctgctgccccagctgctgagatag

SEQ ID NO: 74981 - DNA, 3222 bp, synthetic construct
  misc_feature 1..3222: note = Description of Artificial Sequence: Synthetic coding sequence
  source 1..3222: mol_type = other DNA
atggccgtggccctgggcaccagaagaagagacagagtgaagctgtgggccgacaccttcggcggcgacctgtacaacaccgtgaccaagtacagcggcagcctgctgctgcagaagaagtacaaggacgtggagagcagcctgaagatcgaggaggtggacggcctggagctggtgagaaagttcagcgaggacatggagaacatgctgagaagaaaggtggaggccgtgcagaacctggtggaggccgccgaggaggccgacctgaaccacgagttcaacgagagcctggtgttcgactactacaacagcgtgctgatcaacgagagagacgagaagggcaacttcgtggagctgggcgccgagttcctgctggagagcaacgcccacttcagcaacctgcccgtgaacaccagcatcagcagcgtgcagctgcccaccaacgtgtacaacaaggaccccgacatcctgaacggcgtgtacatgagcgaggccctgaacgccgtgttcgtggagaacttccagagagaccccaccctgacctggcagtacttcggcagcgccaccggcttcttcagaatctaccccggcatcaagtggacccccgacgagaacggcgtgatcaccttcgactgcagaaacagaggctggtacatccaggccgccaccagccccaaggacatcgtgatcctggtggacgtgagcggcagcatgaagggcctgagaatgaccatcgccaagcacaccatcaccaccatcctggacaccctgggcgagaacgacttcatcaacatcatcgcctacaacgactacgtgcactacatcgagccctgcttcaagggcatcctggtgcaggccgacagagacaacagagagcacttcaagctgctggtggaggagctgatggtgaagggcgtgggcgtggtggaccaggccctgagagaggccttccagatcctgaagcagttccaggaggccaagcagggcagcctgtgcaaccaggccatcatgctgatcagcgacggcgccgtggaggactacgagcccgtgttcgagaagtacaactggcccgactgcaaggtgagagtgttcacctacctgatcggcagagaggtgagcttcgccgacagaatgaagtggatcgcctgcaacaacaagggctactacacccagatcagcaccctggccgacacccaggagaacgtgatggagtacctgcacgtgctgagcagacccatggtgatcaaccacgaccacgacatcatctggaccgaggcctacatggacagcaagctgctgagcagccaggcccagagcctgaccctgctgaccaccgtggccatgcccgtgttcagcaagaagaacgagaccagaagccacggcatcctgctgggcgtggtgggcagcgacgtggccctgagagagctgatgaagctggcccccagatacaagctgggcgtgcacggctacgccttcctgaacaccaacaacggctacatcctgagccaccccgacctgagacccctgtacagagagggcaagaagctgaagcccaagcccaactacaacagcgtggacctgagcgaggtggagtgggaggaccaggccgagagcctgagaaccgccatgatcaacagagagaccggcaccctgagcatggacgtgaaggtgcccatggacaagggcaagagagtgctgttcctgaccaacgactacttcttcaccgacatcagcgacacccccttcagcctgggcgtggtgctgagcagaggccacggcgagtacatcctgctgggcaacaccagcgtggaggagggcctgcacgacctgctgcaccccgacctggccctggccggcgactggatctactgcatcaccgacatcgaccccgaccacagaaagctgagccagctggaggccatgatcagattcctgaccagaaaggaccccgacctggagtgcgacgaggagctggtgagagaggtgctgttcgacgccgtggtgaccgcccccatggaggcctactggaccgccctggccctgaacatgagcgaggagagcgagcacgtggtggacatggccttcctgggcaccagagccggcctgctgagaagcagcctgttcgtgggcagcgagaaggtgagcgacagaaagttcctgacccccgaggacgaggccagcgtgttcaccctggacagattccccctgtggtacagacaggccagcgagcaccccgccggcagcttcgtgttcaacctgagatgggccgagggccccgagagcgccggcgagcccatggtggtgaccgccagcaccgccgtggccgtgaccgtggacaagagaaccgccatcgccgccgccgccggcgtgcagatgaagctggagttcctgcagagaaagttctgggccgccaccagacagtgcagcaccgtggacggcccctgcacccagagctgcgaggacagcgacctggactgcttcgtgatcgacaacaacggcttcatcctgatcagcaagagaagcagagagaccggcagattcctgggcgaggtggacggcgccgtgctgacccagctgctgagcatgggcgtgttcagccaggtgaccatgtacgactaccaggccatgtgcaagcccagcagccaccaccacagcgccgcccagcccctggtgagccccatcagcgccttcctgaccgccaccagatggctgctgcaggagctggtgctgttcctgctggagtggagcgtgtggggcagctggtacgacagaggcgccgaggccaagagcgtgttccaccacagccacaagcacaagaagcaggaccccctgcagccctgcgacaccgagtaccccgtgttcgtgtaccagcccgccatcagagaggccaacggcatcgtggagtgcggcccctgccagaaggtgttcgtggtgcagcagatccccaacagcaacctgctgctgctggtgaccgaccccacctgcgactgcagcatcttcccccccgtgctgcaggaggccaccgaggtgaagtacaacgccagcgtgaagtgcgacagaatgagaagccagaagctgagaagaagacccgacagctgccacgccttccaccccgaggagaacgcccaggactgcggcggcgccagcgacaccagcgccagcccccccctgctgctgctgcccgtgtgcgcctggggcctgctgccccagctgctgagatag

SEQ ID NO: 74982 - DNA, 615 bp, synthetic construct
  misc_feature 1..615: note = Description of Artificial Sequence: Synthetic coding sequence
  source 1..615: mol_type = other DNA
atgtacgactaccaggccatgtgcaagcccagcagccaccaccacagcgccgcccagcccctggtgagccccatcagcgccttcctgaccgccaccagatggctgctgcaggagctggtgctgttcctgctggagtggagcgtgtggggcagctggtacgacagaggcgccgaggccaagagcgtgttccaccacagccacaagcacaagaagcaggaccccctgcagccctgcgacaccgagtaccccgtgttcgtgtaccagcccgccatcagagaggccaacggcatcgtggagtgcggcccctgccagaaggtgttcgtggtgcagcagatccccaacagcaacctgctgctgctggtgaccgaccccacctgcgactgcagcatcttcccccccgtgctgcaggaggccaccgaggtgaagtacaacgccagcgtgaagtgcgacagaatgagaagccagaagctgagaagaagacccgacagctgccacgccttccaccccgaggagaacgcccaggactgcggcggcgccagcgacaccagcgccagcccccccctgctgctgctgcccgtgtgcgcctggggcctgctgccccagctgctgagatag

SEQ ID NO: 74983 - DNA, 615 bp, synthetic construct; identical to SEQ ID NO: 74982
  misc_feature 1..615: note = Description of Artificial Sequence: Synthetic coding sequence
  source 1..615: mol_type = other DNA

SEQ ID NO: 74984 - DNA, 804 bp, synthetic construct
  misc_feature 1..804: note = Description of Artificial Sequence: Synthetic coding sequence
  source 1..804: mol_type = other DNA
atgaagctggagttcctgcagagaaagttctgggccgccaccagacaggacctggactgcttcgtgatcgacaacaacggcttcatcctgatcagcaagagaagcagagagaccggcagattcctgggcgaggtggacggcgccgtgctgacccagctgctgagcatgggcgtgttcagccaggtgaccatgtacgactaccaggccatgtgcaagcccagcagccaccaccacagcgccgcccagcccctggtgagccccatcagcgccttcctgaccgccaccagatggctgctgcaggagctggtgctgttcctgctggagtggagcgtgtggggcagctggtacgacagaggcgccgaggccaagagcgtgttccaccacagccacaagcacaagaagcaggaccccctgcagccctgcgacaccgagtaccccgtgttcgtgtaccagcccgccatcagagaggccaacggcatcgtggagtgcggcccctgccagaaggtgttcgtggtgcagcagatccccaacagcaacctgctgctgctggtgaccgaccccacctgcgactgcagcatcttcccccccgtgctgcaggaggccaccgaggtgaagtacaacgccagcgtgaagtgcgacagaatgagaagccagaagctgagaagaagacccgacagctgccacgccttccaccccgaggagaacgcccaggactgcggcggcgccagcgacaccagcgccagcccccccctgctgctgctgcccgtgtgcgcctggggcctgctgccccagctgctgagatag

SEQ ID NO: 74985 - DNA, 615 bp, synthetic construct; identical to SEQ ID NO: 74982
  misc_feature 1..615: note = Description of Artificial Sequence: Synthetic coding sequence
  source 1..615: mol_type = other DNA

SEQ ID NO: 74986 - DNA, 1572 bp, synthetic construct
  misc_feature 1..1572: note = Description of Artificial Sequence: Synthetic coding sequence
  source 1..1572: mol_type = other DNA
atggtgcagaagaccagcatgagcagaggcccctacccccccagccaggagatccccatggaggtgttcgaccccagcccccagggcaagtacagcaagagaaagggcagattcaagagaagcgacggcagcaccagcagcgacaccaccagcaacagcttcgtgagacagggcagcgccgagagctacaccagcagacccagcgacagcgacgtgagcctggaggaggacagagaggccctgagaaaggaggccgagagacaggccctggcccagctggagaaggccaagaccaagcccgtggccttcgccgtgagaaccaacgtgggctacaaccccagccccggcgacgaggtgcccgtgcagggcgtggccatcaccttcgagcccaaggacttcctgcacatcaaggagaagtacaacaacgactggtggatcggcagactggtgaaggagggctgcgaggtgggcttcatccccagccccgtgaagctggacagcctgagactgctgcaggagcagaagctgagacagaacagactgggcagcagcaagagcggcgacaacagcagcagcagcctgggcgacgtggtgaccggcaccagaagacccaccccccccgccagcggcaacgagatgaccaacctggccttcgagctggaccccctggagctggaggaggaggaggccgagctgggcgagcagagcggcagcgccaagaccagcgtgagcagcgtgaccaccccccccccccacggcaagagaatccccttcttcaagaagaccgagcacgtgcccccctacgacgtggtgcccagcatgagacccatcatcctggtgggccccagcctgaagggctacgaggtgaccgacatgatgcagaaggccctgttcgacttcctgaagcacagattcgacggcagaatcagcatcaccagagtgaccgccgacatcagcctggccaagagaagcgtgctgaacaaccccagcaagcacatcatcatcgagagaagcaacaccagaagcagcctggccgaggtgcagagcgagatcgagagaatcttcgagctggccagaaccctgcagctggtggccctggacgccgacaccatcaaccaccccgcccagctgagcaagaccagcctggcccccatcatcgtgtacatcaagatcaccagccccaaggtgctgcagagactgatcaagagcagaggcaagagccagagcaagcacctgaacgtgcagatcgccgccagcgagaagctggcccagtgcccccccgagatgttcgacatcatcctggacgagaaccagctggaggacgcctgcgagcacctggccgagtacctggaggcctactggaaggccacccacccccccagcagcaccccccccaaccccctgctgaacagaaccatggccaccgccgccctggccgccagccccgcccccgtgagcaacctgcaggtgcaggtgctgaccagcctgagaagaaacctgggcttctggggcggcctggagagcagccagagaggcagcgtggtgccccaggagcaggagcacgccatgtag

SEQ ID NO: 74987 - DNA, 1797 bp, synthetic construct
  misc_feature 1..1797: note = Description of Artificial Sequence: Synthetic coding sequence
  source 1..1797: mol_type = other DNA
atggtgcagaagaccagcatgagcagaggcccctacccccccagccaggagatccccatggaggtgttcgaccccagcccccagggcaagtacagcaagagaaagggcagattcaagagaagcgacggcagcaccagcagcgacaccaccagcaacagcttcgtgagacagggcagcgccgagagctacaccagcagacccagcgacagcgacgtgagcctggaggaggacagagaggccctgagaaaggaggccgagagacaggccctggcccagctggagaaggccaagaccaagcccgtggccttcgccgtgagaaccaacgtgggctacaaccccagccccggcgacgaggtgcccgtgcagggcgtggccatcaccttcgagcccaaggacttcctgcacatcaaggagaagtacaacaacgactggtggatcggcagactggtgaaggagggctgcgaggtgggcttcatccccagccccgtgaagctggacagcctgagactgctgcaggagcagaagctgagacagaacagactgggcagcagcaagagcggcgacaacagcagcagcagcctgggcgacgtggtgaccggcaccagaagacccaccccccccgccagcgccaagcagaagcagaagagcaccgagcacgtgcccccctacgacgtggtgcccagcatgagacccatcatcctggtgggccccagcctgaagggctacgaggtgaccgacatgatgcagaaggccctgttcgacttcctgaagcacagattcgacggcagaatcagcatcaccagagtgaccgccgacatcagcctggccaagagaagcgtgctgaacaaccccagcaagcacatcatcatcgagagaagcaacaccagaagcagcctggccgaggtgcagagcgagatcgagagaatcttcgagctggccagaaccctgcagctggtggccctggacgccgacaccatcaaccaccccgcccagctgagcaagaccagcctggcccccatcatcgtgtacatcaagatcaccagccccaaggtgctgcagagactgatcaagagcagaggcaagagccagagcaagcacctgaacgtgcagatcgccgccagcgagaagctggcccagtgcccccccgagatgttcgacatcatcctggacgagaaccagctggaggacgcctgcgagcacctggccgagtacctggaggcctactggaaggccacccacccccccagcagcaccccccccaaccccctgctgaacagaaccatggccaccgccgccctggccgccagccccgcccccgtgagcaacctgcagggcccctacctggccagcggcgaccagcccctggagagagccaccggcgagcacgccagcatgcacgagtaccccggcgagctgggccagccccccggcctgtaccccagcagccacccccccggcagagccggcaccctgagagccctgagcagacaggacaccttcgacgccgacacccccggcagcagaaacagcgcctacaccgagctgggcgacagctgcgtggacatggagaccgaccccagcgagggccccggcctgggcgaccccgccggcggcggcaccccccccgccagacagggcagctgggaggacgaggaggaggactacgaggaggagctgaccgacaacagaaacagaggcagaaacaaggccagatactgcgccgagggcggcggccccgtgctgggcagaaacaagaacgagctggagggctggggcagaggcgtgtacatcagatag

SEQ ID NO: 74988 - DNA, 1437 bp, synthetic construct
  misc_feature 1..1437: note = Description of Artificial Sequence: Synthetic coding sequence
  source 1..1437: mol_type = other DNA
atggtgcagaagaccagcatgagcagaggcccctacccccccagccaggagatccccatggaggtgttcgaccccagcccccagggcaagtacagcaagagaaagggcagattcaagagaagcgacggcagcaccagcagcgacaccaccagcaacagcttcgtgagacagggcagcgccgagagctacaccagcagacccagcgacagcgacgtgagcctggaggaggacagagaggccctgagaaaggaggccgagagacaggccctggcccagctggagaaggccaagaccaagcccgtggccttcgccgtgagaaccaacgtgggctacaaccccagccccggcgacgaggtgcccgtgcagggcgtggccatcaccttcgagcccaaggacttcctgcacatcaaggagaagtacaacaacgactggtggatcggcagactggtgaaggagggctgcgaggtgggcttcatccccagccccgtgaagctggacagcctgagactgctgcaggagcagaagctgagacagaacagactgggcagcagcaagagcggcgacaacagcagcagcagcctgggcgacgtggtgaccggcaccagaagacccaccccccccgccagcgccaagcagaagcagaagagcaccgagcacgtgcccccctacgacgtggtgcccagcatgagacccatcatcctggtgggccccagcctgaagggctacgaggtgaccgacatgatgcagaaggccctgttcgacttcctgaagcacagattcgacggcagaatcagcatcaccagagtgaccgccgacatcagcctggccaagagaagcgtgctgaacaaccccagcaagcacatcatcatcgagagaagcaacaccagaagcagcctggccgaggtgcagagcgagatcgagagaatcttcgagctggccagaaccctgcagctggtggccctggacgccgacaccatcaaccaccccgcccagctgagcaagaccagcctggcccccatcatcgtgtacatcaagatcaccagccccaaggtgctgcagagactgatcaagagcagaggcaagagccagagcaagcacctgaacgtgcagatcgccgccagcgagaagctggcccagtgcccccccgagatgttcgacatcatcctggacgagaaccagctggaggacgcctgcgagcacctggccgagtacctggaggcctactggaaggccacccacccccccagcagcaccccccccaaccccctgctgaacagaaccatggccaccgccgccctggccgccagccccgcccccgtgagcaacctgcaggtgcaggtgctgaccagcctgagaagaaacctgggcttctggggcggcctggagagcagccagagaggcagcgtggtgccccaggagcaggagcacgccatgtag

SEQ ID NO: 74989 - DNA, 1290 bp, synthetic construct
  misc_feature 1..1290: note = Description of Artificial Sequence: Synthetic coding sequence
  source 1..1290: mol_type = other DNA
atggaggcccccagcagaaccgtggtggtgggcagcgccgagagctacaccagcagacccagcgacagcgacgtgagcctggaggaggacagagaggccctgagaaaggaggccgagagacaggccctggcccagctggagaaggccaagaccaagcccgtggccttcgccgtgagaaccaacgtgggctacaaccccagccccggcgacgaggtgcccgtgcagggcgtggccatcaccttcgagcccaaggacttcctgcacatcaaggagaagtacaacaacgactggtggatcggcagactggtgaaggagggctgcgaggtgggcttcatccccagccccgtgaagctggacagcctgagactgctgcaggagcagaagctgagacagaacagactgggcagcagcaagagcggcgacaacagcagcagcagcctgggcgacgtggtgaccggcaccagaagacccaccccccccgccagcgacagccccgtgcagaccgagcacgtgcccccctacgacgtggtgcccagcatgagacccatcatcctggtgggccccagcctgaagggctacgaggtgaccgacatgatgcagaaggccctgttcgacttcctgaagcacagattcgacggcagaatcagcatcaccagagtgaccgccgacatcagcctggccaagagaagcgtgctgaacaaccccagcaagcacatcatcatcgagagaagcaacaccagaagcagcctggccgaggtgcagagcgagatcgagagaatcttcgagctggccagaaccctgcagctggtggccctggacgccgacaccatcaaccaccccgcccagctgagcaagaccagcctggcccccatcatcgtgtacatcaagatcaccagccccaaggtgctgcagagactgatcaagagcagaggcaagagccagagcaagcacctgaacgtgcagatcgccgccagcgagaagctggcccagtgcccccccgagatgttcgacatcatcctggacgagaaccagctggaggacgcctgcgagcacctggccgagtacctggaggcctactggaaggccacccacccccccagcagcaccccccccaaccccctgctgaacagaaccatggccaccgccgccctggccgccagccccgcccccgtgagcaacctgcaggtgcaggtgctgaccagcctgagaagaaacctgggcttctggggcggcctggagagcagccagagaggcagcgtggtgccccaggagcaggagcacgccatgtag

SEQ ID NO: 74990 - DNA, 1647 bp, synthetic construct
  misc_feature 1..1647: note = Description of Artificial Sequence: Synthetic coding sequence
  source 1..1647: mol_type = other DNA
agcggcagcctgtacttccagggcagcgccgagagctacaccagcagacccagcgacagcgacgtgagcctggaggaggacagagaggccctgagaaaggaggccgagagacaggccctggcccagctggagaaggccaagaccaagcccgtggccttcgccgtgagaaccaacgtgggctacaaccccagccccggcgacgaggtgcccgtgcagggcgtggccatcaccttcgagcccaaggacttcctgcacatcaaggagaagtacaacaacgactggtggatcggcagactggtgaaggagggctgcgaggtgggcttcatccccagccccgtgaagctggacagcctgagactgctgcaggagcagaagctgagacagaacagactgggcagcagcaagagcggcgacaacagcagcagcagcctgggcgacgtggtgaccggcaccagaagacccaccccccccgccagcggcaagagccacagacacgccaccgagcacgtgcccccctacgacgtggtgcccagcatgagacccatcatcctggtgggccccagcctgaagggctacgaggtgaccgacatgatgcagaaggccctgttcgacttcctgaagcacagattcgacggcagaatcagcatcaccagagtgaccgccgacatcagcctggccaagagaagcgtgctgaacaaccccagcaagcacatcatcatcgagagaagcaacaccagaagcagcctggccgaggtgcagagcgagatcgagagaatcttcgagctggccagaaccctgcagctggtggccctggacgccgacaccatcaaccaccccgcccagctgagcaagaccagcctggcccccatcatcgtgtacatcaagatcaccagccccaaggtgctgcagagactgatcaagagcagaggcaagagccagagcaagcacctgaacgtgcagatcgccgccagcgagaagctggcccagtgcccccccgagatgttcgacatcatcctggacgagaaccagctggaggacgcctgcgagcacctggccgagtacctggaggcctactggaaggccacccacccccccagcagcaccccccccaaccccctgctgaacagaaccatggccaccgccgccctggccgccagccccgcccccgtgagcaacctgcagggcccctacctggccagcggcgaccagcccctggagagagccaccggcgagcacgccagcatgcacgagtaccccggcgagctgggccagccccccggcctgtaccccagcagccacccccccggcagagccggcaccctgagagccctgagcagacaggacaccttcgacgccgacacccccggcagcagaaacagcgcctacaccgagctgggcgacagctgcgtggacatggagaccgaccccagcgagggccccggcctgggcgaccccgccggcggcggcaccccccccgccagacagggcagctgggaggacgaggaggaggactacgaggaggagctgaccgacaacagaaacagaggcagaaacaaggccagatactgcgccgagggcggcggccccgtgctgggcagaaacaagaacgagctggagggctggggcagaggcgtgtacatcagatag

SEQ ID NO: 74991 - DNA, 1899 bp, synthetic construct
  misc_feature 1..1899: note = Description of Artificial Sequence: Synthetic coding sequence
  source 1..1899: mol_type = other DNA
atgaaccagggcagcggcctggacctgctgaagatcagctacggcaagggcgccagaagaaagaacagattcaagggcagcgacggcagcaccagcagcgacaccaccagcaacagcttcgtgagacagggcagcgccgacagctacaccagcagacccagcgacagcgacgtgagcctggaggaggacagagaggccgtgagaagagaggccgagagacaggcccaggcccagctggagaaggccaagaccaagcccgtggccttcgccgtgagaaccaacgtgagctacagcgccgcccacgaggacgacgtgcccgtgcccggcatggccatcagcttcgaggccaaggacttcctgcacgtgaaggagaagttcaacaacgactggtggatcggcagactggtgaaggagggctgcgagatcggcttcatccccagccccgtgaagctggagaacatgagactgcagcacgagcagagagccaagcagggcaagttctacagcagcaagagcggcggcaacagcagcagcagcctgggcgacatcgtgcccagcagcagaaagagcaccccccccagcagcgccatcgacatcgacgccaccggcctggacgccgaggagaacgacatccccgccaaccacagaagccccaagcccagcgccaacagcgtgaccagcccccacagcaaggagaagagaatgcccttcttcaagaagaccgagcacacccccccctacgacgtggtgcccagcatgagacccgtggtgctggtgggccccagcctgaagggctacgaggtgaccgacatgatgcagaaggccctgttcgacttcctgaagcacagattcgagggcagaatcagcatcaccagagtgaccgccgacatcagcctggccaagagaagcgtgctgaacaaccccagcaagcacgccatcatcgagagaagcaacaccagaagcagcctggccgaggtgcagagcgagatcgagagaatcttcgagctggccagaaccctgcagctggtggtgctggacgccgacaccatcaaccaccccgcccagctgagcaagaccagcctggcccccatcatcgtgtacgtgaagatcagcagccccaaggtgctgcagagactgatcaagagcagaggcaagagccaggccaagcacctgaacgtgcagatggtggccgccgacaagctggcccagtgcccccccgagctgttcgacgtgatcctggacgagaaccagctggaggacgcctgcgagcacctggccgactacctggaggcctactggaaggccacccacccccccagcagcagcctgcccaaccccctgctgagcagaaccctggccaccagcagcctgcccctgagccccaccctggccagcaacagccagggcagccagggcgaccagagaaccgacagaagcgcccccatcagaagcgccagccaggccgaggaggagcccagcgtggagcccgtgaagaagagccagcacagaagcagcagcagcgccccccaccacaaccacagaagcggcaccagcagaggcctgagcagacaggagaccttcgacagcgagacccaggagagcagagacagcgcctacgtggagcccaaggaggactacagccacgaccacgtggaccactacgccagccacagagaccacaaccacagagacgagacccacggcagcagcgaccacagacacagagagagcagacacagaagcagagacgtggacagagagcaggaccacaacgagtgcaacaagcagagaagcagacacaagagcaaggacagatactgcgagaaggacggcgaggtgatcagcaagaagagaaacgaggccggcgagtggaacagagacgtgtacatcagacagtag

SEQ ID NO: 74992 - DNA, 1983 bp, synthetic construct
  misc_feature 1..1983: note = Description of Artificial Sequence: Synthetic coding sequence
  source 1..1983: mol_type = other DNA
atggtgcagagagacatgagcaagagcccccccaccgccgccgccgccgtggcccaggagatccagatggagctgctggagaacgtggcccccgccggcgccctgggcgccgccgcccagagctacggcaagggcgccagaagaaagaacagattcaagggcagcgacggcagcaccagcagcgacaccaccagcaacagcttcgtgagacagggcagcgccgacagctacaccagcagacccagcgacagcgacgtgagcctggaggaggacagagaggccgtgagaagagaggccgagagacaggcccaggcccagctggagaaggccaagaccaagcccgtggccttcgccgtgagaaccaacgtgagctacagcgccgcccacgaggacgacgtgcccgtgcccggcatggccatcagcttcgaggccaaggacttcctgcacgtgaaggagaagttcaacaacgactggtggatcggcagactggtgaaggagggctgcgagatcggcttcatccccagccccgtgaagctggagaacatgagactgcagcacgagcagagagccaagcagggcaagttctacagcagcaagagcggcggcaacagcagcagcagcctgggcgacatcgtgcccagcagcagaaagagcaccccccccagcagcgccatcgacatcgacgccaccggcctggacgccgaggagaacgacatccccgccaaccacagaagccccaagcccagcgccaacagcgtgaccagcccccacagcaaggagaagagaatgcccttcttcaagaagaccgagcacacccccccctacgacgtggtgcccagcatgagacccgtggtgctggtgggccccagcctgaagggctacgaggtgaccgacatgatgcagaaggccctgttcgacttcctgaagcacagattcgagggcagaatcagcatcaccagagtgaccgccgacatcagcctggccaagagaagcgtgctgaacaaccccagcaagcacgccatcatcgagagaagcaacaccagaagcagcctggccgaggtgcagagcgagatcgagagaatcttcgagctggccagaaccctgcagctggtggtgctggacgccgacaccatcaaccaccccgcccagctgagcaagaccagcctggcccccatcatcgtgtacgtgaagatcagcagccccaaggtgctgcagagactgatcaagagcagaggcaagagccaggccaagcacctgaacgtgcagatggtggccgccgacaagctggcccagtgcccccccgagctgttcgacgtgatcctggacgagaaccagctggaggacgcctgcgagcacctggccgactacctggaggcctactggaaggccacccacccccccagcagcagcctgcccaaccccctgctgagcagaaccctggccaccagcagcctgcccctgagccccaccctggccagcaacagccagggcagccagggcgaccagagaaccgacagaagcgcccccatcagaagcgccagccaggccgaggaggagcccagcgtggagcccgtgaagaagagccagcacagaagcagcagcagcgccccccaccacaaccacagaagcggcaccagcagaggcctgagcagacaggagaccttcgacagcgagacccaggagagcagagacagcgcctacgtggagcccaaggaggactacagccacgaccacgtggaccactacgccagccacagagaccacaaccacagagacgagacccacggcagcagcgaccacagacacagagagagcagacacagaagcagagacgtggacagagagcaggaccacaacgagtgcaacaagcagagaagcagacacaagagcaaggacagatactgcgagaaggacggcgaggtgatcagcaagaagagaaacgaggccggcgagtggaacagagacgtgtacatcagacagtag

SEQ ID NO: 74993 - DNA, 1911 bp, synthetic construct
  misc_feature 1..1911: note = Description of Artificial Sequence: Synthetic coding sequence
  source 1..1911: mol_type = other DNA
atggtgcagagagacatgagcaagagcccccccaccgccgccgccgccgtggcccaggagatccagatggagctgctggagaacgtggcccccgccggcgccctgggcgccgccgcccagagctacggcaagggcgccagaagaaagaacagattcaagggcagcgacggcagcaccagcagcgacaccaccagcaacagcttcgtgagacagggcagcgccgacagctacaccagcagacccagcgacagcgacgtgagcctggaggaggacagagaggccgtgagaagagaggccgagagacaggcccaggcccagctggagaaggccaagaccaagcccgtggccttcgccgtgagaaccaacgtgagctacagcgccgcccacgaggacgacgtgcccgtgcccggcatggccatcagcttcgaggccaaggacttcctgcacgtgaaggagaagttcaacaacgactggtggatcggcagactggtgaaggagggctgcgagatcggcttcatccccagccccgtgaagctggagaacatgagactgcagcacgagcagagagccaagcagggcaagttctacagcagcaagagcggcggcaacagcagcagcagcctgggcgacatcgtgcccagcagcagaaagagcaccccccccagcagcggcgccaagagcgccgacgagcaggaccagtggaagaccgccggcctgttctggagattcaccaccgagcacacccccccctacgacgtggtgcccagcatgagacccgtggtgctggtgggccccagcctgaagggctacgaggtgaccgacatgatgcagaaggccctgttcgacttcctgaagcacagattcgagggcagaatcagcatcaccagagtgaccgccgacatcagcctggccaagagaagcgtgctgaacaaccccagcaagcacgccatcatcgagagaagcaacaccagaagcagcctggccgaggtgcagagcgagatcgagagaatcttcgagctggccagaaccctgcagctggtggtgctggacgccgacaccatcaaccaccccgcccagctgagcaagaccagcctggcccccatcatcgtgtacgtgaagatcagcagccccaaggtgctgcagagactgatcaagagcagaggcaagagccaggccaagcacctgaacgtgcagatggtggccgccgacaagctggcccagtgcccccccgagctgttcgacgtgatcctggacgagaaccagctggaggacgcctgcgagcacctggccgactacctggaggcctactggaaggccacccacccccccagcagcagcctgcccaaccccctgctgagcagaaccctggccaccagcagcctgcccctgagccccaccctggccagcaacagccagggcagccagggcgaccagagaaccgacagaagcgcccccatcagaagcgccagccaggccgaggaggagcccagcgtggagcccgtgaagaagagccagcacagaagcagcagcagcgccccccaccacaaccacagaagcggcaccagcagaggcctgagcagacaggagaccttcgacagcgagacccaggagagcagagacagcgcctacgtggagcccaaggaggactacagccacgaccacgtggaccactacgccagccacagagaccacaaccacagagacgagacccacggcagcagcgaccacagacacagagagagcagacacagaagcagagacgtggacagagagcaggaccacaacgagtgcaacaagcagagaagcagacacaagagcaaggacagatactgcgagaaggacggcgaggtgatcagcaagaagagaaacgaggccggcgagtggaacagagacgtgtacatcagacagtag

SEQ ID NO: 74994 - DNA, 1839 bp, synthetic construct
  misc_feature 1..1839: note = Description of Artificial Sequence: Synthetic coding sequence
  source 1..1839: mol_type = other DNA
atgaaggccacctggatcagactgctgaagagagccaagggcggcagactgaagaacagcgacatctgcggcagcgccgacagctacaccagcagacccagcgacagcgacgtgagcctggaggaggacagagaggccgtgagaagagaggccgagagacaggcccaggcccagctggagaaggccaagaccaagcccgtggccttcgccgtgagaaccaacgtgagctacagcgccgcccacgaggacgacgtgcccgtgcccggcatggccatcagcttcgaggccaaggacttcctgcacgtgaaggagaagttcaacaacgactggtggatcggcagactggtgaaggagggctgcgagatcggcttcatccccagccccgtgaagctggagaacatgagactgcagcacgagcagagagccaagcagggcaagttctacagcagcaagagcggcggcaacagcagcagcagcctgggcgacatcgtgcccagcagcagaaagagcaccccccccagcagcgccatcgacatcgacgccaccggcctggacgccgaggagaacgacatccccgccaaccacagaagccccaagcccagcgccaacagcgtgaccagcccccacagcaaggagaagagaatgcccttcttcaagaagaccgagcacacccccccctacgacgtggtgcccagcatgagacccgtggtgctggtgggccccagcctgaagggctacgaggtgaccgacatgatgcagaaggccctgttcgacttcctgaagcacagattcgagggcagaatcagcatcaccagagtgaccgccgacatcagcctggccaagagaagcgtgctgaacaaccccagcaagcacgccatcatcgagagaagcaacaccagaagcagcctggccgaggtgcagagcgagatcgagagaatcttcgagctggccagaaccctgcagctggtggtgctggacgccgacaccatcaaccaccccgcccagctgagcaagaccagcctggcccccatcatcgtgtacgtgaagatcagcagccccaaggtgctgcagagactgatcaagagcagaggcaagagccaggccaagcacctgaacgtgcagatggtggccgccgacaagctggcccagtgcccccccgagctgttcgacgtgatcctggacgagaaccagctggaggacgcctgcgagcacctggccgactacctggaggcctactggaaggccacccacccccccagcagcagcctgcccaaccccctgctgagcagaaccctggccaccagcagcctgcccctgagccccaccctggccagcaacagccagggcagccagggcgaccagagaaccgacagaagcgcccccatcagaagcgccagccaggccgaggaggagcccagcgtggagcccgtgaagaagagccagcacagaagcagcagcagcgccccccaccacaaccacagaagcggcaccagcagaggcctgagcagacaggagaccttcgacagcgagacccaggagagcagagacagcgcctacgtggagcccaaggaggactacagccacgaccacgtggaccactacgccagccacagagaccacaaccacagagacgagacccacggcagcagcgaccacagacacagagagagcagacacagaagcagagacgtggacagagagcaggaccacaacgagtgcaacaagcagagaagcagacacaagagcaaggacagatactgcgagaaggacggcgaggtgatcagcaagaagagaaacgaggccggcgagtggaacagagacgtgtacatcagacagtag

SEQ ID NO: 74995 - DNA, 1704 bp, synthetic construct
  misc_feature 1..1704: note = Description of Artificial Sequence: Synthetic coding sequence
  source 1..1704: mol_type = other DNA
atgcagtgctgcggcctggtgcacagaagaagagtgagagtgagctacggcagcgccgacagctacaccagcagacccagcgacagcgacgtgagcctggaggaggacagagaggccgtgagaagagaggccgagagacaggcccaggcccagctggagaaggccaagaccaagcccgtggccttcgccgtgagaaccaacgtgagctacagcgccgcccacgaggacgacgtgcccgtgcccggcatggccatcagcttcgaggccaaggacttcctgcacgtgaaggagaagttcaacaacgactggtggatcggcagactggtgaaggagggctgcgagatcggcttcatccccagccccgtgaagctggagaacatgagactgcagcacgagcagagagccaagcagggcaagttctacagcagcaagagcggcggcaacagcagcagcagcctgggcgacatcgtgcccagcagcagaaagagcaccccccccagcagcgccaagcagaagcagaagagcaccgagcacacccccccctacgacgtggtgcccagcatgagacccgtggtgctggtgggccccagcctgaagggctacgaggtgaccgacatgatgcagaaggccctgttcgacttcctgaagcacagattcgagggcagaatcagcatcaccagagtgaccgccgacatcagcctggccaagagaagcgtgctgaacaaccccagcaagcacgccatcatcgagagaagcaacaccagaagcagcctggccgaggtgcagagcgagatcgagagaatcttcgagctggccagaaccctgcagctggtggtgctggacgccgacaccatcaaccaccccgcccagctgagcaagaccagcctggcccccatcatcgtgtacgtgaagatcagcagccccaaggtgctgcagagactgatcaagagcagaggcaagagccaggccaagcacctgaacgtgcagatggtggccgccgacaagctggcccagtgcccccccgagctgttcgacgtgatcctggacgagaaccagctggaggacgcctgcgagcacctggccgactacctggaggcctactggaaggccacccacccccccagcagcagcctgcccaaccccctgctgagcagaaccctggccaccagcagcctgcccctgagccccaccctggccagcaacagccagggcagccagggcgaccagagaaccgacagaagcgcccccatcagaagcgccagccaggccgaggaggagcccagcgtggagcccgtgaagaagagccagcacagaagcagcagcagcgccccccaccacaaccacagaagcggcaccagcagaggcctgagcagacaggagaccttcgacagcgagacccaggagagcagagacagcgcctacgtggagcccaaggaggactacagccacgaccacgtggaccactacgccagccacagagaccacaaccacagagacgagacccacggcagcagcgaccacagacacagagagagcagacacagaagcagagacgtggacagagagcaggaccacaacgagtgcaacaagcagagaagcagacacaagagcaaggacagatactgcgagaaggacggcgaggtgatcagcaagaagagaaacgaggccggcgagtggaacagagacgtgtacatcagacagtag

SEQ ID NO: 74996 - DNA, 1821 bp, synthetic construct
  misc_feature 1..1821: note = Description of Artificial Sequence: Synthetic coding sequence
  source 1..1821: mol_type = other DNA
atgctggacagaagactgatcgccccccagaccaagtacatcatccccggcggcagcgccgacagctacaccagcagacccagcgacagcgacgtgagcctggaggaggacagagaggccgtgagaagagaggccgagagacaggcccaggcccagctggagaaggccaagaccaagcccgtggccttcgccgtgagaaccaacgtgagctacagcgccgcccacgaggacgacgtgcccgtgcccggcatggccatcagcttcgaggccaaggacttcctgcacgtgaaggagaagttcaacaacgactggtggatcggcagactggtgaaggagggctgcgagatcggcttcatccccagccccgtgaagctggagaacatgagactgcagcacgagcagagagccaagcagggcaagttctacagcagcaagagcggcggcaacagcagcagcagcctgggcgacatcgtgcccagcagcagaaagagcaccccccccagcagcgccatcgacatcgacgccaccggcctggacgccgaggagaacgacatccccgccaaccacagaagccccaagcccagcgccaacagcgtgaccagcccccacagcaaggagaagagaatgcccttcttcaagaagaccgagcacacccccccctacgacgtggtgcccagcatgagacccgtggtgctggtgggccccagcctgaagggctacgaggtgaccgacatgatgcagaaggccctgttcgacttcctgaagcacagattcgagggcagaatcagcatcaccagagtgaccgccgacatcagcctggccaagagaagcgtgctgaacaaccccagcaagcacgccatcatcgagagaagcaacaccagaagcagcctggccgaggtgcagagcgagatcgagagaatcttcgagctggccagaaccctgcagctggtggtgctggacgccgacaccatcaaccaccccgcccagctgagcaagaccagcctggcccccatcatcgtgtacgtgaagatcagcagccccaaggtgctgcagagactgatcaagagcagaggcaagagccaggccaagcacctgaacgtgcagatggtggccgccgacaagctggcccagtgcccccccgagctgttcgacgtgatcctggacgagaaccagctggaggacgcctgcgagcacctggccgactacctggaggcctactggaaggccacccacccccccagcagcagcctgcccaaccccctgctgagcagaaccctggccaccagcagcctgcccctgagccccaccctggccagcaacagccagggcagccagggcgaccagagaaccgacagaagcgcccccatcagaagcgccagccaggccgaggaggagcccagcgtggagcccgtgaagaagagccagcacagaagcagcagcagcgccccccaccacaaccacagaagcggcaccagcagaggcctgagcagacaggagaccttcgacagcgagacccaggagagcagagacagcgcctacgtggagcccaaggaggactacagccacgaccacgtggaccactacgccagccacagagaccacaaccacagagacgagacccacggcagcagcgaccacagacacagagagagcagacacagaagcagagacgtggacagagagcaggaccacaacgagtgcaacaagcagagaagcagacacaagagcaaggacagatactgcgagaaggacggcgaggtgatcagcaagaagagaaacgaggccggcgagtggaacagagacgtgtacatcagacagtag

SEQ ID NO: 74997 - DNA, 1827 bp, synthetic construct
  misc_feature 1..1827: note = Description of Artificial Sequence: Synthetic coding sequence
  source 1..1827: mol_type = other DNA
atgaaccagggcagcggcctggacctgctgaagatcagctacggcaagggcgccagaagaaagaacagattcaagggcagcgacggcagcaccagcagcgacaccaccagcaacagcttcgtgagacagggcagcgccgacagctacaccagcagacccagcgacagcgacgtgagcctggaggaggacagagaggccgtgagaagagaggccgagagacaggcccaggcccagctggagaaggccaagaccaagcccgtggccttcgccgtgagaaccaacgtgagctacagcgccgcccacgaggacgacgtgcccgtgcccggcatggccatcagcttcgaggccaaggacttcctgcacgtgaaggagaagttcaacaacgactggtggatcggcagactggtgaaggagggctgcgagatcggcttcatccccagccccgtgaagctggagaacatgagactgcagcacgagcagagagccaagcagggcaagttctacagcagcaagagcggcggcaacagcagcagcagcctgggcgacatcgtgcccagcagcagaaagagcaccccccccagcagcggcgccaagagcgccgacgagcaggaccagtggaagaccgccggcctgttctggagattcaccaccgagcacacccccccctacgacgtggtgcccagcatgagacccgtggtgctggtgggccccagcctgaagggctacgaggtgaccgacatgatgcagaaggccctgttcgacttcctgaagcacagattcgagggcagaatcagcatcaccagagtgaccgccgacatcagcctggccaagagaagcgtgctgaacaaccccagcaagcacgccatcatcgagagaagcaacaccagaagcagcctggccgaggtgcagagcgagatcgagagaatcttcgagctggccagaaccctgcagctggtggtgctggacgccgacaccatcaaccaccccgcccagctgagcaagaccagcctggcccccatcatcgtgtacgtgaagatcagcagccccaaggtgctgcagagactgatcaagagcagaggcaagagccaggccaagcacctgaacgtgcagatggtggccgccgacaagctggcccagtgcccccccgagctgttcgacgtgatcctggacgagaaccagctggaggacgcctgcgagcacctggccgactacctggaggcctactggaaggccacccacccccccagcagcagcctgcccaaccccctgctgagcagaaccctggccaccagcagcctgcccctgagccccaccctggccagcaacagccagggcagccagggcgaccagagaaccgacagaagcgcccccatcagaagcgccagccaggccgaggaggagcccagcgtggagcccgtgaagaagagccagcacagaagcagcagcagcgccccccaccacaaccacagaagcggcaccagcagaggcctgagcagacaggagaccttcgacagcgagacccaggagagcagagacagcgcctacgtggagcccaaggaggactacagccacgaccacgtggaccactacgccagccacagagaccacaaccacagagacgagacccacggcagcagcgaccacagacacagagagagcagacacagaagcagagacgtggacagagagcaggaccacaacgagtgcaacaagcagagaagcagacacaagagcaaggacagatactgcgagaaggacggcgaggtgatcagcaagaagagaaacgaggccggcgagtggaacagagacgtgtacatcagacagtag

SEQ ID NO: 74998 - DNA, 1818 bp, synthetic construct
  misc_feature 1..1818: note = Description of Artificial Sequence: Synthetic coding sequence
  source 1..1818: mol_type = other DNA
atgcagtgctgcggcctggtgcacagaagaagagtgagagtgagctacggcagcgccgacagctacaccagcagacccagcgacagcgacgtgagcctggaggaggacagagaggccgtgagaagagaggccgagagacaggcccaggcccagctggagaaggccaagaccaagcccgtggccttcgccgtgagaaccaacgtgagctacagcgccgcccacgaggacgacgtgcccgtgcccggcatggccatcagcttcgaggccaaggacttcctgcacgtgaaggagaagttcaacaacgactggtggatcggcagactggtgaaggagggctgcgagatcggcttcatccccagccccgtgaagctggagaacatgagactgcagcacgagcagagagccaagcagggcaagttctacagcagcaagagcggcggcaacagcagcagcagcctgggcgacatcgtgcccagcagcagaaagagcaccccccccagcagcgccatcgacatcgacgccaccggcctggacgccgaggagaacgacatccccgccaaccacagaagccccaagcccagcgccaacagcgtgaccagcccccacagcaaggagaagagaatgcccttcttcaagaagaccgagcacacccccccctacgacgtggtgcccagcatgagacccgtggtgctggtgggccccagcctgaagggctacgaggtgaccgacatgatgcagaaggccctgttcgacttcctgaagcacagattcgagggcagaatcagcatcaccagagtgaccgccgacatcagcctggccaagagaagcgtgctgaacaaccccagcaagcacgccatcatcgagagaagcaacaccagaagcagcctggccgaggtgcagagcgagatcgagagaatcttcgagctggccagaaccctgcagctggtggtgctggacgccgacaccatcaaccaccccgcccagctgagcaagaccagcctggcccccatcatcgtgtacgtgaagatcagcagccccaaggtgctgcagagactgatcaagagcagaggcaagagccaggccaagcacctgaacgtgcagatggtggccgccgacaagctggcccagtgcccccccgagctgttcgacgtgatcctggacgagaaccagctggaggacgcctgcgagcacctggccgactacctggaggcctactggaaggccacccacccccccagcagcagcctgcccaaccccctgctgagcagaaccctggccaccagcagcctgcccctgagccccaccctggccagcaacagccagggcagccagggcgaccagagaaccgacagaagcgcccccatcagaagcgccagccaggccgaggaggagcccagcgtggagcccgtgaagaagagccagcacagaagcagcagcagcgccccccaccacaaccacagaagcggcaccagcagaggcctgagcagacaggagaccttcgacagcgagacccaggagagcagagacagcgcctacgtggagcccaaggaggactacagccacgaccacgtggaccactacgccagccacagagaccacaaccacagagacgagacccacggcagcagcgaccacagacacagagagagcagacacagaagcagagacgtggacagagagcaggaccacaacgagtgcaacaagcagagaagcagacacaagagcaaggacagatactgcgagaaggacggcgaggtgatcagcaagaagagaaacgaggccggcgagtggaacagagacgtgtacatcagacagtag

SEQ ID NO: 74999 - DNA, 1455 bp, synthetic construct
  misc_feature 1..1455: note = Description of Artificial Sequence: Synthetic coding sequence
  source 1..1455: mol_type = other DNA
atgtacgacgacagctacgtgcccggcttcgaggacagcgaggccggcagcgccgacagctacaccagcagacccagcctggacagcgacgtgagcctggaggaggacagagagagcgccagaagagaggtggagagccaggcccagcagcagctggagagagccaagcacaagcccgtggccttcgccgtgagaaccaacgtgagctactgcggcgtgctggacgaggagtgccccgtgcagggcagcggcgtgaacttcgaggccaaggacttcctgcacatcaaggagaagtacagcaacgactggtggatcggcagactggtgaaggagggcggcgacatcgccttcatccccagcccccagagactggagagcatcagactgaagcaggagcagaaggccagaagaagcggcaaccccagcagcctgagcgacatcggcaacagaagaagccccccccccagcctggccaagcagaagcagaagcaggccgagcacgtgcccccctacgacgtggtgcccagcatgagacccgtggtgctggtgggccccagcctgaagggctacgaggtgaccgacatgatgcagaaggccctgttcgacttcctgaagcacagattcgacggcagaatcagcatcaccagagtgaccgccgacctgagcctggccaagagaagcgtgctgaacaaccccggcaagagaaccatcatcgagagaagcagcgccagaagcagcatcgccgaggtgcagagcgagatcgagagaatcttcgagctggccaagagcctgcagctggtggtgctggacgccgacaccatcaaccaccccgcccagctggccaagaccagcctggcccccatcatcgtgttcgtgaaggtgagcagccccaaggtgctgcagagactgatcagaagcagaggcaagagccagatgaagcacctgaccgtgcagatgatggcctacgacaagctggtgcagtgcccccccgagagcttcgacgtgatcctggacgagaaccagctggaggacgcctgcgagcacctggccgagtacctggaggtgtactggagagccacccaccaccccgcccccggccccggcctgctgggcccccccagcgccatccccggcctgcagaaccagcagctgctgggcgagagaggcgaggagcacagccccctggagagagacagcctgatgcccagcgacgaggccagcgagagcagcagacaggcctggaccggcagcagccagagaagcagcagacacctggaggaggactacgccgacgcctaccaggacctgtaccagccccacagacagcacaccagcggcctgcccagcgccaacggccacgacccccaggacagactgctggcccaggacagcgagcacaaccacagcgacagaaactggcagagaaacagaccctggcccaaggacagctactag

SEQ ID NO: 75000 - DNA, 1566 bp, synthetic construct
  misc_feature 1..1566: note = Description of Artificial Sequence: Synthetic coding sequence
  source 1..1566: mol_type = other DNA
atgagcagcagcagctacgccaagaacggcaccgccgacggcccccacagccccaccagccaggtggccagaggcaccaccaccagaagaagcagactgaagagaagcgacggcagcaccaccagcaccagcttcatcctgagacagggcagcgccgacagctacaccagcagacccagcgacagcgacgtgagcctggaggaggacagagaggccatcagacaggagagagagcagcaggccgccatccagctggagagagccaagagcaagcccgtggccttcgccgtgaagaccaacgtgagctactgcggcgccctggacgaggacgtgcccgtgcccagcaccgccatcagcttcgacgccaaggacttcctgcacatcaaggagaagtacaacaacgactggtggatcggcagactggtgaaggagggctgcgagatcggcttcatccccagccccctgagactggagaacatcagaatccagcaggagcagaagagaggcagattccacggcggcaagagcagcggcaacagcagcagcagcctgggcgagatggtgagcggcaccttcagagccacccccaccagcaccgtgaagatggtgctgaagatccacaccgagcacatccccccctacgacgtggtgcccagcatgagacccgtggtgctggtgggccccagcctgaagggctacgaggtgaccgacatgatgcagaaggccctgttcgacttcctgaagcacagattcgacggcagaatcagcatcaccagagtgaccgccgacatcagcctggccaagagaagcgtgctgaacaaccccagcaagagagccatcatcgagagaagcaacaccagaagcagcctggccgaggtgcagagcgagatcgagagaatcttcgagctggccagaagcctgcagctggtggtgctggacgccgacaccatcaaccaccccgcccagctgatcaagaccagcctggcccccatcatcgtgcacgtgaaggtgagcagccccaaggtgctgcagagactgatcaagagcagaggcaagagccagagcaagcacctgaacgtgcagctggtggccgccgacaagctggcccagtgcccccccgagatgttcgacgtgatcctggacgagaaccagctggaggacgcctgcgagcacctgggcgagtacctggaggcctactggagagccacccacaccaccagcagcacccccatgacccccctgctgggcagaaacctgggcagcaccgccctgagcccctaccccaccgccatcagcggcctgcagagccagagaatgagacacagcaaccacagcaccgagaacagccccatcgagagaagaagcctgatgaccagcgacgagaactaccacaacgagagagccagaaagagcagaaacagactgagcagcagcagccagcacagcagagaccactaccccctggtggaggaggactaccccgacagctaccaggacacctacaagccccacagaaacagaggcagccccggcggctacagccacgacagcagacacagactgtag

SEQ ID NO: 75001 - DNA, 1464 bp, synthetic construct
  misc_feature 1..1464: note = Description of Artificial Sequence: Synthetic coding sequence
  source 1..1464: mol_type = other DNA
atgtacgacaacctgtacctgcacggcatcgaggacagcgaggccggcagcgccgacagctacaccagcagacccagcgacagcgacgtgagcctggaggaggacagagaggccatcagacaggagagagagcagcaggccgccatccagctggagagagccaagagcaagcccgtggccttcgccgtgaagaccaacgtgagctactgcggcgccctggacgaggacgtgcccgtgcccagcaccgccatcagcttcgacgccaaggacttcctgcacatcaaggagaagtacaacaacgactggtggatcggcagactggtgaaggagggctgcgagatcggcttcatccccagccccctgagactggagaacatcagaatccagcaggagcagaagagaggcagattccacggcggcaagagcagcggcaacagcagcagcagcctgggcgagatggtgagcggcaccttcagagccacccccaccagcaccgtgaagatggtgctgaagatccacaccgagcacatccccccctacgacgtggtgcccagcatgagacccgtggtgctggtgggccccagcctgaagggctacgaggtgaccgacatgatgcagaaggccctgttcgacttcctgaagcacagattcgacggcagaatcagcatcaccagagtgaccgccgacatcagcctggccaagagaagcgtgctgaacaaccccagcaagagagccatcatcgagagaagcaacaccagaagcagcctggccgaggtgcagagcgagatcgagagaatcttcgagctggccagaagcctgcagctggtggtgctggacgccgacaccatcaaccaccccgcccagctgatcaagaccagcctggcccccatcatcgtgcacgtgaaggtgagcagccccaaggtgctgcagagactgatcaagagcagaggcaagagccagagcaagcacctgaacgtgcagctggtggccgccgacaagctggcccagtgcccccccgagatgttcgacgtgatcctggacgagaaccagctggaggacgcctgcgagcacctgggcgagtacctggaggcctactggagagccacccacaccaccagcagcacccccatgacccccctgctgggcagaaacctgggcagcaccgccctgagcccctaccccaccgccatcagcggcctgcagagccagagaatgagacacagcaaccacagcaccgagaacagccccatcgagagaagaagcctgatgaccagcgacgagaactaccacaacgagagagccagaaagagcagaaacagactgagcagcagcagccagcacagcagagaccactaccccctggtggaggaggactaccccgacagctaccaggacacctacaagccccacagaaacagaggcagccccggcggctacagccacgacagcagacacagactgtag

SEQ ID NO: 75002 - DNA, 1461 bp, synthetic construct
  misc_feature 1..1461: note = Description of Artificial Sequence: Synthetic coding sequence
  source 1..1461: mol_type = other DNA
atgtacgacaacctgtacctgcacggcatcgaggacagcgaggccggcagcgccgacagctacaccagcagacccagcgacagcgacgtgagcctggaggaggacagagaggccatcagacaggagagagagcagcaggccgccatccagctggagagagccaagagcaagcccgtggccttcgccgtgaagaccaacgtgagctactgcggcgccctggacgaggacgtgcccgtgcccagcaccgccatcagcttcgacgccaaggacttcctgcacatcaaggagaagtacaacaacgactggtggatcggcagactggtgaaggagggctgcgagatcggcttcatccccagccccctgagactggagaacatcagaatccagcaggagcagaagagaggcagattccacggcggcaagagcagcggcaacagcagcagcagcctgggcgagatggtgagcggcaccttcagagccacccccaccagcaccgccaagcagaagcagaaggtgaccgagcacatccccccctacgacgtggtgcccagcatgagacccgtggtgctggtgggccccagcctgaagggctacgaggtgaccgacatgatgcagaaggccctgttcgacttcctgaagcacagattcgacggcagaatcagcatcaccagagtgaccgccgacatcagcctggccaagagaagcgtgctgaacaaccccagcaagagagccatcatcgagagaagcaacaccagaagcagcctggccgaggtgcagagcgagatcgagagaatcttcgagctggccagaagcctgcagctggtggtgctggacgccgacaccatcaaccaccccgcccagctgatcaagaccagcctggcccccatcatcgtgcacgtgaaggtgagcagccccaaggtgctgcagagactgatcaagagcagaggcaagagccagagcaagcacctgaacgtgcagctggtggccgccgacaagctggcccagtgcccccccgagatgttcgacgtgatcctggacgagaaccagctggaggacgcctgcgagcacctgggcgagtacctggaggcctactggagagccacccacaccaccagcagcacccccatgacccccctgctgggcagaaacctgggcagcaccgccctgagcccctaccccaccgccatcagcggcctgcagagccagagaatgagacacagcaaccacagcaccgagaacagccccatcgagagaagaagcctgatgaccagcgacgagaactaccacaacgagagagccagaaagagcagaaacagactgagcagcagcagccagcacagcagagaccactaccccctggtggaggaggactaccccgacagctaccaggacacctacaagccccacagaaacagaggcagccccggcggctacagccacgacagcagacacagactgtag

SEQ ID NO: 75003 - DNA, 1563 bp, synthetic construct
  misc_feature 1..1563: note = Description of Artificial Sequence: Synthetic coding sequence
  source 1..1563: mol_type = other DNA
atgagcagcagcagctacgccaagaacggcaccgccgacggcccccacagccccaccagccaggtggccagaggcaccaccaccagaagaagcagactgaagagaagcgacggcagcaccaccagcaccagcttcatcctgagacagggcagcgccgacagctacaccagcagacccagcgacagcgacgtgagcctggaggaggacagagaggccatcagacaggagagagagcagcaggccgccatccagctggagagagccaagagcaagcccgtggccttcgccgtgaagaccaacgtgagctactgcggcgccctggacgaggacgtgcccgtgcccagcaccgccatcagcttcgacgccaaggacttcctgcacatcaaggagaagtacaacaacgactggtggatcggcagactggtgaaggagggctgcgagatcggcttcatccccagccccctgagactggagaacatcagaatccagcaggagcagaagagaggcagattccacggcggcaagagcagcggcaacagcagcagcagcctgggcgagatggtgagcggcaccttcagagccacccccaccagcaccgccaagcagaagcagaaggtgaccgagcacatccccccctacgacgtggtgcccagcatgagacccgtggtgctggtgggccccagcctgaagggctacgaggtgaccgacatgatgcagaaggccctgttcgacttcctgaagcacagattcgacggcagaatcagcatcaccagagtgaccgccgacatcagcctggccaagagaagcgtgctgaacaaccccagcaagagagccatcatcgagagaagcaacaccagaagcagcctggccgaggtgcagagcgagatcgagagaatcttcgagctggccagaagcctgcagctggtggtgctggacgccgacaccatcaaccaccccgcccagctgatcaagaccagcctggcccccatcatcgtgcacgtgaaggtgagcagccccaaggtgctgcagagactgatcaagagcagaggcaagagccagagcaagcacctgaacgtgcagctggtggccgccgacaagctggcccagtgcccccccgagatgttcgacgtgatcctggacgagaaccagctggaggacgcctgcgagcacctgggcgagtacctggaggcctactggagagccacccacaccaccagcagcacccccatgacccccctgctgggcagaaacctgggcagcaccgccctgagcccctaccccaccgccatcagcggcctgcagagccagagaatgagacacagcaaccacagcaccgagaacagccccatcgagagaagaagcctgatgaccagcgacgagaactaccacaacgagagagccagaaagagcagaaacagactgagcagcagcagccagcacagcagagaccactaccccctggtggaggaggactaccccgacagctaccaggacacctacaagccccacagaaacagaggcagccccggcggctacagccacgacagcagacacagactgtag

SEQ ID NO: 75004 - DNA, 1248 bp, synthetic construct
  misc_feature 1..1248: note = Description of Artificial Sequence: Synthetic coding sequence
  source 1..1248: mol_type = other DNA
ttctacttcctgtgccagggcagcgccgacagctacaccagcagacccagcgacagcgacgtgagcctggaggaggacagagaggccatcagacaggagagagagcagcaggccgccatccagctggagagagccaagagcaagcccgtggccttcgccgtgaagaccaacgtgagctactgcggcgccctggacgaggacgtgcccgtgcccagcaccgccatcagcttcgacgccaaggacttcctgcacatcaaggagaagtacaacaacgactggtggatcggcagactggtgaaggagggctgcgagatcggcttcatccccagccccctgagactggagaacatcagaatccagcaggagcagaagagaggcagattccacggcggcaagagcagcggcaacagcagcagcagcctgggcgagatggtgagcggcaccttcagagccacccccaccagcaccgccaagcagaagcagaaggtgaccgagcacatccccccctacgacgtggtgcccagcatgagacccgtggtgctggtgggccccagcctgaagggctacgaggtgaccgacatgatgcagaaggccctgttcgacttcctgaagcacagattcgacggcagaatcagcatcaccagagtgaccgccgacatcagcctggccaagagaagcgtgctgaacaaccccagcaagagagccatcatcgagagaagcaacaccagaagcagcctggccgaggtgcagagcgagatcgagagaatcttcgagctggccagaagcctgcagctggtggtgctggacgccgacaccatcaaccaccccgcccagctgatcaagaccagcctggcccccatcatcgtgcacgtgaaggtgagcagccccaaggtgctgcagagactgatcaagagcagaggcaagagccagagcaagcacctgaacgtgcagctggtggccgccgacaagctggcccagtgcccccccagccagagaatgagacacagcaaccacagcaccgagaacagccccatcgagagaagaagcctgatgaccagcgacgagaactaccacaacgagagagccagaaagagcagaaacagactgagcagcagcagccagcacagcagagaccactaccccctggtggaggaggactaccccgacagctaccaggacacctacaagccccacagaaacagaggcagccccggcggctacagccacgacagcagacacagactgtag

SEQ ID NO: 75005 - DNA, 558 bp, synthetic construct
  misc_feature 1..558: note = Description of Artificial Sequence: Synthetic coding sequence
  source 1..558: mol_type = other DNA
atgagcggcagcttcgagctgagcgtgcaggacctgaacgacctgctgagcgacggcagcggctgctacagcctgcccagccagccctgcaacgaggtgacccccagaatctacgtgggcaacgccagcgtggcccaggacatccccaagctgcagaagctgggcatcacccacgtgctgaacgccgccgagggcagaagcttcatgcacgtgaacaccaacgccaacttctacaaggacagcggcatcacctacctgggcatcaaggccaacgacacccaggagttcaacctgagcgcctacttcgagagagccgccgacttcatcgaccaggccctggcccagaagaacggcagagtgctggtgcactgcagagagggctacagcagaagccccaccctggtgatcgcctacctgatgatgagacagaagatggacgtgaagagcgccctgagcatcgtgagacagaacagagagatcggccccaacgacggcttcctggcccagctgtgccagctgaacgacagactggccaaggagggcaagctgaagccctag

SEQ ID NO: 75006 - DNA, 972 bp, synthetic construct
  misc_feature 1..972: note = Description of Artificial Sequence: Synthetic coding sequence
  source 1..972: mol_type = other DNA
atgggcctgttcgacagaggcgtgcagatgctgctgaccaccgtgggcgccttcgccgccttcagcctgatgaccatcgccgtgggcaccgactactggctgtacagcagaggcgtgtgcaagaccaagagcgtgagcgagaacgagaccagcaagaagaacgaggaggtgatgacccacagcggcctgtggagaacctgctgcctggagggcaacttcaagggcctgtgcaagcagatcgaccacttccccgaggacgccgactacgaggccgacaccgccgagtacttcctgagagccgtgagagccagcagcatcttccccatcctgagcgtgatcctgctgttcatgggcggcctgtgcatcgccgccagcgagttctacaagaccagacacaacatcatcctgagcgccggcatcttcttcgtgagcgccggcctgagcaacatcatcggcatcatcgtgtacatcagcgccaacgccggcgaccccagcaagagcgacagcaagaagaacagctacagctacggctggagcttctacttcggcgccctgagcttcatcatcgccgagatggtgggcgtgctggccgtgcacatgttcatcgacagacacaagcagctgagagccaccgccagagccaccgactacctgcaggccagcgccatcaccagaatccccagctacagatacagataccagagaagaagcagaagcagcagcagaagcaccgagcccagccacagcagagacgccagccccgtgggcatcaagggcttcaacaccctgcccagcaccgagatcagcatgtacaccctgagcagagaccccctgaaggccgccaccacccccaccgccacctacaacagcgacagagacaacagcttcctgcaggtgcacaactgcatccagaaggagaacaaggacagcctgcacagcaacaccgccaacagaagaaccacccccgtgtag

SEQ ID NO: 75007 - DNA, 948 bp, synthetic construct
  misc_feature 1..948: note = Description of Artificial Sequence: Synthetic coding sequence
  source 1..948: mol_type = other DNA
atgagaatgtgcgacagaggcatccagatgctgatcaccaccgtgggcgccttcgccgccttcagcctgatgaccatcgccgtgggcaccgactactggctgtacagcagaggcgtgtgcagaaccaagagcaccagcgacaacgagaccagcagaaagaacgaggaggtgatgacccacagcggcctgtggagaacctgctgcctggagggcgccttcagaggcgtgtgcaagaagatcgaccacttccccgaggacgccgactacgagcaggacaccgccgagtacctgctgagagccgtgagagccagcagcgtgttccccatcctgagcgtgaccctgctgttcttcggcggcctgtgcgtggccgccagcgagttccacagaagcagacacaacgtgatcctgagcgccggcatcttcttcgtgagcgccggcctgagcaacatcatcggcatcatcgtgtacatcagcgccaacgccggcgaccccggccagagagacagcaagaagagctacagctacggctggagcttctacttcggcgccttcagcttcatcatcgccgagatcgtgggcgtggtggccgtgcacatctacatcgagaagcaccagcagctgagagccaagagccacagcgagttcctgaagaagagcaccttcgccagactgcccccctacagatacagattcagaagaagaagcagcagcagaagcaccgagcccagaagcagagacctgagccccatcagcaagggcttccacaccatccccagcaccgacatcagcatgttcaccctgagcagagaccccagcaagatcaccatgggcaccctgctgaacagcgacagagaccacgccttcctgcagttccacaacagcacccccaaggagttcaaggagagcctgcacaacaaccccgccaacagaagaaccacccccgtgtag

SEQ ID NO: 75008 - DNA, 891 bp, synthetic construct
  misc_feature 1..891: note = Description of Artificial Sequence: Synthetic coding sequence
  source 1..891: mol_type = other DNA
atgagcgcctgcggcagaaaggccctgaccctgctgagcagcgtgttcgccgtgtgcggcctgggcctgctgggcatcgccgtgagcaccgactactggctgtacctggaggagggcgtgatcgtgccccagaaccagagcaccgagatcaagatgagcctgcacagcggcctgtggagagtgtgcttcctggccggcgaggagagaggcagatgcttcaccatcgagtacgtgatgcccatgaacacccagctgaccagcgagagcaccgtgaacgtgctgaagatgatcagaagcgccacccccttccccctggtgagcctgttcttcatgttcatcggcttcatcctgaacaacatcggccacatcagaccccacagaaccatcctggccttcgtgagcggcatcttcttcatcctgagcggcctgagcctggtggtgggcctggtgctgtacatcagcagcatcaacgacgagatgctgaacagaaccaaggacgccgagacctacttcaactacaagtacggctggagcttcgccttcgccgccatcagcttcctgctgaccgaggtgaagcccgtgaccctgagcatggacagactgggcctgggcaccgcccccctgagcagaggcgagtggggctggggcagaagagacatcccccagcccttctggacccccgaccaccccctgtacttccccagcagcagccagaacgtgagcctgagctacctgagcggcagcccccccgccagaatgagccccggcccctgcagctgcccccacgtgcacttccccccccacagcagctgcgtgctgtgcagaccccagcccagagagatgagacaggcccccgccgccagccccagcagcgccgtgttcagcctgtag

SEQ ID NO: 75009 - DNA, 828 bp, synthetic construct
  misc_feature 1..828: note = Description of Artificial Sequence: Synthetic coding sequence
  source 1..828: mol_type = other DNA
atgagcgcctgcggcagaaaggccctgaccctgctgagcagcgtgttcgccgtgtgcggcctgggcctgctgggcatcgccgtgagcaccgactactggctgtacctggaggagggcgtgatcgtgccccagaaccagagcaccgagatcaagatgagcctgcacagcggcctgtggagagtgtgcttcctggccggcgaggagagaggcagatgcttcaccatcgagtacgtgatgcccatgaacacccagctgaccagcgagagcaccgtgaacgtgctgaagatgatcagaagcgccacccccttccccctggtgagcctgttcttcatgttcatcggcttcatcctgaacaacatcggccacatcagaccccacagaaccatcctggccttcgtgagcggcatcttcttcatcctgagcggcctgagcctggtggtgggcctggtgctgtacatcagcagcatcaacgacgagatgctgaacagaaccaaggacgccgagacctacttcaactacaagtacggctggagcttcgccttcgccgccatcagcttcctgctgaccgagagcgccggcgtgatgagcgtgtacctgttcatgaagagatacaccgccgaggacatgtacagaccccaccccggcttctacagacccagactgagcaactgcagcgactacagcggccagttcctgcaccccgacgcctgggtgagaggcagaagccccagcgacatcagcagcgaggccagcctgcagatgaacagcaactaccccgccctgctgaagtgccccgactacgaccagatgagcagcagcccctgctag

SEQ ID NO: 75010 - DNA, 828 bp, synthetic construct; identical to SEQ ID NO: 75009
  misc_feature 1..828: note = Description of Artificial Sequence: Synthetic coding sequence
  source 1..828: mol_type = other DNA

SEQ ID NO: 75011 - DNA, 783 bp, synthetic construct
  misc_feature 1..783: note = Description of Artificial Sequence: Synthetic coding sequence
  source 1..783: mol_type = other DNA
atgatgtggagcaacttcttcctgcaggaggagaacagaagaagaggcgccgccggcagaagaagagcccacggccagggcagaagcggcctgacccccgagagagagggcaaggtgaagctggccctgctgctggccgccgtgggcgccaccctggccgtgctgagcgtgggcaccgagttctgggtggagctgaacacctacaaggccaacggcagcgccgtgtgcgaggccgcccacctgggcctgtggaaggcctgcaccaagagactgtggcaggccgacgtgcccgtggacagagacacctgcggccccgccgagctgcccggcgaggccaactgcacctacttcaagttcttcaccaccggcgagaacgccagaatcttccagagaaccaccaagaaggaggtgaacctggccgccgccgtgatcgccgtgctgggcctggccgtgatggccctgggctgcctgtgcatcatcatggtgctgagcaagggcgccgagttcctgctgagagtgggcgccgtgtgcttcggcctgagcggcctgctgctgctggtgagcctggaggtgttcagacacagcgtgagagccctgctgcagagagtgagccccgagcccccccccgcccccagactgacctacgagtacagctggagcctgggctgcggcgtgggcgccggcctgatcctgctgctgggcgccggctgcttcctgctgctgaccctgcccagctggccctggggcagcctgtgccccaagagaggccacagagccacctag

SEQ ID NO: 75012 - DNA, 645 bp, synthetic construct
  misc_feature 1..645: note = Description of Artificial Sequence: Synthetic coding sequence
  source 1..645: mol_type = other DNA
atgatgtggagcaacttcttcctgcaggaggagaacagaagaagaggcgccgccggcagaagaagagcccacggccagggcagaagcggcctgacccccgagagagagggcaaggtgaagctggccctgctgctggccgccgtgggcgccaccctggccgtgctgagcgtgggcaccgagttctgggtggagctgaacacctacaaggccaacggcagcgccgtgtgcgaggccgcccacctgggcctgtggaaggcctgcaccaagagactgtggcaggccgacgtgcccgtggacagagacacctgcggccccgccgagctgcccggcgaggccaactgcacctacttcaagttcttcaccaccggcgagaacgccagaatcttccagagaaccaccaagaagggcctgctgctgctggtgagcctggaggtgttcagacacagcgtgagagccctgctgcagagagtgagccccgagcccccccccgcccccagactgacctacgagtacagctggagcctgggctgcggcgtgggcgccggcctgatcctgctgctgggcgccggctgcttcctgctgctgaccctgcccagctggccctggggcagcctgtgccccaagagaggccacagagccacctag

SEQ ID NO: 75013 - DNA, 570 bp, synthetic construct
  misc_feature 1..570: note = Description of Artificial Sequence: Synthetic coding sequence
  source 1..570: mol_type = other DNA
atgatgtggagcaacttcttcctgcaggaggagaacagaagaagaggcgccgccggcagaagaagagcccacggccagggcagaagcggcctgacccccgagagagagggcaaggtgaagctggccctgctgctggccgccgtgggcgccaccctggccgtgctgagcgtgggcaccgagttctgggtggagctgaacacctacaaggccaacggcagcgccgtgtgcgaggccgcccacctgggcctgtggaaggcctgcaccaagagactgtggcaggccgacgtgcccgtggacagagacacctgcggccccgccgagctgcccggcggcctgctgctgctggtgagcctggaggtgttcagacacagcgtgagagccctgctgcagagagtgagccccgagcccccccccgcccccagactgacctacgagtacagctggagcctgggctgcggcgtgggcgccggcctgatcctgctgctgggcgccggctgcttcctgctgctgaccctgcccagctggccctggggcagcctgtgccccaagagaggccacagagccacctag

SEQ ID NO: 75014 - DNA, 321 bp, synthetic construct
  misc_feature 1..321: note = Description of Artificial Sequence: Synthetic coding sequence
  source 1..321: mol_type = other DNA
atgagcaccaacaacatgagcgaccccagaagacccaacaaggtgctgagatacaagcccccccccagcgagtgcaaccccgccctggacgaccccacccccgactacatgaacctgctgggcatgatcttcagcatgtgcggcctgatgctgaagctgaagtggtgcgcctgggtggccgtgtactgcagcttcatcagcttcgccaacagcagaagcagcgaggacaccaagcagatgatgagcagcttcatgctgagcatcagcgccgtggtgatgagctacctgcagaacccccagcccatgacccccccctggtag

SEQ ID NO: 75015 - DNA, 828 bp, synthetic construct
  misc_feature 1..828: note = Description of Artificial Sequence: Synthetic coding sequence
  source 1..828: mol_type = other DNA
atgagccactgcagcagcagagccctgaccctgctgagcagcgtgttcggcgcctgcggcctgctgctggtgggcatcgccgtgagcaccgactactggctgtacatggaggagggcaccgtgctgccccagaaccagaccaccgaggtgaagatggccctgcacgccggcctgtggagagtgtgcttcttcgccggcagagagaagggcagatgcgtggccagcgagtacttcctggagcccgagatcaacctggtgaccgagaacaccgagaacatcctgaagaccgtgagaaccgccacccccttccccatggtgagcctgttcctggtgttcaccgccttcgtgatcagcaacatcggccacatcagaccccagagaaccatcctggccttcgtgagcggcatcttcttcatcctgagcggcctgagcctggtggtgggcctggtgctgtacatcagcagcatcaacgacgaggtgatgaacagacccagcagcagcgagcagtacttccactacagatacggctggagcttcgccttcgccgccagcagcttcctgctgaaggagggcgccggcgtgatgagcgtgtacctgttcaccaagagatacgccgaggaggagatgtacagaccccaccccgccttctacagacccagactgagcgactgcagcgactacagcggccagttcctgcagcccgaggcctggagaagaggcagaagccccagcgacatcagcagcgacgtgagcatccagatgacccagaactacccccccgccatcaagtaccccgaccacctgcacatcagcaccagcccctgctag

SEQ ID NO: 75016 - DNA, 1278 bp, synthetic construct
  misc_feature 1..1278: note = Description of Artificial Sequence: Synthetic coding sequence
  source 1..1278: mol_type = other DNA
ctggagagcctgaagagatggaacgaggagagaggcctgtggtgcgagaagggcgtgcaggtgctgctgaccaccgtgggcgccttcgccgccttcggcctgatgaccatcgccatcagcaccgactactggctgtacaccagagccctgatctgcaacaccaccaacctgaccgccggcggcgacgacggcaccccccacagaggcggcggcggcgccagcgagaagaaggaccccggcggcctgacccacagcggcctgtggagaatctgctgcctggagggcctgaagagaggcgtgtgcgtgaagatcaaccacttccccgaggacaccgactacgaccacgacagcgccgagtacctgctgagagtggtgagagccagcagcatcttccccatcctgagcgccatcctgctgctgctgggcggcgtgtgcgtggccgccagcagagtgtacaagagcaagagaaacatcatcctgggcgccggcatcctgttcgtggccgccggcctgagcaacatcatcggcgtgatcgtgtacatcagcgccaacgccggcgagcccggccccaagagagacgaggagaagaagaaccactacagctacggctggagcttctacttcggcggcctgagcttcatcctggccgaggtgatcggcgtgctggccgtgaacatctacatcgagagaagcagagaggcccactgccagagcagaagcgacctgctgaaggccggcggcggcgccggcggcagcggcggcagcggccccagcgccatcctgagactgcccagctacagattcagatacagaagaagaagcagaagcagcagcagaagcagcgagcccagccccagcagagacgccagccccggcggccccggcggccccggcttcgccagcaccgacatcagcatgtacaccctgagcagagaccccagcaagggcagcgtggccgccggcctggccggcgccggcggcggcggcggcggcgccgtgggcgccttcggcggcgccgccggcggcgccggcggcggcggcggcggcggcggcggcgccggcgccgagagagacagaggcggcgccagcggcttcctgaccctgcacaacgccttccccaaggaggccggcggcggcgtgaccgtgaccgtgaccggcccccccgccccccccgcccccgccccccccgcccccagcgcccccgcccccggcaccctggccaaggaggccgccgccagcaacaccaacaccctgaacagaaagaccacccccgtgtag

SEQ ID NO: 75017 - DNA, 6540 bp, synthetic construct
  misc_feature 1..6540: note = Description of Artificial Sequence: Synthetic coding sequence
  source 1..6540: mol_type = other DNA
atggtgaacgagaacaccagaatgtacatccccgaggagaaccaccagggcagcaactacggcagccccagacccgcccacgccaacatgaacgccaacgccgccgccggcctggcccccgagcacatccccacccccggcgccgccctgagctggcaggccgccatcgacgccgccagacaggccaagctgatgggcagcgccggcaacgccaccatcagcaccgtgagcagcacccagagaaagagacagcagtacggcaagcccaagaagcagggcagcaccaccgccaccagaccccccagagccctgctgtgcctgaccctgaagaaccccatcagaagagcctgcatcagcatcgtggagtggaagcccttcgagatcatcatcctgctgaccatcttcgccaactgcgtggccctggccatctacatccccttccccgaggacgacagcaacgccaccaacagcaacctggagagagtggagtacctgttcctgatcatcttcaccgtggaggccttcctgaaggtgatcgcctacggcctgctgttccaccccaacgcctacctgagaaacggctggaacctgctggacttcatcatcgtggtggtgggcctgttcagcgccatcctggagcaggccaccaaggccgacggcgccaacgccctgggcggcaagggcgccggcttcgacgtgaaggccctgagagccttcagagtgctgagacccctgagactggtgagcggcgtgcccagcctgcaggtggtgctgaacagcatcatcaaggccatggtgcccctgctgcacatcgccctgctggtgctgttcgtgatcatcatctacgccatcatcggcctggagctgttcatgggcaagatgcacaagacctgctacaaccaggagggcatcgccgacgtgcccgccgaggacgaccccagcccctgcgccctggagaccggccacggcagacagtgccagaacggcaccgtgtgcaagcccggctgggacggccccaagcacggcatcaccaacttcgacaacttcgccttcgccatgctgaccgtgttccagtgcatcaccatggagggctggaccgacgtgctgtactgggtgaacgacgccgtgggcagagactggccctggatctacttcgtgaccctgatcatcatcggcagcttcttcgtgctgaacctggtgctgggcgtgctgagcggcgagttcagcaaggagagagagaaggccaaggccagaggcgacttccagaagctgagagagaagcagcagctggaggaggacctgaagggctacctggactggatcacccaggccgaggacatcgaccccgagaacgaggacgagggcatggacgaggagaagcccagaaacatgagcatgcccaccagcgagaccgagagcgtgaacaccgagaacgtggccggcggcgacatcgagggcgagaactgcggcgccagactggcccacagaatcagcaagagcaagttcagcagatactggagaagatggaacagattctgcagaagaaagtgcagagccgccgtgaagagcaacgtgttctactggctggtgatcttcctggtgttcctgaacaccctgaccatcgccagcgagcactacaaccagcccaactggctgaccgaggtgcaggacaccgccaacaaggccctgctggccctgttcaccgccgagatgctgctgaagatgtacagcctgggcctgcaggcctacttcgtgagcctgttcaacagattcgactgcttcgtggtgtgcggcggcatcctggagaccatcctggtggagaccaagatcatgagccccctgggcatcagcgtgctgagatgcgtgagactgctgagaatcttcaagatcaccagatactggaacagcctgagcaacctggtggccagcctgctgaacagcgtgagaagcatcgccagcctgctgctgctgctgttcctgttcatcatcatcttcagcctgctgggcatgcagctgttcggcggcaagttcaacttcgacgagatgcagaccagaagaagcaccttcgacaacttcccccagagcctgctgaccgtgttccagatcctgaccggcgaggactggaacagcgtgatgtacgacggcatcatggcctacggcggccccagcttccccggcatgctggtgtgcatctacttcatcatcctgttcatctgcggcaactacatcctgctgaacgtgttcctggccatcgccgtggacaacctggccgacgccgagagcctgaccagcgcccagaaggaggaggaggaggagaaggagagaaagaagctggccagaaccgccagccccgagaagaagcaggagctggtggagaagcccgccgtgggcgagagcaaggaggagaagatcgagctgaagagcatcaccgccgacggcgagagcccccccgccaccaagatcaacatggacgacctgcagcccaacgagaacgaggacaagagcccctaccccaaccccgagaccaccggcgaggaggacgaggaggagcccgagatgcccgtgggccccagacccagacccctgagcgagctgcacctgaaggagaaggccgtgcccatgcccgaggccagcgccttcttcatcttcagcagcaacaacagattcagactgcagtgccacagaatcgtgaacgacaccatcttcaccaacctgatcctgttcttcatcctgctgagcagcatcagcctggccgccgaggaccccgtgcagcacaccagcttcagaaaccacatcctgttctacttcgacatcgtgttcaccaccatcttcaccatcgagatcgccctgaagatgaccgcctacggcgccttcctgcacaagggcagcttctgcagaaactacttcaacatcctggacctgctggtggtgagcgtgagcctgatcagcttcggcatccagagcagcgccatcaacgtggtgaagatcctgagagtgctgagagtgctgagacccctgagagccatcaacagagccaagggcctgaagcacgtggtgcagtgcgtgttcgtggccatcagaaccatcggcaacatcgtgatcgtgaccaccctgctgcagttcatgttcgcctgcatcggcgtgcagctgttcaagggcaagctgtacacctgcagcgacagcagcaagcagaccgaggccgagtgcaagggcaactacatcacctacaaggacggcgaggtggaccaccccatcatccagcccagaagctgggagaacagcaagttcgacttcgacaacgtgctggccgccatgatggccctgttcaccgtgagcaccttcgagggctggcccgagctgctgtacagaagcatcgacagccacaccgaggacaagggccccatctacaactacagagtggagatcagcatcttcttcatcatctacatcatcatcatcgccttcttcatgatgaacatcttcgtgggcttcgtgatcgtgaccttccaggagcagggcgagcaggagtacaagaactgcgagctggacaagaaccagagacagtgcgtggagtacgccctgaaggccagacccctgagaagatacatccccaagaaccagcaccagtacaaggtgtggtacgtggtgaacagcacctacttcgagtacctgatgttcgtgctgatcctgctgaacaccatctgcctggccatgcagcactacggccagagctgcctgttcaagatcgccatgaacatcctgaacatgctgttcaccggcctgttcaccgtggagatgatcctgaagctgatcgccttcaagcccaagcactacttctgcgacgcctggaacaccttcgacgccctgatcgtggtgggcagcatcgtggacatcgccatcaccgaggtgaaccccgccgagcacacccagtgcagccccagcatgggccccagctgcagccacccccccctggccgtgctgaccgccccccccgtggccgacggcttccagaacgccgaggagaacagcagaatcagcatcaccttcttcagactgttcagagtgatgagactggtgaagctgctgagcagaggcgagggcatcagaaccctgctgtggaccttcatcaagagcttccaggccctgccctacgtggccctgctgatcgtgatgctgttcttcatctacgccgtgatcggcatgcaggtgttcggcaagatcgccctgaacgacaccaccgagatcaacagaaacaacaacttccagaccttcccccaggccgtgctgctgctgttcagatgcgccaccggcgaggcctggcaggacatcatgctggcctgcatgcccggcaagaagtgcgcccccgagagcgagcccagcaacagcaccgagggcgagaccccctgcggcagcagcttcgccgtgttctacttcatcagcttctacatgctgtgcgccttcctgatcatcaacctgttcgtggccgtgatcatggacaacttcgactacctgaccagagactggagcatcctgggcccccaccacctggacgagttcaagagaatctgggccgagtacgaccccgaggccaagggcagaatcaagcacctggacgtggtgaccctgctgagaagaatccagccccccctgggcttcggcaagctgtgcccccacagagtggcctgcaagagactggtgagcatgaacatgcccctgaacagcgacggcaccgtgatgttcaacgccaccctgttcgccctggtgagaaccgccctgagaatcaagaccgaggagggccccagccccagcgaggcccaccagggcgccgaggaccccttcagacccgccggcaacctggagcaggccaacgaggagctgagagccatcatcaagaagatctggaagagaaccagcatgaagctgctggaccaggtggtgccccccgccggcgacgacgaggtgaccgtgggcaagttctacgccaccttcctgatccaggagtacttcagaaagttcaagaagagaaaggagcagggcctggtgggcaagcccagccagagaaacgccctgagcctgcaggccggcctgagaaccctgcacgacatcggccccgagatcagaagagccatcagcggcgacctgaccgccgaggaggagctggacaaggccatgaaggaggccgtgagcgccgccagcgaggacgacatcttcagaagagccggcggcctgttcggcaaccacgtgagctactaccagagcgacggcagaagcgccttcccccagaccttcaccacccagagacccctgcacatcaacaaggccggcagcagccagggcgacaccgagagccccagccacgagaagctggtggacagcaccttcacccccagcagctacagcagcaccggcagcaacgccaacatcaacaacgccaacaacaccgccctgggcagactgcccagacccgccggctaccccagcaccgtgagcaccgtggagggccacggcccccccctgagccccgccatcagagtgcaggaggtggcctggaagctgagcagcaacagatgccacagcagagagagccaggccgccatggccggccaggaggagaccagccaggacgagacctacgaggtgaagatgaaccacgacaccgaggcctgcagcgagcccagcctgctgagcaccgagatgctgagctaccaggacgacgagaacagacagctgaccctgcccgaggaggacaagagagacatcagacagagccccaagagaggcttcctgagaagcgccagcctgggcagaagagccagcttccacctggagtgcctgaagagacagaaggacagaggcggcgacatcagccagaagaccgtgctgcccctgcacctggtgcaccaccaggccctggccgtggccggcctgagccccctgctgcagagaagccacagccccgccagcttccccagacccttcgccaccccccccgccacccccggcagcagaggctggcccccccagcccgtgcccaccctgagactggagggcgtggagagcagcgagaagctgaacagcagcttccccagcatccactgcggcagctgggccgagaccacccccggcggcggcggcagcagcgccgccagaagagtgagacccgtgagcctgatggtgcccagccaggccggcgcccccggcagacagttccacggcagcgccagcagcctggtggaggccgtgctgatcagcgagggcctgggccagttcgcccaggaccccaagttcatcgaggtgaccacccaggagctggccgacgcctgcgacatgaccatcgaggagatggagagcgccgccgacaacatcctgagcggcggcgccccccagagccccaacggcgccctgctgcccttcgtgaactgcagagacgccggccaggacagagccggcggcgaggaggacgccggctgcgtgagagccagaggcagacccagcgaggaggagctgcaggacagcagagtgtacgtgagcagcctgtag

SEQ ID NO: 75018 - DNA, 6561 bp, synthetic construct
  misc_feature 1..6561: note = Description of Artificial Sequence: Synthetic coding sequence
  source 1..6561: mol_type = other DNA
atggtgaacgagaacaccagaatgtacatccccgaggagaaccaccagggcagcaactacggcagccccagacccgcccacgccaacatgaacgccaacgccgccgccggcctggcccccgagcacatccccacccccggcgccgccctgagctggcaggccgccatcgacgccgccagacaggccaagctgatgggcagcgccggcaacgccaccatcagcaccgtgagcagcacccagagaaagagacagcagtacggcaagcccaagaagcagggcagcaccaccgccaccagaccccccagagccctgctgtgcctgaccctgaagaaccccatcagaagagcctgcatcagcatcgtggagtggaagcccttcgagatcatcatcctgctgaccatcttcgccaactgcgtggccctggccatctacatccccttccccgaggacgacagcaacgccaccaacagcaacctggagagagtggagtacctgttcctgatcatcttcaccgtggaggccttcctgaaggtgatcgcctacggcctgctgttccaccccaacgcctacctgagaaacggctggaacctgctggacttcatcatcgtggtggtgggcctgttcagcgccatcctggagcaggccaccaaggccgacggcgccaacgccctgggcggcaagggcgccggcttcgacgtgaaggccctgagagccttcagagtgctgagacccctgagactggtgagcggcgtgcccagcctgcaggtggtgctgaacagcatcatcaaggccatggtgcccctgctgcacatcgccctgctggtgctgttcgtgatcatcatctacgccatcatcggcctggagctgttcatgggcaagatgcacaagacctgctacaaccaggagggcatcgccgacgtgcccgccgaggacgaccccagcccctgcgccctggagaccggccacggcagacagtgccagaacggcaccgtgtgcaagcccggctgggacggccccaagcacggcatcaccaacttcgacaacttcgccttcgccatgctgaccgtgttccagtgcatcaccatggagggctggaccgacgtgctgtactgggtgaacgacgccgtgggcagagactggccctggatctacttcgtgaccctgatcatcatcggcagcttcttcgtgctgaacctggtgctgggcgtgctgagcggcgagttcagcaaggagagagagaaggccaaggccagaggcgacttccagaagctgagagagaagcagcagctggaggaggacctgaagggctacctggactggatcacccaggccgaggacatcgaccccgagaacgaggacgagggcatggacgaggagaagcccagaaacatgagcatgcccaccagcgagaccgagagcgtgaacaccgagaacgtggccggcggcgacatcgagggcgagaactgcggcgccagactggcccacagaatcagcaagagcaagttcagcagatactggagaagatggaacagattctgcagaagaaagtgcagagccgccgtgaagagcaacgtgttctactggctggtgatcttcctggtgttcctgaacaccctgaccatcgccagcgagcactacaaccagcccaactggctgaccgaggtgcaggacaccgccaacaaggccctgctggccctgttcaccgccgagatgctgctgaagatgtacagcctgggcctgcaggcctacttcgtgagcctgttcaacagattcgactgcttcgtggtgtgcggcggcatcctggagaccatcctggtggagaccaagatcatgagccccctgggcatcagcgtgctgagatgcgtgagactgctgagaatcttcaagatcaccagatactggaacagcctgagcaacctggtggccagcctgctgaacagcgtgagaagcatcgccagcctgctgctgctgctgttcctgttcatcatcatcttcagcctgctgggcatgcagctgttcggcggcaagttcaacttcgacgagatgcagaccagaagaagcaccttcgacaacttcccccagagcctgctgaccgtgttccagatcctgaccggcgaggactggaacagcgtgatgtacgacggcatcatggcctacggcggccccagcttccccggcatgctggtgtgcatctacttcatcatcctgttcatctgcggcaactacatcctgctgaacgtgttcctggccatcgccgtggacaacctggccgacgccgagagcctgaccagcgcccagaaggaggaggaggaggagaaggagagaaagaagctggccagaaccgccagccccgagaagaagcaggagctggtggagaagcccgccgtgggcgagagcaaggaggagaagatcgagctgaagagcatcaccgccgacggcgagagcccccccgccaccaagatcaacatggacgacctgcagcccaacgagaacgaggacaagagcccctaccccaaccccgagaccaccggcgaggaggacgaggaggagcccgagatgcccgtgggccccagacccagacccctgagcgagctgcacctgaaggagaaggccgtgcccatgcccgaggccagcgccttcttcatcttcagcagcaacaacagattcagactgcagtgccacagaatcgtgaacgacaccatcttcaccaacctgatcctgttcttcatcctgctgagcagcatcagcctggccgccgaggaccccgtgcagcacaccagcttcagaaaccacatcctgttctacttcgacatcgtgttcaccaccatcttcaccatcgagatcgccctgaagatcctgggcaacgccgactacgtgttcaccagcatcttcaccctggagatcatcctgaagatgaccgcctacggcgccttcctgcacaagggcagcttctgcagaaactacttcaacatcctggacctgctggtggtgagcgtgagcctgatcagcttcggcatccagagcagcgccatcaacgtggtgaagatcctgagagtgctgagagtgctgagacccctgagagccatcaacagagccaagggcctgaagcacgtggtgcagtgcgtgttcgtggccatcagaaccatcggcaacatcgtgatcgtgaccaccctgctgcagttcatgttcgcctgcatcggcgtgcagctgttcaagggcaagctgtacacctgcagcgacagcagcaagcagaccgaggccgagtgcaagggcaactacatcacctacaaggacggcgaggtggaccaccccatcatccagcccagaagctgggagaacagcaagttcgacttcgacaacgtgctggccgccatgatggccctgttcaccgtgagcaccttcgagggctggcccgagctgctgtacagaagcatcgacagccacaccgaggacaagggccccatctacaactacagagtggagatcagcatcttcttcatcatctacatcatcatcatcgccttcttcatgatgaacatcttcgtgggcttcgtgatcgtgaccttccaggagcagggcgagcaggagtacaagaactgcgagctggacaagaaccagagacagtgcgtggagtacgccctgaaggccagacccctgagaagatacatccccaagaaccagcaccagtacaaggtgtggtacgtggtgaacagcacctacttcgagtacctgatgttcgtgctgatcctgctgaacaccatctgcctggccatgcagcactacggccagagctgcctgttcaagatcgccatgaacatcctgaacatgctgttcaccggcctgttcaccgtggagatgatcctgaagctgatcgccttcaagcccaagggctacttcagcgacccctggaacgtgttcgacttcctgatcgtgatcggcagcatcatcgacgtgatcctgagcgagaccaaccactacttctgcgacgcctggaacaccttcgacgccctgatcgtggtgggcagcatcgtggacatcgccatcaccgaggtgaaccccgccgagcacacccagtgcagccccagcatgaacgccgaggagaacagcagaatcagcatcaccttcttcagactgttcagagtgatgagactggtgaagctgctgagcagaggcgagggcatcagaaccctgctgtggaccttcatcaagagcttccaggccctgccctacgtggccctgctgatcgtgatgctgttcttcatctacgccgtgatcggcatgcaggtgttcggcaagatcgccctgaacgacaccaccgagatcaacagaaacaacaacttccagaccttcccccaggccgtgctgctgctgttcagatgcgccaccggcgaggcctggcaggacatcatgctggcctgcatgcccggcaagaagtgcgcccccgagagcgagcccagcaacagcaccgagggcgagaccccctgcggcagcagcttcgccgtgttctacttcatcagcttctacatgctgtgcgccttcctgatcatcaacctgttcgtggccgtgatcatggacaacttcgactacctgaccagagactggagcatcctgggcccccaccacctggacgagttcaagagaatctgggccgagtacgaccccgaggccaagggcagaatcaagcacctggacgtggtgaccctgctgagaagaatccagccccccctgggcttcggcaagctgtgcccccacagagtggcctgcaagagactggtgagcatgaacatgcccctgaacagcgacggcaccgtgatgttcaacgccaccctgttcgccctggtgagaaccgccctgagaatcaagaccgagggcaacctggagcaggccaacgaggagctgagagccatcatcaagaagatctggaagagaaccagcatgaagctgctggaccaggtggtgccccccgccggcgacgacgaggtgaccgtgggcaagttctacgccaccttcctgatccaggagtacttcagaaagttcaagaagagaaaggagcagggcctggtgggcaagcccagccagagaaacgccctgagcctgcaggccggcctgagaaccctgcacgacatcggccccgagatcagaagagccatcagcggcgacctgaccgccgaggaggagctggacaaggccatgaaggaggccgtgagcgccgccagcgaggacgacatcttcagaagagccggcggcctgttcggcaaccacgtgagctactaccagagcgacggcagaagcgccttcccccagaccttcaccacccagagacccctgcacatcaacaaggccggcagcagccagggcgacaccgagagccccagccacgagaagctggtggacagcaccttcacccccagcagctacagcagcaccggcagcaacgccaacatcaacaacgccaacaacaccgccctgggcagactgcccagacccgccggctaccccagcaccgtgagcaccgtggagggccacggcccccccctgagccccgccatcagagtgcaggaggtggcctggaagctgagcagcaacagatgccacagcagagagagccaggccgccatggccggccaggaggagaccagccaggacgagacctacgaggtgaagatgaaccacgacaccgaggcctgcagcgagcccagcctgctgagcaccgagatgctgagctaccaggacgacgagaacagacagctgaccctgcccgaggaggacaagagagacatcagacagagccccaagagaggcttcctgagaagcgccagcctgggcagaagagccagcttccacctggagtgcctgaagagacagaaggacagaggcggcgacatcagccagaagaccgtgctgcccctgcacctggtgcaccaccaggccctggccgtggccggcctgagccccctgctgcagagaagccacagccccgccagcttccccagacccttcgccaccccccccgccacccccggcagcagaggctggcccccccagcccgtgcccaccctgagactggagggcgtggagagcagcgagaagctgaacagcagcttccccagcatccactgcggcagctgggccgagaccacccccggcggcggcggcagcagcgccgccagaagagtgagacccgtgagcctgatggtgcccagccaggccggcgcccccggcagacagttccacggcagcgccagcagcctggtggaggccgtgctgatcagcgagggcctgggccagttcgcccaggaccccaagttcatcgaggtgaccacccaggagctggccgacgcctgcgacatgaccatcgaggagatggagagcgccgccgacaacatcctgagcggcggcgccccccagagccccaacggcgccctgctgcccttcgtgaactgcagagacgccggccaggacagagccggcggcgaggaggacgccggctgcgtgagagccagaggcagacccagcgaggaggagctgcaggacagcagagtgtacgtgagcagcctgtag

SEQ ID NO: 75019 - DNA, 6441 bp, synthetic construct
  misc_feature 1..6441: note = Description of Artificial Sequence: Synthetic coding sequence
  source 1..6441: mol_type = other DNA
atggtgaacgagaacaccagaatgtacatccccgaggagaaccaccagggcagcaactacggcagccccagacccgcccacgccaacatgaacgccaacgccgccgccggcctggcccccgagcacatccccacccccggcgccgccctgagctggcaggccgccatcgacgccgccagacaggccaagctgatgggcagcgccggcaacgccaccatcagcaccgtgagcagcacccagagaaagagacagcagtacggcaagcccaagaagcagggcagcaccaccgccaccagaccccccagagccctgctgtgcctgaccctgaagaaccccatcagaagagcctgcatcagcatcgtggagtggaagcccttcgagatcatcatcctgctgaccatcttcgccaactgcgtggccctggccatctacatccccttccccgaggacgacagcaacgccaccaacagcaacctggagagagtggagtacctgttcctgatcatcttcaccgtggaggccttcctgaaggtgatcgcctacggcctgctgttccaccccaacgcctacctgagaaacggctggaacctgctggacttcatcatcgtggtggtgggcctgttcagcgccatcctggagcaggccaccaaggccgacggcgccaacgccctgggcggcaagggcgccggcttcgacgtgaaggccctgagagccttcagagtgctgagacccctgagactggtgagcggcgtgcccagcctgcaggtggtgctgaacagcatcatcaaggccatggtgcccctgctgcacatcgccctgctggtgctgttcgtgatcatcatctacgccatcatcggcctggagctgttcatgggcaagatgcacaagacctgctacaaccaggagggcatcgccgacgtgcccgccgaggacgaccccagcccctgcgccctggagaccggccacggcagacagtgccagaacggcaccgtgtgcaagcccggctgggacggccccaagcacggcatcaccaacttcgacaacttcgccttcgccatgctgaccgtgttccagtgcatcaccatggagggctggaccgacgtgctgtactgggtgaacgacgccgtgggcagagactggccctggatctacttcgtgaccctgatcatcatcggcagcttcttcgtgctgaacctggtgctgggcgtgctgagcggcgagttcagcaaggagagagagaaggccaaggccagaggcgacttccagaagctgagagagaagcagcagctggaggaggacctgaagggctacctggactggatcacccaggccgaggacatcgaccccgagaacgaggacgagggcatggacgaggagaagcccagaaacatgagcatgcccaccagcgagaccgagagcgtgaacaccgagaacgtggccggcggcgacatcgagggcgagaactgcggcgccagactggcccacagaatcagcaagagcaagttcagcagatactggagaagatggaacagattctgcagaagaaagtgcagagccgccgtgaagagcaacgtgttctactggctggtgatcttcctggtgttcctgaacaccctgaccatcgccagcgagcactacaaccagcccaactggctgaccgaggtgcaggacaccgccaacaaggccctgctggccctgttcaccgccgagatgctgctgaagatgtacagcctgggcctgcaggcctacttcgtgagcctgttcaacagattcgactgcttcgtggtgtgcggcggcatcctggagaccatcctggtggagaccaagatcatgagccccctgggcatcagcgtgctgagatgcgtgagactgctgagaatcttcaagatcaccagatactggaacagcctgagcaacctggtggccagcctgctgaacagcgtgagaagcatcgccagcctgctgctgctgctgttcctgttcatcatcatcttcagcctgctgggcatgcagctgttcggcggcaagttcaacttcgacgagatgcagaccagaagaagcaccttcgacaacttcccccagagcctgctgaccgtgttccagatcctgaccggcgaggactggaacagcgtgatgtacgacggcatcatggcctacggcggccccagcttccccggcatgctggtgtgcatctacttcatcatcctgttcatctgcggcaactacatcctgctgaacgtgttcctggccatcgccgtggacaacctggccgacgccgagagcctgaccagcgcccagaaggaggaggaggaggagaaggagagaaagaagctggccagaaccgccagccccgagaagaagcaggagctggtggagaagcccgccgtgggcgagagcaaggaggagaagatcgagctgaagagcatcaccgccgacggcgagagcccccccgccaccaagatcaacatggacgacctgcagcccaacgagaacgaggacaagagcccctaccccaaccccgagaccaccggcgaggaggacgaggaggagcccgagatgcccgtgggccccagacccagacccctgagcgagctgcacctgaaggagaaggccgtgcccatgcccgaggccagcgccttcttcatcttcagcagcaacaacagattcagactgcagtgccacagaatcgtgaacgacaccatcttcaccaacctgatcctgttcttcatcctgctgagcagcatcagcctggccgccgaggaccccgtgcagcacaccagcttcagaaaccacatcctgggcaacgccgactacgtgttcaccagcatcttcaccctggagatcatcctgaagatgaccgcctacggcgccttcctgcacaagggcagcttctgcagaaactacttcaacatcctggacctgctggtggtgagcgtgagcctgatcagcttcggcatccagagcagcgccatcaacgtggtgaagatcctgagagtgctgagagtgctgagacccctgagagccatcaacagagccaagggcctgaagcacgtggtgcagtgcgtgttcgtggccatcagaaccatcggcaacatcgtgatcgtgaccaccctgctgcagttcatgttcgcctgcatcggcgtgcagctgttcaagggcaagctgtacacctgcagcgacagcagcaagcagaccgaggccgagtgcaagggcaactacatcacctacaaggacggcgaggtggaccaccccatcatccagcccagaagctgggagaacagcaagttcgacttcgacaacgtgctggccgccatgatggccctgttcaccgtgagcaccttcgagggctggcccgagctgctgtacagaagcatcgacagccacaccgaggacaagggccccatctacaactacagagtggagatcagcatcttcttcatcatctacatcatcatcatcgccttcttcatgatgaacatcttcgtgggcttcgtgatcgtgaccttccaggagcagggcgagcaggagtacaagaactgcgagctggacaagaaccagagacagtgcgtggagtacgccctgaaggccagacccctgagaagatacatccccaagaaccagcaccagtacaaggtgtggtacgtggtgaacagcacctacttcgagtacctgatgttcgtgctgatcctgctgaacaccatctgcctggccatgcagcactacggccagagctgcctgttcaagatcgccatgaacatcctgaacatgctgttcaccggcctgttcaccgtggagatgatcctgaagctgatcgccttcaagcccaagcactacttctgcgacgcctggaacaccttcgacgccctgatcgtggtgggcagcatcgtggacatcgccatcaccgaggtgaacaacgccgaggagaacagcagaatcagcatcaccttcttcagactgttcagagtgatgagactggtgaagctgctgagcagaggcgagggcatcagaaccctgctgtggaccttcatcaagagcttccaggccctgccctacgtggccctgctgatcgtgatgctgttcttcatctacgccgtgatcggcatgcaggtgttcggcaagatcgccctgaacgacaccaccgagatcaacagaaacaacaacttccagaccttcccccaggccgtgctgctgctgttcagatgcgccaccggcgaggcctggcaggacatcatgctggcctgcatgcccggcaagaagtgcgcccccgagagcgagcccagcaacagcaccgagggcgagaccccctgcggcagcagcttcgccgtgttctacttcatcagcttctacatgctgtgcgccttcctgatcatcaacctgttcgtggccgtgatcatggacaacttcgactacctgaccagagactggagcatcctgggcccccaccacctggacgagttcaagagaatctgggccgagtacgaccccgaggccaagggcagaatcaagcacctggacgtggtgaccctgctgagaagaatccagccccccctgggcttcggcaagctgtgcccccacagagtggcctgcaagagactggtgagcatgaacatgcccctgaacagcgacggcaccgtgatgttcaacgccaccctgttcgccctggtgagaaccgccctgagaatcaagaccgaggagggccccagccccagcgaggcccaccagggcgccgaggaccccttcagacccgccggcaacctggagcaggccaacgaggagctgagagccatcatcaagaagatctggaagagaaccagcatgaagctgctggaccaggtggtgccccccgccggcgacgacgaggtgaccgtgggcaagttctacgccaccttcctgatccaggagtacttcagaaagttcaagaagagaaaggagcagggcctggtgggcaagcccagccagagaaacgccctgagcctgcaggccggcctgagaaccctgcacgacatcggccccgagatcagaagagccatcagcggcgacctgaccgccgaggaggagctggacaaggccatgaaggaggccgtgagcgccgccagcgaggacgacatcttcagaagagccggcggcctgttcggcaaccacgtgagctactaccagagcgacggcagaagcgccttcccccagaccttcaccacccagagacccctgcacatcaacaaggccggcagcagccagggcgacaccgagagccccagccacgagaagctggtggacagcaccttcacccccagcagctacagcagcaccggcagcaacgccaacatcaacaacgccaacaacaccgccctgggcagactgcccagacccgccggctaccccagcaccgtgagcaccgtggagggccacggcccccccctgagccccgccatcagagtgcaggaggtggcctggaagctgagcagcaacagatgccacagcagagagagccaggccgccatggccggccaggaggagaccagccaggacgagacctacgaggtgaagatgaaccacgacaccgaggcctgcagcgagcccagcctgctgagcaccgagatgctgagctaccaggacgacgagaacagacagctgaccctgcccgaggaggacaagagagacatcagacagagccccaagagaggcttcctgagaagcgccagcctgggcagaagagccagcttccacctggagtgcctgaagagacagaaggacagaggcggcgacatcagccagaagaccgtgctgcccctgcacctggtgcaccaccaggccctggccgtggccggcctgagccccctgctgcagagaagccacagccccgccagcttccccagacccttcgccaccccccccgccacccccggcagcagaggctggcccccccagcccgtgcccaccctgagactggagggcgtggagagcagcgagaagctgaacagcagcttccccagcatccactgcggcagctgggccgagaccacccccggcggcggcggcagcagcgccgccagaagagtgagacccgtgagcctgatggtgcccagccaggccggcgcccccggcagacagttccacggcagcgccagcagcctggtggaggccgtgctgatcagcgagggcctgggccagttcgcccaggaccccaagttcatcgaggtgaccacccaggagctggccgacgcctgcgacatgaccatcgaggagatggagagcgccgccgacaacatcctgagcggcggcgccccccagagccccaacggcgccctgctgcccttcgtgaactgcagagacgccggccaggacagagccggcggcgaggaggacgccggctgcgtgagagccagaggcagacccagcgaggaggagctgcaggacagcagagtgtacgtgagcagcctgtag

SEQ ID NO: 75020 - DNA, 6441 bp, synthetic construct
  misc_feature 1..6441: note = Description of Artificial Sequence: Synthetic coding sequence
  source 1..6441: mol_type = other DNA
atggtgaacgagaacaccagaatgtacatccccgaggagaaccaccagggcagcaactacggcagccccagacccgcccacgccaacatgaacgccaacgccgccgccggcctggcccccgagcacatccccacccccggcgccgccctgagctggcaggccgccatcgacgccgccagacaggccaagctgatgggcagcgccggcaacgccaccatcagcaccgtgagcagcacccagagaaagagacagcagtacggcaagcccaagaagcagggcagcaccaccgccaccagaccccccagagccctgctgtgcctgaccctgaagaaccccatcagaagagcctgcatcagcatcgtggagtggaagcccttcgagatcatcatcctgctgaccatcttcgccaactgcgtggccctggccatctacatccccttccccgaggacgacagcaacgccaccaacagcaacctggagagagtggagtacctgttcctgatcatcttcaccgtggaggccttcctgaaggtgatcgcctacggcctgctgttccaccccaacgcctacctgagaaacggctggaacctgctggacttcatcatcgtggtggtgggcctgttcagcgccatcctggagcaggccaccaaggccgacggcgccaacgccctgggcggcaagggcgccggcttcgacgtgaaggccctgagagccttcagagtgctgagacccctgagactggtgagcggcgtgcccagcctgcaggtggtgctgaacagcatcatcaaggccatggtgcccctgctgcacatcgccctgctggtgctgttcgtgatcatcatctacgccatcatcggcctggagctgttcatgggcaagatgcacaagacctgctacaaccaggagggcatcgccgacgtgcccgccgaggacgaccccagcccctgcgccctggagaccggccacggcagacagtgccagaacggcaccgtgtgcaagcccggctgggacggccccaagcacggcatcaccaacttcgacaacttcgccttcgccatgctgaccgtgttccagtgcatcaccatggagggctggaccgacgtgctgtactgggtgaacgacgccgtgggcagagactggccctggatctacttcgtgaccctgatcatcatcggcagcttcttcgtgctgaacctggtgctgggcgtgctgagcggcgagttcagcaaggagagagagaaggccaaggccagaggcgacttccagaagctgagagagaagcagcagctggaggaggacctgaagggctacctggactggatcacccaggccgaggacatcgaccccgagaacgaggacgagggcatggacgaggagaagcccagaaacatgagcatgcccaccagcgagaccgagagcgtgaacaccgagaacgtggccggcggcgacatcgagggcgagaactgcggcgccagactggcccacagaatcagcaagagcaagttcagcagatactggagaagatggaacagattctgcagaagaaagtgcagagccgccgtgaagagcaacgtgttctactggctggtgatcttcctggtgttcctgaacaccctgaccatcgccagcgagcactacaaccagcccaactggctgaccgaggtgcaggacaccgccaacaaggccctgctggccctgttcaccgccgagatgctgctgaagatgtacagcctgggcctgcaggcctacttcgtgagcctgttcaacagattcgactgcttcgtggtgtgcggcggcatcctggagaccatcctggtggagaccaagatcatgagccccctgggcatcagcgtgctgagatgcgtgagactgctgagaatcttcaagatcaccagatactggaacagcctgagcaacctggtggccagcctgctgaacagcgtgagaagcatcgccagcctgctgctgctgctgttcctgttcatcatcatcttcagcctgctgggcatgcagctgttcggcggcaagttcaacttcgacgagatgcagaccagaagaagcaccttcgacaacttcccccagagcctgctgaccgtgttccagatcctgaccggcgaggactggaacagcgtgatgtacgacggcatcatggcctacggcggccccagcttccccggcatgctggtgtgcatctacttcatcatcctgttcatctgcggcaactacatcctgctgaacgtgttcctggccatcgccgtggacaacctggccgacgccgagagcctgaccagcgcccagaaggaggaggaggaggagaaggagagaaagaagctggccagaaccgccagccccgagaagaagcaggagctggtggagaagcccgccgtgggcgagagcaaggaggagaagatcgagctgaagagcatcaccgccgacggcgagagcccccccgccaccaagatcaacatggacgacctgcagcccaacgagaacgaggacaagagcccctaccccaaccccgagaccaccggcgaggaggacgaggaggagcccgagatgcccgtgggccccagacccagacccctgagcgagctgcacctgaaggagaaggccgtgcccatgcccgaggccagcgccttcttcatcttcagcagcaacaacagattcagactgcagtgccacagaatcgtgaacgacaccatcttcaccaacctgatcctgttcttcatcctgctgagcagcatcagcctggccgccgaggaccccgtgcagcacaccagcttcagaaaccacatcctgttctacttcgacatcgtgttcaccaccatcttcaccatcgagatcgccctgaagatgaccgcctacggcgccttcctgcacaagggcagcttctgcagaaactacttcaacatcctggacctgctggtggtgagcgtgagcctgatcagcttcggcatccagagcagcgccatcaacgtggtgaagatcctgagagtgctgagagtgctgagacccctgagagccatcaacagagccaagggcctgaagcacgtggtgcagtgcgtgttcgtggccatcagaaccatcggcaacatcgtgatcgtgaccaccctgctgcagttcatgttcgcctgcatcggcgtgcagctgttcaagggcaagctgtacacctgcagcgacagcagcaagcagaccgaggccgagtgcaagggcaactacatcacctacaaggacggcgaggtggaccaccccatcatccagcccagaagctgggagaacagcaagttcgacttcgacaacgtgctggccgccatgatggccctgttcaccgtgagcaccttcgagggctggcccgagctgctgtacagaagcatcgacagccacaccgaggacaagggccccatctacaactacagagtggagatcagcatcttcttcatcatctacatcatcatcatcgccttcttcatgatgaacatcttcgtgggcttcgtgatcgtgaccttccaggagcagggcgagcaggagtacaagaactgcgagctggacaagaaccagagacagtgcgtggagtacgccctgaaggccagacccctgagaagatacatccccaagaaccagcaccagtacaaggtgtggtacgtggtgaacagcacctacttcgagtacctgatgttcgtgctgatcctgctgaacaccatctgcctggccatgcagcactacggccagagctgcctgttcaagatcgccatgaacatcctgaacatgctgttcaccggcctgttcaccgtggagatgatcctgaagctgatcgccttcaagcccaagcactacttctgcgacgcctggaacaccttcgacgccctgatcgtggtgggcagcatcgtggacatcgccatcaccgaggtgaacaacgccgaggagaacagcagaatcagcatcaccttcttcagactgttcagagtgatgagactggtgaagctgctgagcagaggcgagggcatcagaaccctgctgtggaccttcatcaagagcttccaggccctgccctacgtggccctgctgatcgtgatgctgttcttcatctacgccgtgatcggcatgcaggtgttcggcaagatcgccctgaacgacaccaccgagatcaacagaaacaacaacttccagaccttcccccaggccgtgctgctgctgttcagatgcgccaccggcgaggcctggcaggacatcatgctggcctgcatgcccggcaagaagtgcgcccccgagagcgagcccagcaacagcaccgagggcgagaccccctgcggcagcagcttcgccgtgttctacttcatcagcttctacatgctgtgcgccttcctgatcatcaacctgttcgtggccgtgatcatggacaacttcgactacctgaccagagactggagcatcctgggcccccaccacctggacgagttcaagagaatctgggccgagtacgaccccgaggccaagggcagaatcaagcacctggacgtggtgaccctgctgagaagaatccagccccccctgggcttcggcaagctgtgcccccacagagtggcctgcaagagactggtgagcatgaacatgcccctgaacagcgacggcaccgtgatgttcaacgccaccctgttcgccctggtgagaaccgccctgagaatcaagaccgaggagggccccagccccagcgaggcccaccagggcgccgaggaccccttcagacccgccggcaacctggagcaggccaacgaggagctgagagccatcatcaagaagatctggaagagaaccagcatgaagctgctggaccaggtggtgccccccgccggcgacgacgaggtgaccgtgggcaagttctacgccaccttcctgatccaggagtacttcagaaagttcaagaagagaaaggagcagggcctggtgggcaagcccagccagagaaacgccctgagcctgcaggccggcctgagaaccctgcacgacatcggccccgagatcagaagagccatcagcggcgacctgaccgccgaggaggagctggacaaggccatgaaggaggccgtgagcgccgccagcgaggacgacatcttcagaagagccggcggcctgttcggcaaccacgtgagctactaccagagcgacggcagaagcgccttcccccagaccttcaccacccagagacccctgcacatcaacaaggccggcagcagccagggcgacaccgagagccccagccacgagaagctggtggacagcaccttcacccccagcagctacagcagcaccggcagcaacgccaacatcaacaacgccaacaacaccgccctgggcagactgcccagacccgccggctaccccagcaccgtgagcaccgtggagggccacggcccccccctgagccccgccatcagagtgcaggaggtggcctggaagctgagcagcaacagatgccacagcagagagagccaggccgccatggccggccaggaggagaccagccaggacgagacctacgaggtgaagatgaaccacgacaccgaggcctgcagcgagcccagcctgctgagcaccgagatgctgagctaccaggacgacgagaacagacagctgaccctgcccgaggaggacaagagagacatcagacagagccccaagagaggcttcctgagaagcgccagcctgggcagaagagccagcttccacctggagtgcctgaagagacagaaggacagaggcggcgacatcagccagaagaccgtgctgcccctgcacctggtgcaccaccaggccctggccgtggccggcctgagccccctgctgcagagaagccacagccccgccagcttccccagacccttcgccaccccccccgccacccccggcagcagaggctggcccccccagcccgtgcccaccctgagactggagggcgtggagagcagcgagaagctgaacagcagcttccccagcatccactgcggcagctgggccgagaccacccccggcggcggcggcagcagcgccgccagaagagtgagacccgtgagcctgatggtgcccagccaggccggcgcccccggcagacagttccacggcagcgccagcagcctggtggaggccgtgctgatcagcgagggcctgggccagttcgcccaggaccccaagttcatcgaggtgaccacccaggagctggccgacgcctgcgacatgaccatcgaggagatggagagcgccgccgacaacatcctgagcggcggcgccccccagagccccaacggcgccctgctgcccttcgtgaactgcagagacgccggccaggacagagccggcggcgaggaggacgccggctgcgtgagagccagaggcagacccagcgaggaggagctgcaggacagcagagtgtacgtgagcagcctgtag

SEQ ID NO: 75021 - DNA, 6417 bp, synthetic construct
  misc_feature 1..6417: note = Description of Artificial Sequence: Synthetic coding sequence
  source 1..6417: mol_type = other DNA
atggtgaacgagaacaccagaatgtacatccccgaggagaaccaccagggcagcaactacggcagccccagacccgcccacgccaacatgaacgccaacgccgccgccggcctggcccccgagcacatccccacccccggcgccgccctgagctggcaggccgccatcgacgccgccagacaggccaagctgatgggcagcgccggcaacgccaccatcagcaccgtgagcagcacccagagaaagagacagcagtacggcaagcccaagaagcagggcagcaccaccgccaccagaccccccagagccctgctgtgcctgaccctgaagaaccccatcagaagagcctgcatcagcatcgtggagtggaagcccttcgagatcatcatcctgctgaccatcttcgccaactgcgtggccctggccatctacatccccttccccgaggacgacagcaacgccaccaacagcaacctggagagagtggagtacctgttcctgatcatcttcaccgtggaggccttcctgaaggtgatcgcctacggcctgctgttccaccccaacgcctacctgagaaacggctggaacctgctggacttcatcatcgtggtggtgggcctgttcagcgccatcctggagcaggccaccaaggccgacggcgccaacgccctgggcggcaagggcgccggcttcgacgtgaaggccctgagagccttcagagtgctgagacccctgagactggtgagcggcgtgcccagcctgcaggtggtgctgaacagcatcatcaaggccatggtgcccctgctgcacatcgccctgctggtgctgttcgtgatcatcatctacgccatcatcggcctggagctgttcatgggcaagatgcacaagacctgctacaaccaggagggcatcgccgacgtgcccgccgaggacgaccccagcccctgcgccctggagaccggccacggcagacagtgccagaacggcaccgtgtgcaagcccggctgggacggccccaagcacggcatcaccaacttcgacaacttcgccttcgccatgctgaccgtgttccagtgcatcaccatggagggctggaccgacgtgctgtactgggtgaacgacgccgtgggcagagactggccctggatctacttcgtgaccctgatcatcatcggcagcttcttcgtgctgaacctggtgctgggcgtgctgagcggcgagttcagcaaggagagagagaaggccaaggccagaggcgacttccagaagctgagagagaagcagcagctggaggaggacctgaagggctacctggactggatcacccaggccgaggacatcgaccccgagaacgaggacgagggcatggacgaggagaagcccagaaacatgagcatgcccaccagcgagaccgagagcgtgaacaccgagaacgtggccggcggcgacatcgagggcgagaactgcggcgccagactggcccacagaatcagcaagagcaagttcagcagatactggagaagatggaacagattctgcagaagaaagtgcagagccgccgtgaagagcaacgtgttctactggctggtgatcttcctggtgttcctgaacaccctgaccatcgccagcgagcactacaaccagcccaactggctgaccgaggtgcaggacaccgccaacaaggccctgctggccctgttcaccgccgagatgctgctgaagatgtacagcctgggcctgcaggcctacttcgtgagcctgttcaacagattcgactgcttcgtggtgtgcggcggcatcctggagaccatcctggtggagaccaagatcatgagccccctgggcatcagcgtgctgagatgcgtgagactgctgagaatcttcaagatcaccagatactggaacagcctgagcaacctggtggccagcctgctgaacagcgtgagaagcatcgccagcctgctgctgctgctgttcctgttcatcatcatcttcagcctgctgggcatgcagctgttcggcggcaagttcaacttcgacgagatgcagaccagaagaagcaccttcgacaacttcccccagagcctgctgaccgtgttccagatcctgaccggcgaggactggaacagcgtgatgtacgacggcatcatggcctacggcggccccagcttccccggcatgctggtgtgcatctacttcatcatcctgttcatctgcggcaactacatcctgctgaacgtgttcctggccatcgccgtggacaacctggccgacgccgagagcctgaccagcgcccagaaggaggaggaggaggagaaggagagaaagaagctggccagaaccgccagccccgagaagaagcaggagctggtggagaagcccgccgtgggcgagagcaaggaggagaagatcgagctgaagagcatcaccgccgacggcgagagcccccccgccaccaagatcaacatggacgacctgcagcccaacgagaacgaggacaagagcccctaccccaaccccgagaccaccggcgaggaggacgaggaggagcccgagatgcccgtgggccccagacccagacccctgagcgagctgcacctgaaggagaaggccgtgcccatgcccgaggccagcgccttcttcatcttcagcagcaacaacagattcagactgcagtgccacagaatcgtgaacgacaccatcttcaccaacctgatcctgttcttcatcctgctgagcagcatcagcctggccgccgaggaccccgtgcagcacaccagcttcagaaaccacatcctgttctacttcgacatcgtgttcaccaccatcttcaccatcgagatcgccctgaagatgaccgcctacggcgccttcctgcacaagggcagcttctgcagaaactacttcaacatcctggacctgctggtggtgagcgtgagcctgatcagcttcggcatccagagcagcgccatcaacgtggtgaagatcctgagagtgctgagagtgctgagacccctgagagccatcaacagagccaagggcctgaagcacgtggtgcagtgcgtgttcgtggccatcagaaccatcggcaacatcgtgatcgtgaccaccctgctgcagttcatgttcgcctgcatcggcgtgcagctgttcaagggcaagctgtacacctgcagcgacagcagcaagcagaccgaggccgagtgcaagggcaactacatcacctacaaggacggcgaggtggaccaccccatcatccagcccagaagctgggagaacagcaagttcgacttcgacaacgtgctggccgccatgatggccctgttcaccgtgagcaccttcgagggctggcccgagctgctgtacagaagcatcgacagccacaccgaggacaagggccccatctacaactacagagtggagatcagcatcttcttcatcatctacatcatcatcatcgccttcttcatgatgaacatcttcgtgggcttcgtgatcgtgaccttccaggagcagggcgagcaggagtacaagaactgcgagctggacaagaaccagagacagtgcgtggagtacgccctgaaggccagacccctgagaagatacatccccaagaaccagcaccagtacaaggtgtggtacgtggtgaacagcacctacttcgagtacctgatgttcgtgctgatcctgctgaacaccatctgcctggccatgcagcactacggccagagctgcctgttcaagatcgccatgaacatcctgaacatgctgttcaccggcctgttcaccgtggagatgatcctgaagctgatcgccttcaagcccaagggctacttcagcgacccctggaacgtgttcgacttcctgatcgtgatcggcagcatcatcgacgtgatcctgagcgagaccaaccccgccgagcacacccagtgcagccccagcatgaacgccgaggagaacagcagaatcagcatcaccttcttcagactgttcagagtgatgagactggtgaagctgctgagcagaggcgagggcatcagaaccctgctgtggaccttcatcaagagcttccaggccctgccctacgtggccctgctgatcgtgatgctgttcttcatctacgccgtgatcggcatgcaggtgttcggcaagatcgccctgaacgacaccaccgagatcaacagaaacaacaacttccagaccttcccccaggccgtgctgctgctgttcagatgcgccaccggcgaggcctggcaggacatcatgctggcctgcatgcccggcaagaagtgcgcccccgagagcgagcccagcaacagcaccgagggcgagaccccctgcggcagcagcttcgccgtgttctacttcatcagcttctacatgctgtgcgccttcctgatcatcaacctgttcgtggccgtgatcatggacaacttcgactacctgaccagagactggagcatcctgggcccccaccacctggacgagttcaagagaatctgggccgagtacgaccccgaggccaagggcagaatcaagcacctggacgtggtgaccctgctgagaagaatccagccccccctgggcttcggcaagctgtgcccccacagagtggcctgcaagagactggtgagcatgaacatgcccctgaacagcgacggcaccgtgatgttcaacgccaccctgttcgccctggtgagaaccgccctgagaatcaagaccgagggcaacctggagcaggccaacgaggagctgagagccatcatcaagaagatctggaagagaaccagcatgaagctgctggaccaggtggtgccccccgccggcgacgacgaggtgaccgtgggcaagttctacgccaccttcctgatccaggagtacttcagaaagttcaagaagagaaaggagcagggcctggtgggcaagcccagccagagaaacgccctgagcctgcaggccggcctgagaaccctgcacgacatcggccccgagatcagaagagccatcagcggcgacctgaccgccgaggaggagctggacaaggccatgaaggaggccgtgagcgccgccagcgaggacgacatcttcagaagagccggcggcctgttcggcaaccacgtgagctactaccagagcgacggcagaagcgccttcccccagaccttcaccacccagagacccctgcacatcaacaaggccggcagcagccagggcgacaccgagagccccagccacgagaagctggtggacagcaccttcacccccagcagctacagcagcaccggcagcaacgccaacatcaacaacgccaacaacaccgccctgggcagactgcccagacccgccggctaccccagcaccgtgagcaccgtggagggccacggcccccccctgagccccgccatcagagtgcaggaggtggcctggaagctgagcagcaacagatgccacagcagagagagccaggccgccatggccggccaggaggagaccagccaggacgagacctacgaggtgaagatgaaccacgacaccgaggcctgcagcgagcccagcctgctgagcaccgagatgctgagctaccaggacgacgagaacagacagctgaccctgcccgaggaggacaagagagacatcagacagagccccaagagaggcttcctgagaagcgccagcctgggcagaagagccagcttccacctggagtgcctgaagagacagaaggacagaggcggcgacatcagccagaagaccgtgctgcccctgcacctggtgcaccaccaggccctggccgtggccggcctgagccccctgctgcagagaagccacagccccgccagcttccccagacccttcgccaccccccccgccacccccggcagcagaggctggcccccccagcccgtgcccaccctgagactggagggcgtggagagcagcgagaagctgaacagcagcttccccagcatccactgcggcagctgggccgagaccacccccggcggcggcggcagcagcgccgccagaagagtgagacccgtgagcctgatggtgcccagccaggccggcgcccccggcagacagttccacggcagcgccagcagcctggtggaggccgtgctgatcagcgagggcctgggccagttcgcccaggaccccaagttcatcgaggtgaccacccaggagctggccgacgcctgcgacatgaccatcgaggagatggagagcgccgccgacaacatcctgagcggcggcgccccccagagccccaacggcgccctgctgcccttcgtgaactgcagagacgccggccaggacagagccggcggcgaggaggacgccggctgcgtgagagccagaggcagacccagcgaggaggagctgcaggacagcagagtgtacgtgagcagcctgtag

SEQ ID NO: 75022 - DNA, 6417 bp, synthetic construct
  misc_feature 1..6417: note = Description of Artificial Sequence: Synthetic coding sequence
  source 1..6417: mol_type = other DNA
atggtgaacgagaacaccagaatgtacatccccgaggagaaccaccagggcagcaactacggcagccccagacccgcccacgccaacatgaacgccaacgccgccgccggcctggcccccgagcacatccccacccccggcgccgccctgagctggcaggccgccatcgacgccgccagacaggccaagctgatgggcagcgccggcaacgccaccatcagcaccgtgagcagcacccagagaaagagacagcagtacggcaagcccaagaagcagggcagcaccaccgccaccagaccccccagagccctgctgtgcctgaccctgaagaaccccatcagaagagcctgcatcagcatcgtggagtggaagcccttcgagatcatcatcctgctgaccatcttcgccaactgcgtggccctggccatctacatccccttccccgaggacgacagcaacgccaccaacagcaacctggagagagtggagtacctgttcctgatcatcttcaccgtggaggccttcctgaaggtgatcgcctacggcctgctgttccaccccaacgcctacctgagaaacggctggaacctgctggacttcatcatcgtggtggtgggcctgttcagcgccatcctggagcaggccaccaaggccgacggcgccaacgccctgggcggcaagggcgccggcttcgacgtgaaggccctgagagccttcagagtgctgagacccctgagactggtgagcggcgtgcccagcctgcaggtggtgctgaacagcatcatcaaggccatggtgcccctgctgcacatcgccctgctggtgctgttcgtgatcatcatctacgccatcatcggcctggagctgttcatgggcaagatgcacaagacctgctacaaccaggagggcatcgccgacgtgcccgccgaggacgaccccagcccctgcgccctggagaccggccacggcagacagtgccagaacggcaccgtgtgcaagcccggctgggacggccccaagcacggcatcaccaacttcgacaacttcgccttcgccatgctgaccgtgttccagtgcatcaccatggagggctggaccgacgtgctgtactgggtgaacgacgccgtgggcagagactggccctggatctacttcgtgaccctgatcatcatcggcagcttcttcgtgctgaacctggtgctgggcgtgctgagcggcgagttcagcaaggagagagagaaggccaaggccagaggcgacttccagaagctgagagagaagcagcagctggaggaggacctgaagggctacctggactggatcacccaggccgaggacatcgaccccgagaacgaggacgagggcatggacgaggagaagcccagaaacatgagcatgcccaccagcgagaccgagagcgtgaacaccgagaacgtggccggcggcgacatcgagggcgagaactgcggcgccagactggcccacagaatcagcaagagcaagttcagcagatactggagaagatggaacagattctgcagaagaaagtgcagagccgccgtgaagagcaacgtgttctactggctggtgatcttcctggtgttcctgaacaccctgaccatcgccagcgagcactacaaccagcccaactggctgaccgaggtgcaggacaccgccaacaaggccctgctggccctgttcaccgccgagatgctgctgaagatgtacagcctgggcctgcaggcctacttcgtgagcctgttcaacagattcgactgcttcgtggtgtgcggcggcatcctggagaccatcctggtggagaccaagatcatgagccccctgggcatcagcgtgctgagatgcgtgagactgctgagaatcttcaagatcaccagatactggaacagcctgagcaacctggtggccagcctgctgaacagcgtgagaagcatcgccagcctgctgctgctgctgttcctgttcatcatcatcttcagcctgctgggcatgcagctgttcggcggcaagttcaacttcgacgagatgcagaccagaagaagcaccttcgacaacttcccccagagcctgctgaccgtgttccagatcctgaccggcgaggactggaacagcgtgatgtacgacggcatcatggcctacggcggccccagcttccccggcatgctggtgtgcatctacttcatcatcctgttcatctgcggcaactacatcctgctgaacgtgttcctggccatcgccgtggacaacctggccgacgccgagagcctgaccagcgcccagaaggaggaggaggaggagaaggagagaaagaagctggccagaaccgccagccccgagaagaagcaggagctggtggagaagcccgccgtgggcgagagcaaggaggagaagatcgagctgaagagcatcaccgccgacggcgagagcccccccgccaccaagatcaacatggacgacctgcagcccaacgagaacgaggacaagagcccctaccccaaccccgagaccaccggcgaggaggacgaggaggagcccgagatgcccgtgggccccagacccagacccctgagcgagctgcacctgaaggagaaggccgtgcccatgcccgaggccagcgccttcttcatcttcagcagcaacaacagattcagactgcagtgccacagaatcgtgaacgacaccatcttcaccaacctgatcctgttcttcatcctgctgagcagcatcagcctggccgccgaggaccccgtgcagcacaccagcttcagaaaccacatcctgggcaacgccgactacgtgttcaccagcatcttcaccctggagatcatcctgaagatgaccgcctacggcgccttcctgcacaagggcagcttctgcagaaactacttcaacatcctggacctgctggtggtgagcgtgagcctgatcagcttcggcatccagagcagcgccatcaacgtggtgaagatcctgagagtgctgagagtgctgagacccctgagagccatcaacagagccaagggcctgaagcacgtggtgcagtgcgtgttcgtggccatcagaaccatcggcaacatcgtgatcgtgaccaccctgctgcagttcatgttcgcctgcatcggcgtgcagctgttcaagggcaagctgtacacctgcagcgacagcagcaagcagaccgaggccgagtgcaagggcaactacatcacctacaaggacggcgaggtggaccaccccatcatccagcccagaagctgggagaacagcaagttcgacttcgacaacgtgctggccgccatgatggccctgttcaccgtgagcaccttcgagggctggcccgagctgctgtacagaagcatcgacagccacaccgaggacaagggccccatctacaactacagagtggagatcagcatcttcttcatcatctacatcatcatcatcgccttcttcatgatgaacatcttcgtgggcttcgtgatcgtgaccttccaggagcagggcgagcaggagtacaagaactgcgagctggacaagaaccagagacagtgcgtggagtacgccctgaaggccagacccctgagaagatacatccccaagaaccagcaccagtacaaggtgtggtacgtggtgaacagcacctacttcgagtacctgatgttcgtgctgatcctgctgaacaccatctgcctggccatgcagcactacggccagagctgcctgttcaagatcgccatgaacatcctgaacatgctgttcaccggcctgttcaccgtggagatgatcctgaagctgatcgccttcaagcccaagcactacttctgcgacgcctggaacaccttcgacgccctgatcgtggtgggcagcatcgtggacatcgccatcaccgaggtgaaccccgccgagcacacccagtgcagccccagcatgaacgccgaggagaacagcagaatcagcatcaccttcttcagactgttcagagtgatgagactggtgaagctgctgagcagaggcgagggcatcagaaccctgctgtggaccttcatcaagagcttccaggccctgccctacgtggccctgctgatcgtgatgctgttcttcatctacgccgtgatcggcatgcaggtgttcggcaagatcgccctgaacgacaccaccgagatcaacagaaacaacaacttccagaccttcccccaggccgtgctgctgctgttcagatgcgccaccggcgaggcctggcaggacatcatgctggcctgcatgcccggcaagaagtgcgcccccgagagcgagcccagcaacagcaccgagggcgagaccccctgcggcagcagcttcgccgtgttctacttcatcagcttctacatgctgtgcgccttcctgatcatcaacctgttcgtggccgtgatcatggacaacttcgactacctgaccagagactggagcatcctgggcccccaccacctggacgagttcaagagaatctgggccgagtacgaccccgaggccaagggcagaatcaagcacctggacgtggtgaccctgctgagaagaatccagccccccctgggcttcggcaagctgtgcccccacagagtggcctgcaagagactggtgagcatgaacatgcccctgaacagcgacggcaccgtgatgttcaacgccaccctgttcgccctggtgagaaccgccctgagaatcaagaccgagggcaacctggagcaggccaacgaggagctgagagccatcatcaagaagatctggaagagaaccagcatgaagctgctggaccaggtggtgccccccgccggcgacgacgaggtgaccgtgggcaagttctacgccaccttcctgatccaggagtacttcagaaagttcaagaagagaaaggagcagggcctggtgggcaagcccagccagagaaacgccctgagcctgcaggccggcctgagaaccctgcacgacatcggccccgagatcagaagagccatcagcggcgacctgaccgccgaggaggagctggacaaggccatgaaggaggccgtgagcgccgccagcgaggacgacatcttcagaagagccggcggcctgttcggcaaccacgtgagctactaccagagcgacggcagaagcgccttcccccagaccttcaccacccagagacccctgcacatcaacaaggccggcagcagccagggcgacaccgagagccccagccacgagaagctggtggacagcaccttcacccccagcagctacagcagcaccggcagcaacgccaacatcaacaacgccaacaacaccgccctgggcagactgcccagacccgccggctaccccagcaccgtgagcaccgtggagggccacggcccccccctgagccccgccatcagagtgcaggaggtggcctggaagctgagcagcaacagatgccacagcagagagagccaggccgccatggccggccaggaggagaccagccaggacgagacctacgaggtgaagatgaaccacgacaccgaggcctgcagcgagcccagcctgctgagcaccgagatgctgagctaccaggacgacgagaacagacagctgaccctgcccgaggaggacaagagagacatcagacagagccccaagagaggcttcctgagaagcgccagcctgggcagaagagccagcttccacctggagtgcctgaagagacagaaggacagaggcggcgacatcagccagaagaccgtgctgcccctgcacctggtgcaccaccaggccctggccgtggccggcctgagccccctgctgcagagaagccacagccccgccagcttccccagacccttcgccaccccccccgccacccccggcagcagaggctggcccccccagcccgtgcccaccctgagactggagggcgtggagagcagcgagaagctgaacagcagcttccccagcatccactgcggcagctgggccgagaccacccccggcggcggcggcagcagcgccgccagaagagtgagacccgtgagcctgatggtgcccagccaggccggcgcccccggcagacagttccacggcagcgccagcagcctggtggaggccgtgctgatcagcgagggcctgggccagttcgcccaggaccccaagttcatcgaggtgaccacccaggagctggccgacgcctgcgacatgaccatcgaggagatggagagcgccgccgacaacatcctgagcggcggcgccccccagagccccaacggcgccctgctgcccttcgtgaactgcagagacgccggccaggacagagccggcggcgaggaggacgccggctgcgtgagagccagaggcagacccagcgaggaggagctgcaggacagcagagtgtacgtgagcagcctgtag

SEQ ID NO: 75023 - DNA, 6417 bp, synthetic construct
  misc_feature 1..6417: note = Description of Artificial Sequence: Synthetic coding sequence
  source 1..6417: mol_type = other DNA
atggtgaacgagaacaccagaatgtacatccccgaggagaaccaccagggcagcaactacggcagccccagacccgcccacgccaacatgaacgccaacgccgccgccggcctggcccccgagcacatccccacccccggcgccgccctgagctggcaggccgccatcgacgccgccagacaggccaagctgatgggcagcgccggcaacgccaccatcagcaccgtgagcagcacccagagaaagagacagcagtacggcaagcccaagaagcagggcagcaccaccgccaccagaccccccagagccctgctgtgcctgaccctgaagaaccccatcagaagagcctgcatcagcatcgtggagtggaagcccttcgagatcatcatcctgctgaccatcttcgccaactgcgtggccctggccatctacatccccttccccgaggacgacagcaacgccaccaacagcaacctggagagagtggagtacctgttcctgatcatcttcaccgtggaggccttcctgaaggtgatcgcctacggcctgctgttccaccccaacgcctacctgagaaacggctggaacctgctggacttcatcatcgtggtggtgggcctgttcagcgccatcctggagcaggccaccaaggccgacggcgccaacgccctgggcggcaagggcgccggcttcgacgtgaaggccctgagagccttcagagtgctgagacccctgagactggtgagcggcgtgcccagcctgcaggtggtgctgaacagcatcatcaaggccatggtgcccctgctgcacatcgccctgctggtgctgttcgtgatcatcatctacgccatcatcggcctggagctgttcatgggcaagatgcacaagacctgctacaaccaggagggcatcgccgacgtgcccgccgaggacgaccccagcccctgcgccctggagaccggccacggcagacagtgccagaacggcaccgtgtgcaagcccggctgggacggccccaagcacggcatcaccaacttcgacaacttcgccttcgccatgctgaccgtgttccagtgcatcaccatggagggctggaccgacgtgctgtactggatgcaggacgccatgggctacgagctgccctgggtgtacttcgtgagcctggtgatcttcggcagcttcttcgtgctgaacctggtgctgggcgtgctgagcggcgagttcagcaaggagagagagaaggccaaggccagaggcgacttccagaagctgagagagaagcagcagctggaggaggacctgaagggctacctggactggatcacccaggccgaggacatcgaccccgagaacgaggacgagggcatggacgaggagaagcccagaaacatgagcatgcccaccagcgagaccgagagcgtgaacaccgagaacgtggccggcggcgacatcgagggcgagaactgcggcgccagactggcccacagaatcagcaagagcaagttcagcagatactggagaagatggaacagattctgcagaagaaagtgcagagccgccgtgaagagcaacgtgttctactggctggtgatcttcctggtgttcctgaacaccctgaccatcgccagcgagcactacaaccagcccaactggctgaccgaggtgcaggacaccgccaacaaggccctgctggccctgttcaccgccgagatgctgctgaagatgtacagcctgggcctgcaggcctacttcgtgagcctgttcaacagattcgactgcttcgtggtgtgcggcggcatcctggagaccatcctggtggagaccaagatcatgagccccctgggcatcagcgtgctgagatgcgtgagactgctgagaatcttcaagatcaccagatactggaacagcctgagcaacctggtggccagcctgctgaacagcgtgagaagcatcgccagcctgctgctgctgctgttcctgttcatcatcatcttcagcctgctgggcatgcagctgttcggcggcaagttcaacttcgacgagatgcagaccagaagaagcaccttcgacaacttcccccagagcctgctgaccgtgttccagatcctgaccggcgaggactggaacagcgtgatgtacgacggcatcatggcctacggcggccccagcttccccggcatgctggtgtgcatctacttcatcatcctgttcatctgcggcaactacatcctgctgaacgtgttcctggccatcgccgtggacaacctggccgacgccgagagcctgaccagcgcccagaaggaggaggaggaggagaaggagagaaagaagctggccagaaccgccagccccgagaagaagcaggagctggtggagaagcccgccgtgggcgagagcaaggaggagaagatcgagctgaagagcatcaccgccgacggcgagagcccccccgccaccaagatcaacatggacgacctgcagcccaacgagaacgaggacaagagcccctaccccaaccccgagaccaccggcgaggaggacgaggaggagcccgagatgcccgtgggccccagacccagacccctgagcgagctgcacctgaaggagaaggccgtgcccatgcccgaggccagcgccttcttcatcttcagcagcaacaacagattcagactgcagtgccacagaatcgtgaacgacaccatcttcaccaacctgatcctgttcttcatcctgctgagcagcatcagcctggccgccgaggaccccgtgcagcacaccagcttcagaaaccacatcctgttctacttcgacatcgtgttcaccaccatcttcaccatcgagatcgccctgaagatgaccgcctacggcgccttcctgcacaagggcagcttctgcagaaactacttcaacatcctggacctgctggtggtgagcgtgagcctgatcagcttcggcatccagagcagcgccatcaacgtggtgaagatcctgagagtgctgagagtgctgagacccctgagagccatcaacagagccaagggcctgaagcacgtggtgcagtgcgtgttcgtggccatcagaaccatcggcaacatcgtgatcgtgaccaccctgctgcagttcatgttcgcctgcatcggcgtgcagctgttcaagggcaagctgtacacctgcagcgacagcagcaagcagaccgaggccgagtgcaagggcaactacatcacctacaaggacggcgaggtggaccaccccatcatccagcccagaagctgggagaacagcaagttcgacttcgacaacgtgctggccgccatgatggccctgttcaccgtgagcaccttcgagggctggcccgagctgctgtacagaagcatcgacagccacaccgaggacaagggccccatctacaactacagagtggagatcagcatcttcttcatcatctacatcatcatcatcgccttcttcatgatgaacatcttcgtgggcttcgtgatcgtgaccttccaggagcagggcgagcaggagtacaagaactgcgagctggacaagaaccagagacagtgcgtggagtacgccctgaaggccagacccctgagaagatacatccccaagaaccagcaccagtacaaggtgtggtacgtggtgaacagcacctacttcgagtacctgatgttcgtgctgatcctgctgaacaccatctgcctggccatgcagcactacggccagagctgcctgttcaagatcgccatgaacatcctgaacatgctgttcaccggcctgttcaccgtggagatgatcctgaagctgatcgccttcaagcccaagggctacttcagcgacccctggaacgtgttcgacttcctgatcgtgatcggcagcatcatcgacgtgatcctgagcgagaccaaccccgccgagcacacccagtgcagccccagcatgaacgccgaggagaacagcagaatcagcatcaccttcttcagactgttcagagtgatgagactggtgaagctgctgagcagaggcgagggcatcagaaccctgctgtggaccttcatcaagagcttccaggccctgccctacgtggccctgctgatcgtgatgctgttcttcatctacgccgtgatcggcatgcaggtgttcggcaagatcgccctgaacgacaccaccgagatcaacagaaacaacaacttccagaccttcccccaggccgtgctgctgctgttcagatgcgccaccggcgaggcctggcaggacatcatgctggcctgcatgcccggcaagaagtgcgcccccgagagcgagcccagcaacagcaccgagggcgagaccccctgcggcagcagcttcgccgtgttctacttcatcagcttctacatgctgtgcgccttcctgatcatcaacctgttcgtggccgtgatcatggacaacttcgactacctgaccagagactggagcatcctgggcccccaccacctggacgagttcaagagaatctgggccgagtacgaccccgaggccaagggcagaatcaagcacctggacgtggtgaccctgctgagaagaatccagccccccctgggcttcggcaagctgtgcccccacagagtggcctgcaagagactggtgagcatgaacatgcccctgaacagcgacggcaccgtgatgttcaacgccaccctgttcgccctggtgagaaccgccctgagaatcaagaccgagggcaacctggagcaggccaacgaggagctgagagccatcatcaagaagatctggaagagaaccagcatgaagctgctggaccaggtggtgccccccgccggcgacgacgaggtgaccgtgggcaagttctacgccaccttcctgatccaggagtacttcagaaagttcaagaagagaaaggagcagggcctggtgggcaagcccagccagagaaacgccctgagcctgcaggccggcctgagaaccctgcacgacatcggccccgagatcagaagagccatcagcggcgacctgaccgccgaggaggagctggacaaggccatgaaggaggccgtgagcgccgccagcgaggacgacatcttcagaagagccggcggcctgttcggcaaccacgtgagctactaccagagcgacggcagaagcgccttcccccagaccttcaccacccagagacccctgcacatcaacaaggccggcagcagccagggcgacaccgagagccccagccacgagaagctggtggacagcaccttcacccccagcagctacagcagcaccggcagcaacgccaacatcaacaacgccaacaacaccgccctgggcagactgcccagacccgccggctaccccagcaccgtgagcaccgtggagggccacggcccccccctgagccccgccatcagagtgcaggaggtggcctggaagctgagcagcaacagatgccacagcagagagagccaggccgccatggccggccaggaggagaccagccaggacgagacctacgaggtgaagatgaaccacgacaccgaggcctgcagcgagcccagcctgctgagcaccgagatgctgagctaccaggacgacgagaacagacagctgaccctgcccgaggaggacaagagagacatcagacagagccccaagagaggcttcctgagaagcgccagcctgggcagaagagccagcttccacctggagtgcctgaagagacagaaggacagaggcggcgacatcagccagaagaccgtgctgcccctgcacctggtgcaccaccaggccctggccgtggccggcctgagccccctgctgcagagaagccacagccccgccagcttccccagacccttcgccaccccccccgccacccccggcagcagaggctggcccccccagcccgtgcccaccctgagactggagggcgtggagagcagcgagaagctgaacagcagcttccccagcatccactgcggcagctgggccgagaccacccccggcggcggcggcagcagcgccgccagaagagtgagacccgtgagcctgatggtgcccagccaggccggcgcccccggcagacagttccacggcagcgccagcagcctggtggaggccgtgctgatcagcgagggcctgggccagttcgcccaggaccccaagttcatcgaggtgaccacccaggagctggccgacgcctgcgacatgaccatcgaggagatggagagcgccgccgacaacatcctgagcggcggcgccccccagagccccaacggcgccctgctgcccttcgtgaactgcagagacgccggccaggacagagccggcggcgaggaggacgccggctgcgtgagagccagaggcagacccagcgaggaggagctgcaggacagcagagtgtacgtgagcagcctgtag

SEQ ID NO: 75024 - DNA, 6477 bp, synthetic construct
  misc_feature 1..6477: note = Description of Artificial Sequence: Synthetic coding sequence
  source 1..6477: mol_type = other DNA
atggtgaacgagaacaccagaatgtacatccccgaggagaaccaccagggcagcaactacggcagccccagacccgcccacgccaacatgaacgccaacgccgccgccggcctggcccccgagcacatccccacccccggcgccgccctgagctggcaggccgccatcgacgccgccagacaggccaagctgatgggcagcgccggcaacgccaccatcagcaccgtgagcagcacccagagaaagagacagcagtacggcaagcccaagaagcagggcagcaccaccgccaccagaccccccagagccctgctgtgcctgaccctgaagaaccccatcagaagagcctgcatcagcatcgtggagtggaagcccttcgagatcatcatcctgctgaccatcttcgccaactgcgtggccctggccatctacatccccttccccgaggacgacagcaacgccaccaacagcaacctggagagagtggagtacctgttcctgatcatcttcaccgtggaggccttcctgaaggtgatcgcctacggcctgctgttccaccccaacgcctacctgagaaacggctggaacctgctggacttcatcatcgtggtggtgggcctgttcagcgccatcctggagcaggccaccaaggccgacggcgccaacgccctgggcggcaagggcgccggcttcgacgtgaaggccctgagagccttcagagtgctgagacccctgagactggtgagcggcgtgcccagcctgcaggtggtgctgaacagcatcatcaaggccatggtgcccctgctgcacatcgccctgctggtgctgttcgtgatcatcatctacgccatcatcggcctggagctgttcatgggcaagatgcacaagacctgctacaaccaggagggcatcgccgacgtgcccgccgaggacgaccccagcccctgcgccctggagaccggccacggcagacagtgccagaacggcaccgtgtgcaagcccggctgggacggccccaagcacggcatcaccaacttcgacaacttcgccttcgccatgctgaccgtgttccagtgcatcaccatggagggctggaccgacgtgctgtactgggtgaacgacgccgtgggcagagactggccctggatctacttcgtgaccctgatcatcatcggcagcttcttcgtgctgaacctggtgctgggcgtgctgagcggcgagttcagcaaggagagagagaaggccaaggccagaggcgacttccagaagctgagagagaagcagcagctggaggaggacctgaagggctacctggactggatcacccaggccgaggacatcgaccccgagaacgaggacgagggcatggacgaggagaagcccagaaacatgagcatgcccaccagcgagaccgagagcgtgaacaccgagaacgtggccggcggcgacatcgagggcgagaactgcggcgccagactggcccacagaatcagcaagagcaagttcagcagatactggagaagatggaacagattctgcagaagaaagtgcagagccgccgtgaagagcaacgtgttctactggctggtgatcttcctggtgttcctgaacaccctgaccatcgccagcgagcactacaaccagcccaactggctgaccgaggtgcaggacaccgccaacaaggccctgctggccctgttcaccgccgagatgctgctgaagatgtacagcctgggcctgcaggcctacttcgtgagcctgttcaacagattcgactgcttcgtggtgtgcggcggcatcctggagaccatcctggtggagaccaagatcatgagccccctgggcatcagcgtgctgagatgcgtgagactgctgagaatcttcaagatcaccagatactggaacagcctgagcaacctggtggccagcctgctgaacagcgtgagaagcatcgccagcctgctgctgctgctgttcctgttcatcatcatcttcagcctgctgggcatgcagctgttcggcggcaagttcaacttcgacgagatgcagaccagaagaagcaccttcgacaacttcccccagagcctgctgaccgtgttccagatcctgaccggcgaggactggaacagcgtgatgtacgacggcatcatggcctacggcggccccagcttccccggcatgctggtgtgcatctacttcatcatcctgttcatctgcggcaactacatcctgctgaacgtgttcctggccatcgccgtggacaacctggccgacgccgagagcctgaccagcgcccagaaggaggaggaggaggagaaggagagaaagaagctggccagaaccgccagccccgagaagaagcaggagctggtggagaagcccgccgtgggcgagagcaaggaggagaagatcgagctgaagagcatcaccgccgacggcgagagcccccccgccaccaagatcaacatggacgacctgcagcccaacgagaacgaggacaagagcccctaccccaaccccgagaccaccggcgaggaggacgaggaggagcccgagatgcccgtgggccccagacccagacccctgagcgagctgcacctgaaggagaaggccgtgcccatgcccgaggccagcgccttcttcatcttcagcagcaacaacagattcagactgcagtgccacagaatcgtgaacgacaccatcttcaccaacctgatcctgttcttcatcctgctgagcagcatcagcctggccgccgaggaccccgtgcagcacaccagcttcagaaaccacatcctgttctacttcgacatcgtgttcaccaccatcttcaccatcgagatcgccctgaagatcctgggcaacgccgactacgtgttcaccagcatcttcaccctggagatcatcctgaagatgaccgcctacggcgccttcctgcacaagggcagcttctgcagaaactacttcaacatcctggacctgctggtggtgagcgtgagcctgatcagcttcggcatccagagcagcgccatcaacgtggtgaagatcctgagagtgctgagagtgctgagacccctgagagccatcaacagagccaagggcctgaagcacgtggtgcagtgcgtgttcgtggccatcagaaccatcggcaacatcgtgatcgtgaccaccctgctgcagttcatgttcgcctgcatcggcgtgcagctgttcaagggcaagctgtacacctgcagcgacagcagcaagcagaccgaggccgagtgcaagggcaactacatcacctacaaggacggcgaggtggaccaccccatcatccagcccagaagctgggagaacagcaagttcgacttcgacaacgtgctggccgccatgatggccctgttcaccgtgagcaccttcgagggctggcccgagctgctgtacagaagcatcgacagccacaccgaggacaagggccccatctacaactacagagtggagatcagcatcttcttcatcatctacatcatcatcatcgccttcttcatgatgaacatcttcgtgggcttcgtgatcgtgaccttccaggagcagggcgagcaggagtacaagaactgcgagctggacaagaaccagagacagtgcgtggagtacgccctgaaggccagacccctgagaagatacatccccaagaaccagcaccagtacaaggtgtggtacgtggtgaacagcacctacttcgagtacctgatgttcgtgctgatcctgctgaacaccatctgcctggccatgcagcactacggccagagctgcctgttcaagatcgccatgaacatcctgaacatgctgttcaccggcctgttcaccgtggagatgatcctgaagctgatcgccttcaagcccaagcactacttctgcgacgcctggaacaccttcgacgccctgatcgtggtgggcagcatcgtggacatcgccatcaccgaggtgaaccccgccgagcacacccagtgcagccccagcatgaacgccgaggagaacagcagaatcagcatcaccttcttcagactgttcagagtgatgagactggtgaagctgctgagcagaggcgagggcatcagaaccctgctgtggaccttcatcaagagcttccaggccctgccctacgtggccctgctgatcgtgatgctgttcttcatctacgccgtgatcggcatgcaggtgttcggcaagatcgccctgaacgacaccaccgagatcaacagaaacaacaacttccagaccttcccccaggccgtgctgctgctgttcagatgcgccaccggcgaggcctggcaggacatcatgctggcctgcatgcccggcaagaagtgcgcccccgagagcgagcccagcaacagcaccgagggcgagaccccctgcggcagcagcttcgccgtgttctacttcatcagcttctacatgctgtgcgccttcctgatcatcaacctgttcgtggccgtgatcatggacaacttcgactacctgaccagagactggagcatcctgggcccccaccacctggacgagttcaagagaatctgggccgagtacgaccccgaggccaagggcagaatcaagcacctggacgtggtgaccctgctgagaagaatccagccccccctgggcttcggcaagctgtgcccccacagagtggcctgcaagagactggtgagcatgaacatgcccctgaacagcgacggcaccgtgatgttcaacgccaccctgttcgccctggtgagaaccgccctgagaatcaagaccgagggcaacctggagcaggccaacgaggagctgagagccatcatcaagaagatctggaagagaaccagcatgaagctgctggaccaggtggtgccccccgccggcgacgacgaggtgaccgtgggcaagttctacgccaccttcctgatccaggagtacttcagaaagttcaagaagagaaaggagcagggcctggtgggcaagcccagccagagaaacgccctgagcctgcaggccggcctgagaaccctgcacgacatcggccccgagatcagaagagccatcagcggcgacctgaccgccgaggaggagctggacaaggccatgaaggaggccgtgagcgccgccagcgaggacgacatcttcagaagagccggcggcctgttcggcaaccacgtgagctactaccagagcgacggcagaagcgccttcccccagaccttcaccacccagagacccctgcacatcaacaaggccggcagcagccagggcgacaccgagagccccagccacgagaagctggtggacagcaccttcacccccagcagctacagcagcaccggcagcaacgccaacatcaacaacgccaacaacaccgccctgggcagactgcccagacccgccggctaccccagcaccgtgagcaccgtggagggccacggcccccccctgagccccgccatcagagtgcaggaggtggcctggaagctgagcagcaacagatgccacagcagagagagccaggccgccatggccggccaggaggagaccagccaggacgagacctacgaggtgaagatgaaccacgacaccgaggcctgcagcgagcccagcctgctgagcaccgagatgctgagctaccaggacgacgagaacagacagctgaccctgcccgaggaggacaagagagacatcagacagagccccaagagaggcttcctgagaagcgccagcctgggcagaagagccagcttccacctggagtgcctgaagagacagaaggacagaggcggcgacatcagccagaagaccgtgctgcccctgcacctggtgcaccaccaggccctggccgtggccggcctgagccccctgctgcagagaagccacagccccgccagcttccccagacccttcgccaccccccccgccacccccggcagcagaggctggcccccccagcccgtgcccaccctgagactggagggcgtggagagcagcgagaagctgaacagcagcttccccagcatccactgcggcagctgggccgagaccacccccggcggcggcggcagcagcgccgccagaagagtgagacccgtgagcctgatggtgcccagccaggccggcgcccccggcagacagttccacggcagcgccagcagcctggtggaggccgtgctgatcagcgagggcctgggccagttcgcccaggaccccaagttcatcgaggtgaccacccaggagctggccgacgcctgcgacatgaccatcgaggagatggagagcgccgccgacaacatcctgagcggcggcgccccccagagccccaacggcgccctgctgcccttcgtgaactgcagagacgccggccaggacagagccggcggcgaggaggacgccggctgcgtgagagccagaggcagacccagcgaggaggagctgcaggacagcagagtgtacgtgagcagcctgtag

SEQ ID NO: 75025 - DNA, 6522 bp, synthetic construct
  misc_feature 1..6522: note = Description of Artificial Sequence: Synthetic coding sequence
  source 1..6522: mol_type = other DNA
atggtgaacgagaacaccagaatgtacatccccgaggagaaccaccagggcagcaactacggcagccccagacccgcccacgccaacatgaacgccaacgccgccgccggcctggcccccgagcacatccccacccccggcgccgccctgagctggcaggccgccatcgacgccgccagacaggccaagctgatgggcagcgccggcaacgccaccatcagcaccgtgagcagcacccagagaaagagacagcagtacggcaagcccaagaagcagggcagcaccaccgccaccagaccccccagagccctgctgtgcctgaccctgaagaaccccatcagaagagcctgcatcagcatcgtggagtggaagcccttcgagatcatcatcctgctgaccatcttcgccaactgcgtggccctggccatctacatccccttccccgaggacgacagcaacgccaccaacagcaacctggagagagtggagtacctgttcctgatcatcttcaccgtggaggccttcctgaaggtgatcgcctacggcctgctgttccaccccaacgcctacctgagaaacggctggaacctgctggacttcatcatcgtggtggtgggcctgttcagcgccatcctggagcaggccaccaaggccgacggcgccaacgccctgggcggcaagggcgccggcttcgacgtgaaggccctgagagccttcagagtgctgagacccctgagactggtgagcggcgtgcccagcctgcaggtggtgctgaacagcatcatcaaggccatggtgcccctgctgcacatcgccctgctggtgctgttcgtgatcatcatctacgccatcatcggcctggagctgttcatgggcaagatgcacaagacctgctacaaccaggagggcatcgccgacgtgcccgccgaggacgaccccagcccctgcgccctggagaccggccacggcagacagtgccagaacggcaccgtgtgcaagcccggctgggacggccccaagcacggcatcaccaacttcgacaacttcgccttcgccatgctgaccgtgttccagtgcatcaccatggagggctggaccgacgtgctgtactggatgcaggacgccatgggctacgagctgccctgggtgtacttcgtgagcctggtgatcttcggcagcttcttcgtgctgaacctggtgctgggcgtgctgagcggcgagttcagcaaggagagagagaaggccaaggccagaggcgacttccagaagctgagagagaagcagcagctggaggaggacctgaagggctacctggactggatcacccaggccgaggacatcgaccccgagaacgaggacgagggcatggacgaggagaagcccagaaacatgagcatgcccaccagcgagaccgagagcgtgaacaccgagaacgtggccggcggcgacatcgagggcgagaactgcggcgccagactggcccacagaatcagcaagagcaagttcagcagatactggagaagatggaacagattctgcagaagaaagtgcagagccgccgtgaagagcaacgtgttctactggctggtgatcttcctggtgttcctgaacaccctgaccatcgccagcgagcactacaaccagcccaactggctgaccgaggtgcaggacaccgccaacaaggccctgctggccctgttcaccgccgagatgctgctgaagatgtacagcctgggcctgcaggcctacttcgtgagcctgttcaacagattcgactgcttcgtggtgtgcggcggcatcctggagaccatcctggtggagaccaagatcatgagccccctgggcatcagcgtgctgagatgcgtgagactgctgagaatcttcaagatcaccagatactggaacagcctgagcaacctggtggccagcctgctgaacagcgtgagaagcatcgccagcctgctgctgctgctgttcctgttcatcatcatcttcagcctgctgggcatgcagctgttcggcggcaagttcaacttcgacgagatgcagaccagaagaagcaccttcgacaacttcccccagagcctgctgaccgtgttccagatcctgaccggcgaggactggaacagcgtgatgtacgacggcatcatggcctacggcggccccagcttccccggcatgctggtgtgcatctacttcatcatcctgttcatctgcggcaactacatcctgctgaacgtgttcctggccatcgccgtggacaacctggccgacgccgagagcctgaccagcgcccagaaggaggaggaggaggagaaggagagaaagaagctggccagaaccgccagccccgagaagaagcaggagctggtggagaagcccgccgtgggcgagagcaaggaggagaagatcgagctgaagagcatcaccgccgacggcgagagcccccccgccaccaagatcaacatggacgacctgcagcccaacgagaacgaggacaagagcccctaccccaaccccgagaccaccggcgaggaggacgaggaggagcccgagatgcccgtgggccccagacccagacccctgagcgagctgcacctgaaggagaaggccgtgcccatgcccgaggccagcgccttcttcatcttcagcagcaacaacagattcagactgcagtgccacagaatcgtgaacgacaccatcttcaccaacctgatcctgttcttcatcctgctgagcagcatcagcctggccgccgaggaccccgtgcagcacaccagcttcagaaaccacatcctgttctacttcgacatcgtgttcaccaccatcttcaccatcgagatcgccctgaagatgaccgcctacggcgccttcctgcacaagggcagcttctgcagaaactacttcaacatcctggacctgctggtggtgagcgtgagcctgatcagcttcggcatccagagcagcgccatcaacgtggtgaagatcctgagagtgctgagagtgctgagacccctgagagccatcaacagagccaagggcctgaagcacgtggtgcagtgcgtgttcgtggccatcagaaccatcggcaacatcgtgatcgtgaccaccctgctgcagttcatgttcgcctgcatcggcgtgcagctgttcaagggcaagctgtacacctgcagcgacagcagcaagcagaccgaggccgagtgcaagggcaactacatcacctacaaggacggcgaggtggaccaccccatcatccagcccagaagctgggagaacagcaagttcgacttcgacaacgtgctggccgccatgatggccctgttcaccgtgagcaccttcgagggctggcccgagctgctgtacagaagcatcgacagccacaccgaggacaagggccccatctacaactacagagtggagatcagcatcttcttcatcatctacatcatcatcatcgccttcttcatgatgaacatcttcgtgggcttcgtgatcgtgaccttccaggagcagggcgagcaggagtacaagaactgcgagctggacaagaaccagagacagtgcgtggagtacgccctgaaggccagacccctgagaagatacatccccaagaaccagcaccagtacaaggtgtggtacgtggtgaacagcacctacttcgagtacctgatgttcgtgctgatcctgctgaacaccatctgcctggccatgcagcactacggccagagctgcctgttcaagatcgccatgaacatcctgaacatgctgttcaccggcctgttcaccgtggagatgatcctgaagctgatcgccttcaagcccaagggctacttcagcgacccctggaacgtgttcgacttcctgatcgtgatcggcagcatcatcgacgtgatcctgagcgagaccaaccccgccgagcacacccagtgcagccccagcatgaacgccgaggagaacagcagaatcagcatcaccttcttcagactgttcagagtgatgagactggtgaagctgctgagcagaggcgagggcatcagaaccctgctgtggaccttcatcaagagcttccaggccctgccctacgtggccctgctgatcgtgatgctgttcttcatctacgccgtgatcggcatgcaggtgttcggcaagatcgccctgaacgacaccaccgagatcaacagaaacaacaacttccagaccttcccccaggccgtgctgctgctgttcagatgcgccaccggcgaggcctggcaggacatcatgctggcctgcatgcccggcaagaagtgcgcccccgagagcgagcccagcaacagcaccgagggcgagaccccctgcggcagcagcttcgccgtgttctacttcatcagcttctacatgctgtgcgccttcctgatcatcaacctgttcgtggccgtgatcatggacaacttcgactacctgaccagagactggagcatcctgggcccccaccacctggacgagttcaagagaatctgggccgagtacgaccccgaggccaagggcagaatcaagcacctggacgtggtgaccctgctgagaagaatccagccccccctgggcttcggcaagctgtgcccccacagagtggcctgcaagagactggtgagcatgaacatgcccctgaacagcgacggcaccgtgatgttcaacgccaccctgttcgccctggtgagaaccgccctgagaatcaagaccgagggcaacctggagcaggccaacgaggagctgagagccatcatcaagaagatctggaagagaaccagcatgaagctgctggaccaggtggtgccccccgccggcgacgacgaggtgaccgtgggcaagttctacgccaccttcctgatccaggagtacttcagaaagttcaagaagagaaaggagcagggcctggtgggcaagcccagccagagaaacgccctgagcctgcaggccggcctgagaaccctgcacgacatcggccccgagatcagaagagccatcagcggcgacctgaccgccgaggaggagctggacaaggccatgaaggaggccgtgagcgccgccagcgaggacgacatcttcagaagagccggcggcctgttcggcaaccacgtgagctactaccagagcgacggcagaagcgccttcccccagaccttcaccacccagagacccctgcacatcaacaaggccggcagcagccagggcgacaccgagagccccagccacgagaagctggtggacagcaccttcacccccagcagctacagcagcaccggcagcaacgccaacatcaacaacgccaacaacaccgccctgggcagactgcccagacccgccggctaccccagcaccgtgagcaccgtggagggccacggcccccccctgagccccgccatcagagtgcaggaggtggcctggaagctgagcagcaacagagagagacacgtgcccatgtgcgaggacctggagctgagaagagacagcggcagcgccggcacccaggcccactgcctgctgctgagaaaggccaaccccagcagatgccacagcagagagagccaggccgccatggccggccaggaggagaccagccaggacgagacctacgaggtgaagatgaaccacgacaccgaggcctgcagcgagcccagcctgctgagcaccgagatgctgagctaccaggacgacgagaacagacagctgaccctgcccgaggaggacaagagagacatcagacagagccccaagagaggcttcctgagaagcgccagcctgggcagaagagccagcttccacctggagtgcctgaagagacagaaggacagaggcggcgacatcagccagaagaccgtgctgcccctgcacctggtgcaccaccaggccctggccgtggccggcctgagccccctgctgcagagaagccacagccccgccagcttccccagacccttcgccaccccccccgccacccccggcagcagaggctggcccccccagcccgtgcccaccctgagactggagggcgtggagagcagcgagaagctgaacagcagcttccccagcatccactgcggcagctgggccgagaccacccccggcggcggcggcagcagcgccgccagaagagtgagacccgtgagcctgatggtgcccagccaggccggcgcccccggcagacagttccacggcagcgccagcagcctggtggaggccgtgctgatcagcgagggcctgggccagttcgcccaggaccccaagttcatcgaggtgaccacccaggagctggccgacgcctgcgacatgaccatcgaggagatggagagcgccgccgacaacatcctgagcggcggcgccccccagagccccaacggcgccctgctgcccttcgtgaactgcagagacgccggccaggacagagccggcggcgaggaggacgccggctgcgtgagagccagaggcagacccagcgaggaggagctgcaggacagcagagtgtacgtgagcagcctgtag

SEQ ID NO: 75026 - DNA, 6474 bp, synthetic construct
  misc_feature 1..6474: note = Description of Artificial Sequence: Synthetic coding sequence
  source 1..6474: mol_type = other DNA
atggtgaacgagaacaccagaatgtacatccccgaggagaaccaccagggcagcaactacggcagccccagacccgcccacgccaacatgaacgccaacgccgccgccggcctggcccccgagcacatccccacccccggcgccgccctgagctggcaggccgccatcgacgccgccagacaggccaagctgatgggcagcgccggcaacgccaccatcagcaccgtgagcagcacccagagaaagagacagcagtacggcaagcccaagaagcagggcagcaccaccgccaccagaccccccagagccctgctgtgcctgaccctgaagaaccccatcagaagagcctgcatcagcatcgtggagtggaagcccttcgagatcatcatcctgctgaccatcttcgccaactgcgtggccctggccatctacatccccttccccgaggacgacagcaacgccaccaacagcaacctggagagagtggagtacctgttcctgatcatcttcaccgtggaggccttcctgaaggtgatcgcctacggcctgctgttccaccccaacgcctacctgagaaacggctggaacctgctggacttcatcatcgtggtggtgggcctgttcagcgccatcctggagcaggccaccaaggccgacggcgccaacgccctgggcggcaagggcgccggcttcgacgtgaaggccctgagagccttcagagtgctgagacccctgagactggtgagcggcgtgcccagcctgcaggtggtgctgaacagcatcatcaaggccatggtgcccctgctgcacatcgccctgctggtgctgttcgtgatcatcatctacgccatcatcggcctggagctgttcatgggcaagatgcacaagacctgctacaaccaggagggcatcgccgacgtgcccgccgaggacgaccccagcccctgcgccctggagaccggccacggcagacagtgccagaacggcaccgtgtgcaagcccggctgggacggccccaagcacggcatcaccaacttcgacaacttcgccttcgccatgctgaccgtgttccagtgcatcaccatggagggctggaccgacgtgctgtactgggtgaacgacgccgtgggcagagactggccctggatctacttcgtgaccctgatcatcatcggcagcttcttcgtgctgaacctggtgctgggcgtgctgagcggcgagttcagcaaggagagagagaaggccaaggccagaggcgacttccagaagctgagagagaagcagcagctggaggaggacctgaagggctacctggactggatcacccaggccgaggacatcgaccccgagaacgaggacgagggcatggacgaggagaagcccagaaacatgagcatgcccaccagcgagaccgagagcgtgaacaccgagaacgtggccggcggcgacatcgagggcgagaactgcggcgccagactggcccacagaatcagcaagagcaagttcagcagatactggagaagatggaacagattctgcagaagaaagtgcagagccgccgtgaagagcaacgtgttctactggctggtgatcttcctggtgttcctgaacaccctgaccatcgccagcgagcactacaaccagcccaactggctgaccgaggtgcaggacaccgccaacaaggccctgctggccctgttcaccgccgagatgctgctgaagatgtacagcctgggcctgcaggcctacttcgtgagcctgttcaacagattcgactgcttcgtggtgtgcggcggcatcctggagaccatcctggtggagaccaagatcatgagccccctgggcatcagcgtgctgagatgcgtgagactgctgagaatcttcaagatcaccagatactggaacagcctgagcaacctggtggccagcctgctgaacagcgtgagaagcatcgccagcctgctgctgctgctgttcctgttcatcatcatcttcagcctgctgggcatgcagctgttcggcggcaagttcaacttcgacgagatgcagaccagaagaagcaccttcgacaacttcccccagagcctgctgaccgtgttccagatcctgaccggcgaggactggaacagcgtgatgtacgacggcatcatggcctacggcggccccagcttccccggcatgctggtgtgcatctacttcatcatcctgttcatctgcggcaactacatcctgctgaacgtgttcctggccatcgccgtggacaacctggccgacgccgagagcctgaccagcgcccagaaggaggaggaggaggagaaggagagaaagaagctggccagaaccgccagccccgagaagaagcaggagctggtggagaagcccgccgtgggcgagagcaaggaggagaagatcgagctgaagagcatcaccgccgacggcgagagcccccccgccaccaagatcaacatggacgacctgcagcccaacgagaacgaggacaagagcccctaccccaaccccgagaccaccggcgaggaggacgaggaggagcccgagatgcccgtgggccccagacccagacccctgagcgagctgcacctgaaggagaaggccgtgcccatgcccgaggccagcgccttcttcatcttcagcagcaacaacagattcagactgcagtgccacagaatcgtgaacgacaccatcttcaccaacctgatcctgttcttcatcctgctgagcagcatcagcctggccgccgaggaccccgtgcagcacaccagcttcagaaaccacatcctgttctacttcgacatcgtgttcaccaccatcttcaccatcgagatcgccctgaagatgaccgcctacggcgccttcctgcacaagggcagcttctgcagaaactacttcaacatcctggacctgctggtggtgagcgtgagcctgatcagcttcggcatccagagcagcgccatcaacgtggtgaagatcctgagagtgctgagagtgctgagacccctgagagccatcaacagagccaagggcctgaagcacgtggtgcagtgcgtgttcgtggccatcagaaccatcggcaacatcgtgatcgtgaccaccctgctgcagttcatgttcgcctgcatcggcgtgcagctgttcaagggcaagctgtacacctgcagcgacagcagcaagcagaccgaggccgagtgcaagggcaactacatcacctacaaggacggcgaggtggaccaccccatcatccagcccagaagctgggagaacagcaagttcgacttcgacaacgtgctggccgccatgatggccctgttcaccgtgagcaccttcgagggctggcccgagctgctgtacagaagcatcgacagccacaccgaggacaagggccccatctacaactacagagtggagatcagcatcttcttcatcatctacatcatcatcatcgccttcttcatgatgaacatcttcgtgggcttcgtgatcgtgaccttccaggagcagggcgagcaggagtacaagaactgcgagctggacaagaaccagagacagtgcgtggagtacgccctgaaggccagacccctgagaagatacatccccaagaaccagcaccagtacaaggtgtggtacgtggtgaacagcacctacttcgagtacctgatgttcgtgctgatcctgctgaacaccatctgcctggccatgcagcactacggccagagctgcctgttcaagatcgccatgaacatcctgaacatgctgttcaccggcctgttcaccgtggagatgatcctgaagctgatcgccttcaagcccaagcactacttctgcgacgcctggaacaccttcgacgccctgatcgtggtgggcagcatcgtggacatcgccatcaccgaggtgaaccccgccgagcacacccagtgcagccccagcatgaacgccgaggagaacagcagaatcagcatcaccttcttcagactgttcagagtgatgagactggtgaagctgctgagcagaggcgagggcatcagaaccctgctgtggaccttcatcaagagcttccaggccctgccctacgtggccctgctgatcgtgatgctgttcttcatctacgccgtgatcggcatgcaggtgttcggcaagatcgccctgaacgacaccaccgagatcaacagaaacaacaacttccagaccttcccccaggccgtgctgctgctgttcagatgcgccaccggcgaggcctggcaggacatcatgctggcctgcatgcccggcaagaagtgcgcccccgagagcgagcccagcaacagcaccgagggcgagaccccctgcggcagcagcttcgccgtgttctacttcatcagcttctacatgctgtgcgccttcctgatcatcaacctgttcgtggccgtgatcatggacaacttcgactacctgaccagagactggagcatcctgggcccccaccacctggacgagttcaagagaatctgggccgagtacgaccccgaggccaagggcagaatcaagcacctggacgtggtgaccctgctgagaagaatccagccccccctgggcttcggcaagctgtgcccccacagagtggcctgcaagagactggtgagcatgaacatgcccctgaacagcgacggcaccgtgatgttcaacgccaccctgttcgccctggtgagaaccgccctgagaatcaagaccgaggagggccccagccccagcgaggcccaccagggcgccgaggaccccttcagacccgccggcaacctggagcaggccaacgaggagctgagagccatcatcaagaagatctggaagagaaccagcatgaagctgctggaccaggtggtgccccccgccggcgacgacgaggtgaccgtgggcaagttctacgccaccttcctgatccaggagtacttcagaaagttcaagaagagaaaggagcagggcctggtgggcaagcccagccagagaaacgccctgagcctgcaggccggcctgagaaccctgcacgacatcggccccgagatcagaagagccatcagcggcgacctgaccgccgaggaggagctggacaaggccatgaaggaggccgtgagcgccgccagcgaggacgacatcttcagaagagccggcggcctgttcggcaaccacgtgagctactaccagagcgacggcagaagcgccttcccccagaccttcaccacccagagacccctgcacatcaacaaggccggcagcagccagggcgacaccgagagccccagccacgagaagctggtggacagcaccttcacccccagcagctacagcagcaccggcagcaacgccaacatcaacaacgccaacaacaccgccctgggcagactgcccagacccgccggctaccccagcaccgtgagcaccgtggagggccacggcccccccctgagccccgccatcagagtgcaggaggtggcctggaagctgagcagcaacagatgccacagcagagagagccaggccgccatggccggccaggaggagaccagccaggacgagacctacgaggtgaagatgaaccacgacaccgaggcctgcagcgagcccagcctgctgagcaccgagatgctgagctaccaggacgacgagaacagacagctgaccctgcccgaggaggacaagagagacatcagacagagccccaagagaggcttcctgagaagcgccagcctgggcagaagagccagcttccacctggagtgcctgaagagacagaaggacagaggcggcgacatcagccagaagaccgtgctgcccctgcacctggtgcaccaccaggccctggccgtggccggcctgagccccctgctgcagagaagccacagccccgccagcttccccagacccttcgccaccccccccgccacccccggcagcagaggctggcccccccagcccgtgcccaccctgagactggagggcgtggagagcagcgagaagctgaacagcagcttccccagcatccactgcggcagctgggccgagaccacccccggcggcggcggcagcagcgccgccagaagagtgagacccgtgagcctgatggtgcccagccaggccggcgcccccggcagacagttccacggcagcgccagcagcctggtggaggccgtgctgatcagcgagggcctgggccagttcgcccaggaccccaagttcatcgaggtgaccacccaggagctggccgacgcctgcgacatgaccatcgaggagatggagagcgccgccgacaacatcctgagcggcggcgccccccagagccccaacggcgccctgctgcccttcgtgaactgcagagacgccggccaggacagagccggcggcgaggaggacgccggctgcgtgagagccagaggcagacccagcgaggaggagctgcaggacagcagagtgtacgtgagcagcctgtag

SEQ ID NO: 75027 - DNA, 6468 bp, synthetic construct
  misc_feature 1..6468: note = Description of Artificial Sequence: Synthetic coding sequence
  source 1..6468: mol_type = other DNA
atggtgaacgagaacaccagaatgtacatccccgaggagaaccaccagggcagcaactacggcagccccagacccgcccacgccaacatgaacgccaacgccgccgccggcctggcccccgagcacatccccacccccggcgccgccctgagctggcaggccgccatcgacgccgccagacaggccaagctgatgggcagcgccggcaacgccaccatcagcaccgtgagcagcacccagagaaagagacagcagtacggcaagcccaagaagcagggcagcaccaccgccaccagaccccccagagccctgctgtgcctgaccctgaagaaccccatcagaagagcctgcatcagcatcgtggagtggaagcccttcgagatcatcatcctgctgaccatcttcgccaactgcgtggccctggccatctacatccccttccccgaggacgacagcaacgccaccaacagcaacctggagagagtggagtacctgttcctgatcatcttcaccgtggaggccttcctgaaggtgatcgcctacggcctgctgttccaccccaacgcctacctgagaaacggctggaacctgctggacttcatcatcgtggtggtgggcctgttcagcgccatcctggagcaggccaccaaggccgacggcgccaacgccctgggcggcaagggcgccggcttcgacgtgaaggccctgagagccttcagagtgctgagacccctgagactggtgagcggcgtgcccagcctgcaggtggtgctgaacagcatcatcaaggccatggtgcccctgctgcacatcgccctgctggtgctgttcgtgatcatcatctacgccatcatcggcctggagctgttcatgggcaagatgcacaagacctgctacaaccaggagggcatcgccgacgtgcccgccgaggacgaccccagcccctgcgccctggagaccggccacggcagacagtgccagaacggcaccgtgtgcaagcccggctgggacggccccaagcacggcatcaccaacttcgacaacttcgccttcgccatgctgaccgtgttccagtgcatcaccatggagggctggaccgacgtgctgtactgggtgaacgacgccgtgggcagagactggccctggatctacttcgtgaccctgatcatcatcggcagcttcttcgtgctgaacctggtgctgggcgtgctgagcggcgagttcagcaaggagagagagaaggccaaggccagaggcgacttccagaagctgagagagaagcagcagctggaggaggacctgaagggctacctggactggatcacccaggccgaggacatcgaccccgagaacgaggacgagggcatggacgaggagaagcccagaaacatgagcatgcccaccagcgagaccgagagcgtgaacaccgagaacgtggccggcggcgacatcgagggcgagaactgcggcgccagactggcccacagaatcagcaagagcaagttcagcagatactggagaagatggaacagattctgcagaagaaagtgcagagccgccgtgaagagcaacgtgttctactggctggtgatcttcctggtgttcctgaacaccctgaccatcgccagcgagcactacaaccagcccaactggctgaccgaggtgcaggacaccgccaacaaggccctgctggccctgttcaccgccgagatgctgctgaagatgtacagcctgggcctgcaggcctacttcgtgagcctgttcaacagattcgactgcttcgtggtgtgcggcggcatcctggagaccatcctggtggagaccaagatcatgagccccctgggcatcagcgtgctgagatgcgtgagactgctgagaatcttcaagatcaccagatactggaacagcctgagcaacctggtggccagcctgctgaacagcgtgagaagcatcgccagcctgctgctgctgctgttcctgttcatcatcatcttcagcctgctgggcatgcagctgttcggcggcaagttcaacttcgacgagatgcagaccagaagaagcaccttcgacaacttcccccagagcctgctgaccgtgttccagatcctgaccggcgaggactggaacagcgtgatgtacgacggcatcatggcctacggcggccccagcttccccggcatgctggtgtgcatctacttcatcatcctgttcatctgcggcaactacatcctgctgaacgtgttcctggccatcgccgtggacaacctggccgacgccgagagcctgaccagcgcccagaaggaggaggaggaggagaaggagagaaagaagctggccagaaccgccagccccgagaagaagcaggagctggtggagaagcccgccgtgggcgagagcaaggaggagaagatcgagctgaagagcatcaccgccgacggcgagagcccccccgccaccaagatcaacatggacgacctgcagcccaacgagaacgaggacaagagcccctaccccaaccccgagaccaccggcgaggaggacgaggaggagcccgagatgcccgtgggccccagacccagacccctgagcgagctgcacctgaaggagaaggccgtgcccatgcccgaggccagcgccttcttcatcttcagcagcaacaacagattcagactgcagtgccacagaatcgtgaacgacaccatcttcaccaacctgatcctgttcttcatcctgctgagcagcatcagcctggccgccgaggaccccgtgcagcacaccagcttcagaaaccacatcctgggcaacgccgactacgtgttcaccagcatcttcaccctggagatcatcctgaagatgaccgcctacggcgccttcctgcacaagggcagcttctgcagaaactacttcaacatcctggacctgctggtggtgagcgtgagcctgatcagcttcggcatccagagcagcgccatcaacgtggtgaagatcctgagagtgctgagagtgctgagacccctgagagccatcaacagagccaagggcctgaagcacgtggtgcagtgcgtgttcgtggccatcagaaccatcggcaacatcgtgatcgtgaccaccctgctgcagttcatgttcgcctgcatcggcgtgcagctgttcaagggcaagctgtacacctgcagcgacagcagcaagcagaccgaggccgagtgcaagggcaactacatcacctacaaggacggcgaggtggaccaccccatcatccagcccagaagctgggagaacagcaagttcgacttcgacaacgtgctggccgccatgatggccctgttcaccgtgagcaccttcgagggctggcccgagctgctgtacagaagcatcgacagccacaccgaggacaagggccccatctacaactacagagtggagatcagcatcttcttcatcatctacatcatcatcatcgccttcttcatgatgaacatcttcgtgggcttcgtgatcgtgaccttccaggagcagggcgagcaggagtacaagaactgcgagctggacaagaaccagagacagtgcgtggagtacgccctgaaggccagacccctgagaagatacatccccaagaaccagcaccagtacaaggtgtggtacgtggtgaacagcacctacttcgagtacctgatgttcgtgctgatcctgctgaacaccatctgcctggccatgcagcactacggccagagctgcctgttcaagatcgccatgaacatcctgaacatgctgttcaccggcctgttcaccgtggagatgatcctgaagctgatcgccttcaagcccaagggctacttcagcgacccctggaacgtgttcgacttcctgatcgtgatcggcagcatcatcgacgtgatcctgagcgagaccaaccactacttctgcgacgcctggaacaccttcgacgccctgatcgtggtgggcagcatcgtggacatcgccatcaccgaggtgaacaacgccgaggagaacagcagaatcagcatcaccttcttcagactgttcagagtgatgagactggtgaagctgctgagcagaggcgagggcatcagaaccctgctgtggaccttcatcaagagcttccaggccctgccctacgtggccctgctgatcgtgatgctgttcttcatctacgccgtgatcggcatgcaggtgttcggcaagatcgccctgaacgacaccaccgagatcaacagaaacaacaacttccagaccttcccccaggccgtgctgctgctgttcagatgcgccaccggcgaggcctggcaggacatcatgctggcctgcatgcccggcaagaagtgcgcccccgagagcgagcccagcaacagcaccgagggcgagaccccctgcggcagcagcttcgccgtgttctacttcatcagcttctacatgctgtgcgccttcctgatcatcaacctgttcgtggccgtgatcatggacaacttcgactacctgaccagagactggagcatcctgggcccccaccacctggacgagttcaagagaatctgggccgagtacgaccccgaggccaagggcagaatcaagcacctggacgtggtgaccctgctgagaagaatccagccccccctgggcttcggcaagctgtgcccccacagagtggcctgcaagagactggtgagcatgaacatgcccctgaacagcgacggcaccgtgatgttcaacgccaccctgttcgccctggtgagaaccgccctgagaatcaagaccgagggcaacctggagcaggccaacgaggagctgagagccatcatcaagaagatctggaagagaaccagcatgaagctgctggaccaggtggtgccccccgccggcgacgacgaggtgaccgtgggcaagttctacgccaccttcctgatccaggagtacttcagaaagttcaagaagagaaaggagcagggcctggtgggcaagcccagccagagaaacgccctgagcctgcaggccggcctgagaaccctgcacgacatcggccccgagatcagaagagccatcagcggcgacctgaccgccgaggaggagctggacaaggccatgaaggaggccgtgagcgccgccagcgaggacgacatcttcagaagagccggcggcctgttcggcaaccacgtgagctactaccagagcgacggcagaagcgccttcccccagaccttcaccacccagagacccctgcacatcaacaaggccggcagcagccagggcgacaccgagagccccagccacgagaagctggtggacagcaccttcacccccagcagctacagcagcaccggcagcaacgccaacatcaacaacgccaacaacaccgccctgggcagactgcccagacccgccggctaccccagcaccgtgagcaccgtggagggccacggcccccccctgagccccgccatcagagtgcaggaggtggcctggaagctgagcagcaacagatgccacagcagagagagccaggccgccatggccggccaggaggagaccagccaggacgagacctacgaggtgaagatgaaccacgacaccgaggcctgcagcgagcccagcctgctgagcaccgagatgctgagctaccaggacgacgagaacagacagctgaccctgcccgaggaggacaagagagacatcagacagagccccaagagaggcttcctgagaagcgccagcctgggcagaagagccagcttccacctggagtgcctgaagagacagaaggacagaggcggcgacatcagccagaagaccgtgctgcccctgcacctggtgcaccaccaggccctggccgtggccggcctgagccccctgctgcagagaagccacagccccgccagcttccccagacccttcgccaccccccccgccacccccggcagcagaggctggcccccccagcccgtgcccaccctgagactggagggcgtggagagcagcgagaagctgaacagcagcttccccagcatccactgcggcagctgggccgagaccacccccggcggcggcggcagcagcgccgccagaagagtgagacccgtgagcctgatggtgcccagccaggccggcgcccccggcagacagttccacggcagcgccagcagcctggtggaggccgtgctgatcagcgagggcctgggccagttcgcccaggaccccaagttcatcgaggtgaccacccaggagctggccgacgcctgcgacatgaccatcgaggagatggagagcgccgccgacaacatcctgagcggcggcgccccccagagccccaacggcgccctgctgcccttcgtgaactgcagagacgccggccaggacagagccggcggcgaggaggacgccggctgcgtgagagccagaggcagacccagcgaggaggagctgcaggacagcagagtgtacgtgagcagcctgtag

SEQ ID NO: 75028 - DNA, 6630 bp, synthetic construct
  misc_feature 1..6630: note = Description of Artificial Sequence: Synthetic coding sequence
  source 1..6630: mol_type = other DNA
atggtgaacgagaacaccagaatgtacatccccgaggagaaccaccagggcagcaactacggcagccccagacccgcccacgccaacatgaacgccaacgccgccgccggcctggcccccgagcacatccccacccccggcgccgccctgagctggcaggccgccatcgacgccgccagacaggccaagctgatgggcagcgccggcaacgccaccatcagcaccgtgagcagcacccagagaaagagacagcagtacggcaagcccaagaagcagggcagcaccaccgccaccagaccccccagagccctgctgtgcctgaccctgaagaaccccatcagaagagcctgcatcagcatcgtggagtggaagcccttcgagatcatcatcctgctgaccatcttcgccaactgcgtggccctggccatctacatccccttccccgaggacgacagcaacgccaccaacagcaacctggagagagtggagtacctgttcctgatcatcttcaccgtggaggccttcctgaaggtgatcgcctacggcctgctgttccaccccaacgcctacctgagaaacggctggaacctgctggacttcatcatcgtggtggtgggcctgttcagcgccatcctggagcaggccaccaaggccgacggcgccaacgccctgggcggcaagggcgccggcttcgacgtgaaggccctgagagccttcagagtgctgagacccctgagactggtgagcggcgtgcccagcctgcaggtggtgctgaacagcatcatcaaggccatggtgcccctgctgcacatcgccctgctggtgctgttcgtgatcatcatctacgccatcatcggcctggagctgttcatgggcaagatgcacaagacctgctacaaccaggagggcatcgccgacgtgcccgccgaggacgaccccagcccctgcgccctggagaccggccacggcagacagtgccagaacggcaccgtgtgcaagcccggctgggacggccccaagcacggcatcaccaacttcgacaacttcgccttcgccatgctgaccgtgttccagtgcatcaccatggagggctggaccgacgtgctgtactggatgcaggacgccatgggctacgagctgccctgggtgtacttcgtgagcctggtgatcttcggcagcttcttcgtgctgaacctggtgctgggcgtgctgagcggcgagttcagcaaggagagagagaaggccaaggccagaggcgacttccagaagctgagagagaagcagcagctggaggaggacctgaagggctacctggactggatcacccaggccgaggacatcgaccccgagaacgaggacgagggcatggacgaggagaagcccagaaacatgagcatgcccaccagcgagaccgagagcgtgaacaccgagaacgtggccggcggcgacatcgagggcgagaactgcggcgccagactggcccacagaatcagcaagagcaagttcagcagatactggagaagatggaacagattctgcagaagaaagtgcagagccgccgtgaagagcaacgtgttctactggctggtgatcttcctggtgttcctgaacaccctgaccatcgccagcgagcactacaaccagcccaactggctgaccgaggtgcaggacaccgccaacaaggccctgctggccctgttcaccgccgagatgctgctgaagatgtacagcctgggcctgcaggcctacttcgtgagcctgttcaacagattcgactgcttcgtggtgtgcggcggcatcctggagaccatcctggtggagaccaagatcatgagccccctgggcatcagcgtgctgagatgcgtgagactgctgagaatcttcaagatcaccagatactggaacagcctgagcaacctggtggccagcctgctgaacagcgtgagaagcatcgccagcctgctgctgctgctgttcctgttcatcatcatcttcagcctgctgggcatgcagctgttcggcggcaagttcaacttcgacgagatgcagaccagaagaagcaccttcgacaacttcccccagagcctgctgaccgtgttccagatcctgaccggcgaggactggaacagcgtgatgtacgacggcatcatggcctacggcggccccagcttccccggcatgctggtgtgcatctacttcatcatcctgttcatctgcggcaactacatcctgctgaacgtgttcctggccatcgccgtggacaacctggccgacgccgagagcctgaccagcgcccagaaggaggaggaggaggagaaggagagaaagaagctggccagaaccgccagccccgagaagaagcaggagctggtggagaagcccgccgtgggcgagagcaaggaggagaagatcgagctgaagagcatcaccgccgacggcgagagcccccccgccaccaagatcaacatggacgacctgcagcccaacgagaacgaggacaagagcccctaccccaaccccgagaccaccggcgaggaggacgaggaggagcccgagatgcccgtgggccccagacccagacccctgagcgagctgcacctgaaggagaaggccgtgcccatgcccgaggccagcgccttcttcatcttcagcagcaacaacagattcagactgcagtgccacagaatcgtgaacgacaccatcttcaccaacctgatcctgttcttcatcctgctgagcagcatcagcctggccgccgaggaccccgtgcagcacaccagcttcagaaaccacatcctgttctacttcgacatcgtgttcaccaccatcttcaccatcgagatcgccctgaagatgaccgcctacggcgccttcctgcacaagggcagcttctgcagaaactacttcaacatcctggacctgctggtggtgagcgtgagcctgatcagcttcggcatccagagcagcgccatcaacgtggtgaagatcctgagagtgctgagagtgctgagacccctgagagccatcaacagagccaagggcctgaagcacgtggtgcagtgcgtgttcgtggccatcagaaccatcggcaacatcgtgatcgtgaccaccctgctgcagttcatgttcgcctgcatcggcgtgcagctgttcaagggcaagctgtacacctgcagcgacagcagcaagcagaccgaggccgagtgcaagggcaactacatcacctacaaggacggcgaggtggaccaccccatcatccagcccagaagctgggagaacagcaagttcgacttcgacaacgtgctggccgccatgatggccctgttcaccgtgagcaccttcgagggctggcccgagctgctgtacagaagcatcgacagccacaccgaggacaagggccccatctacaactacagagtggagatcagcatcttcttcatcatctacatcatcatcatcgccttcttcatgatgaacatcttcgtgggcttcgtgatcgtgaccttccaggagcagggcgagcaggagtacaagaactgcgagctggacaagaaccagagacagtgcgtggagtacgccctgaaggccagacccctgagaagatacatccccaagaaccagcaccagtacaaggtgtggtacgtggtgaacagcacctacttcgagtacctgatgttcgtgctgatcctgctgaacaccatctgcctggccatgcagcactacggccagagctgcctgttcaagatcgccatgaacatcctgaacatgctgttcaccggcctgttcaccgtggagatgatcctgaagctgatcgccttcaagcccaagcactacttctgcgacgcctggaacaccttcgacgccctgatcgtggtgggcagcatcgtggacatcgccatcaccgaggtgaaccccgccgagcacacccagtgcagccccagcatgaacgccgaggagaacagcagaatcagcatcaccttcttcagactgttcagagtgatgagactggtgaagctgctgagcagaggcgagggcatcagaaccctgctgtggaccttcatcaagagcttccaggccctgccctacgtggccctgctgatcgtgatgctgttcttcatctacgccgtgatcggcatgcaggtgttcggcaagatcgccctgaacgacaccaccgagatcaacagaaacaacaacttccagaccttcccccaggccgtgctgctgctgttcagatgcgccaccggcgaggcctggcaggacatcatgctggcctgcatgcccggcaagaagtgcgcccccgagagcgagcccagcaacagcaccgagggcgagaccccctgcggcagcagcttcgccgtgttctacttcatcagcttctacatgctgtgcgccttcctgatcatcaacctgttcgtggccgtgatcatggacaacttcgactacctgaccagagactggagcatcctgggcccccaccacctggacgagttcaagagaatctgggccgagtacgaccccgaggccaagggcagaatcaagcacctggacgtggtgaccctgctgagaagaatccagccccccctgggcttcggcaagctgtgcccccacagagtggcctgcaagagactggtgagcatgaacatgcccctgaacagcgacggcaccgtgatgttcaacgccaccctgttcgccctggtgagaaccgccctgagaatcaagaccgagggcaacctggagcaggccaacgaggagctgagagccatcatcaagaagatctggaagagaaccagcatgaagctgctggaccaggtggtgccccccgccggcgacgacgaggtgaccgtgggcaagttctacgccaccttcctgatccaggagtacttcagaaagttcaagaagagaaaggagcagggcctggtgggcaagcccagccagagaaacgccctgagcctgcaggccggcctgagaaccctgcacgacatcggccccgagatcagaagagccatcagcggcgacctgaccgccgaggaggagctggacaaggccatgaaggaggccgtgagcgccgccagcgaggacgacatcttcagaagagccggcggcctgttcggcaaccacgtgagctactaccagagcgacggcagaagcgccttcccccagaccttcaccacccagagacccctgcacatcaacaaggccggcagcagccagggcgacaccgagagccccagccacgagaagctggtggacagcaccttcacccccagcagctacagcagcaccggcagcaacgccaacatcaacaacgccaacaacaccgccctgggcagactgcccagacccgccggctaccccagcaccgtgagcaccgtggagggccacggcccccccctgagccccgccatcagagtgcaggaggtggcctggaagctgagcagcaacagaatgcactgctgcgacatgctggacggcggcaccttcccccccgccctgggccccagaagagcccccccctgcctgcaccagcagctgcagggcagcctggccggcctgagagaggacaccccctgcatcgtgcccggccacgccagcctgtgctgcagcagcagagtgggcgagtggctgcccgccggctgcaccgccccccagcacgccagatgccacagcagagagagccaggccgccatggccggccaggaggagaccagccaggacgagacctacgaggtgaagatgaaccacgacaccgaggcctgcagcgagcccagcctgctgagcaccgagatgctgagctaccaggacgacgagaacagacagctgaccctgcccgaggaggacaagagagacatcagacagagccccaagagaggcttcctgagaagcgccagcctgggcagaagagccagcttccacctggagtgcctgaagagacagaaggacagaggcggcgacatcagccagaagaccgtgctgcccctgcacctggtgcaccaccaggccctggccgtggccggcctgagccccctgctgcagagaagccacagccccgccagcttccccagacccttcgccaccccccccgccacccccggcagcagaggctggcccccccagcccgtgcccaccctgagactggagggcgtggagagcagcgagaagctgaacagcagcttccccagcatccactgcggcagctgggccgagaccacccccggcggcggcggcagcagcgccgccagaagagtgagacccgtgagcctgatggtgcccagccaggccggcgcccccggcagacagttccacggcagcgccagcagcctggtggaggccgtgctgatcagcgagggcctgggccagttcgcccaggaccccaagttcatcgaggtgaccacccaggagctggccgacgcctgcgacatgaccatcgaggagatggagagcgccgccgacaacatcctgagcggcggcgccccccagagccccaacggcgccctgctgcccttcgtgaactgcagagacgccggccaggacagagccggcggcgaggaggacgccggctgcgtgagagccagaggcagacccagcgaggaggagctgcaggacagcagagtgtacgtgagcagcctgtag

SEQ ID NO: 75029 - DNA, 6474 bp, synthetic construct
  misc_feature 1..6474: note = Description of Artificial Sequence: Synthetic coding sequence
  source 1..6474: mol_type = other DNA
atggtgaacgagaacaccagaatgtacatccccgaggagaaccaccagggcagcaactacggcagccccagacccgcccacgccaacatgaacgccaacgccgccgccggcctggcccccgagcacatccccacccccggcgccgccctgagctggcaggccgccatcgacgccgccagacaggccaagctgatgggcagcgccggcaacgccaccatcagcaccgtgagcagcacccagagaaagagacagcagtacggcaagcccaagaagcagggcagcaccaccgccaccagaccccccagagccctgctgtgcctgaccctgaagaaccccatcagaagagcctgcatcagcatcgtggagtggaagcccttcgagatcatcatcctgctgaccatcttcgccaactgcgtggccctggccatctacatccccttccccgaggacgacagcaacgccaccaacagcaacctggagagagtggagtacctgttcctgatcatcttcaccgtggaggccttcctgaaggtgatcgcctacggcctgctgttccaccccaacgcctacctgagaaacggctggaacctgctggacttcatcatcgtggtggtgggcctgttcagcgccatcctggagcaggccaccaaggccgacggcgccaacgccctgggcggcaagggcgccggcttcgacgtgaaggccctgagagccttcagagtgctgagacccctgagactggtgagcggcgtgcccagcctgcaggtggtgctgaacagcatcatcaaggccatggtgcccctgctgcacatcgccctgctggtgctgttcgtgatcatcatctacgccatcatcggcctggagctgttcatgggcaagatgcacaagacctgctacaaccaggagggcatcgccgacgtgcccgccgaggacgaccccagcccctgcgccctggagaccggccacggcagacagtgccagaacggcaccgtgtgcaagcccggctgggacggccccaagcacggcatcaccaacttcgacaacttcgccttcgccatgctgaccgtgttccagtgcatcaccatggagggctggaccgacgtgctgtactgggtgaacgacgccgtgggcagagactggccctggatctacttcgtgaccctgatcatcatcggcagcttcttcgtgctgaacctggtgctgggcgtgctgagcggcgagttcagcaaggagagagagaaggccaaggccagaggcgacttccagaagctgagagagaagcagcagctggaggaggacctgaagggctacctggactggatcacccaggccgaggacatcgaccccgagaacgaggacgagggcatggacgaggagaagcccagaaacatgagcatgcccaccagcgagaccgagagcgtgaacaccgagaacgtggccggcggcgacatcgagggcgagaactgcggcgccagactggcccacagaatcagcaagagcaagttcagcagatactggagaagatggaacagattctgcagaagaaagtgcagagccgccgtgaagagcaacgtgttctactggctggtgatcttcctggtgttcctgaacaccctgaccatcgccagcgagcactacaaccagcccaactggctgaccgaggtgcaggacaccgccaacaaggccctgctggccctgttcaccgccgagatgctgctgaagatgtacagcctgggcctgcaggcctacttcgtgagcctgttcaacagattcgactgcttcgtggtgtgcggcggcatcctggagaccatcctggtggagaccaagatcatgagccccctgggcatcagcgtgctgagatgcgtgagactgctgagaatcttcaagatcaccagatactggaacagcctgagcaacctggtggccagcctgctgaacagcgtgagaagcatcgccagcctgctgctgctgctgttcctgttcatcatcatcttcagcctgctgggcatgcagctgttcggcggcaagttcaacttcgacgagatgcagaccagaagaagcaccttcgacaacttcccccagagcctgctgaccgtgttccagatcctgaccggcgaggactggaacagcgtgatgtacgacggcatcatggcctacggcggccccagcttccccggcatgctggtgtgcatctacttcatcatcctgttcatctgcggcaactacatcctgctgaacgtgttcctggccatcgccgtggacaacctggccgacgccgagagcctgaccagcgcccagaaggaggaggaggaggagaaggagagaaagaagctggccagaaccgccagccccgagaagaagcaggagctggtggagaagcccgccgtgggcgagagcaaggaggagaagatcgagctgaagagcatcaccgccgacggcgagagcccccccgccaccaagatcaacatggacgacctgcagcccaacgagaacgaggacaagagcccctaccccaaccccgagaccaccggcgaggaggacgaggaggagcccgagatgcccgtgggccccagacccagacccctgagcgagctgcacctgaaggagaaggccgtgcccatgcccgaggccagcgccttcttcatcttcagcagcaacaacagattcagactgcagtgccacagaatcgtgaacgacaccatcttcaccaacctgatcctgttcttcatcctgctgagcagcatcagcctggccgccgaggaccccgtgcagcacaccagcttcagaaaccacatcctgggcaacgccgactacgtgttcaccagcatcttcaccctggagatcatcctgaagatgaccgcctacggcgccttcctgcacaagggcagcttctgcagaaactacttcaacatcctggacctgctggtggtgagcgtgagcctgatcagcttcggcatccagagcagcgccatcaacgtggtgaagatcctgagagtgctgagagtgctgagacccctgagagccatcaacagagccaagggcctgaagcacgtggtgcagtgcgtgttcgtggccatcagaaccatcggcaacatcgtgatcgtgaccaccctgctgcagttcatgttcgcctgcatcggcgtgcagctgttcaagggcaagctgtacacctgcagcgacagcagcaagcagaccgaggccgagtgcaagggcaactacatcacctacaaggacggcgaggtggaccaccccatcatccagcccagaagctgggagaacagcaagttcgacttcgacaacgtgctggccgccatgatggccctgttcaccgtgagcaccttcgagggctggcccgagctgctgtacagaagcatcgacagccacaccgaggacaagggccccatctacaactacagagtggagatcagcatcttcttcatcatctacatcatcatcatcgccttcttcatgatgaacatcttcgtgggcttcgtgatcgtgaccttccaggagcagggcgagcaggagtacaagaactgcgagctggacaagaaccagagacagtgcgtggagtacgccctgaaggccagacccctgagaagatacatccccaagaaccagcaccagtacaaggtgtggtacgtggtgaacagcacctacttcgagtacctgatgttcgtgctgatcctgctgaacaccatctgcctggccatgcagcactacggccagagctgcctgttcaagatcgccatgaacatcctgaacatgctgttcaccggcctgttcaccgtggagatgatcctgaagctgatcgccttcaagcccaagcactacttctgcgacgcctggaacaccttcgacgccctgatcgtggtgggcagcatcgtggacatcgccatcaccgaggtgaaccccgccgagcacacccagtgcagccccagcatgaacgccgaggagaacagcagaatcagcatcaccttcttcagactgttcagagtgatgagactggtgaagctgctgagcagaggcgagggcatcagaaccctgctgtggaccttcatcaagagcttccaggccctgccctacgtggccctgctgatcgtgatgctgttcttcatctacgccgtgatcggcatgcaggtgttcggcaagatcgccctgaacgacaccaccgagatcaacagaaacaacaacttccagaccttcccccaggccgtgctgctgctgttcagatgcgccaccggcgaggcctggcaggacatcatgctggcctgcatgcccggcaagaagtgcgcccccgagagcgagcccagcaacagcaccgagggcgagaccccctgcggcagcagcttcgccgtgttctacttcatcagcttctacatgctgtgcgccttcctgatcatcaacctgttcgtggccgtgatcatggacaacttcgactacctgaccagagactggagcatcctgggcccccaccacctggacgagttcaagagaatctgggccgagtacgaccccgaggccaagggcagaatcaagcacctggacgtggtgaccctgctgagaagaatccagccccccctgggcttcggcaagctgtgcccccacagagtggcctgcaagagactggtgagcatgaacatgcccctgaacagcgacggcaccgtgatgttcaacgccaccctgttcgccctggtgagaaccgccctgagaatcaagaccgaggagggccccagccccagcgaggcccaccagggcgccgaggaccccttcagacccgccggcaacctggagcaggccaacgaggagctgagagccatcatcaagaagatctggaagagaaccagcatgaagctgctggaccaggtggtgccccccgccggcgacgacgaggtgaccgtgggcaagttctacgccaccttcctgatccaggagtacttcagaaagttcaagaagagaaaggagcagggcctggtgggcaagcccagccagagaaacgccctgagcctgcaggccggcctgagaaccctgcacgacatcggccccgagatcagaagagccatcagcggcgacctgaccgccgaggaggagctggacaaggccatgaaggaggccgtgagcgccgccagcgaggacgacatcttcagaagagccggcggcctgttcggcaaccacgtgagctactaccagagcgacggcagaagcgccttcccccagaccttcaccacccagagacccctgcacatcaacaaggccggcagcagccagggcgacaccgagagccccagccacgagaagctggtggacagcaccttcacccccagcagctacagcagcaccggcagcaacgccaacatcaacaacgccaacaacaccgccctgggcagactgcccagacccgccggctaccccagcaccgtgagcaccgtggagggccacggcccccccctgagccccgccatcagagtgcaggaggtggcctggaagctgagcagcaacagatgccacagcagagagagccaggccgccatggccggccaggaggagaccagccaggacgagacctacgaggtgaagatgaaccacgacaccgaggcctgcagcgagcccagcctgctgagcaccgagatgctgagctaccaggacgacgagaacagacagctgaccctgcccgaggaggacaagagagacatcagacagagccccaagagaggcttcctgagaagcgccagcctgggcagaagagccagcttccacctggagtgcctgaagagacagaaggacagaggcggcgacatcagccagaagaccgtgctgcccctgcacctggtgcaccaccaggccctggccgtggccggcctgagccccctgctgcagagaagccacagccccgccagcttccccagacccttcgccaccccccccgccacccccggcagcagaggctggcccccccagcccgtgcccaccctgagactggagggcgtggagagcagcgagaagctgaacagcagcttccccagcatccactgcggcagctgggccgagaccacccccggcggcggcggcagcagcgccgccagaagagtgagacccgtgagcctgatggtgcccagccaggccggcgcccccggcagacagttccacggcagcgccagcagcctggtggaggccgtgctgatcagcgagggcctgggccagttcgcccaggaccccaagttcatcgaggtgaccacccaggagctggccgacgcctgcgacatgaccatcgaggagatggagagcgccgccgacaacatcctgagcggcggcgccccccagagccccaacggcgccctgctgcccttcgtgaactgcagagacgccggccaggacagagccggcggcgaggaggacgccggctgcgtgagagccagaggcagacccagcgaggaggagctgcaggacagcagagtgtacgtgagcagcctgtag

SEQ ID NO: 75030 - DNA, 6501 bp, synthetic construct
  misc_feature 1..6501: note = Description of Artificial Sequence: Synthetic coding sequence
  source 1..6501: mol_type = other DNA
atggtgaacgagaacaccagaatgtacatccccgaggagaaccaccagggcagcaactacggcagccccagacccgcccacgccaacatgaacgccaacgccgccgccggcctggcccccgagcacatccccacccccggcgccgccctgagctggcaggccgccatcgacgccgccagacaggccaagctgatgggcagcgccggcaacgccaccatcagcaccgtgagcagcacccagagaaagagacagcagtacggcaagcccaagaagcagggcagcaccaccgccaccagaccccccagagccctgctgtgcctgaccctgaagaaccccatcagaagagcctgcatcagcatcgtggagtggaagcccttcgagatcatcatcctgctgaccatcttcgccaactgcgtggccctggccatctacatccccttccccgaggacgacagcaacgccaccaacagcaacctggagagagtggagtacctgttcctgatcatcttcaccgtggaggccttcctgaaggtgatcgcctacggcctgctgttccaccccaacgcctacctgagaaacggctggaacctgctggacttcatcatcgtggtggtgggcctgttcagcgccatcctggagcaggccaccaaggccgacggcgccaacgccctgggcggcaagggcgccggcttcgacgtgaaggccctgagagccttcagagtgctgagacccctgagactggtgagcggcgtgcccagcctgcaggtggtgctgaacagcatcatcaaggccatggtgcccctgctgcacatcgccctgctggtgctgttcgtgatcatcatctacgccatcatcggcctggagctgttcatgggcaagatgcacaagacctgctacaaccaggagggcatcgccgacgtgcccgccgaggacgaccccagcccctgcgccctggagaccggccacggcagacagtgccagaacggcaccgtgtgcaagcccggctgggacggccccaagcacggcatcaccaacttcgacaacttcgccttcgccatgctgaccgtgttccagtgcatcaccatggagggctggaccgacgtgctgtactgggtgaacgacgccgtgggcagagactggccctggatctacttcgtgaccctgatcatcatcggcagcttcttcgtgctgaacctggtgctgggcgtgctgagcggcgagttcagcaaggagagagagaaggccaaggccagaggcgacttccagaagctgagagagaagcagcagctggaggaggacctgaagggctacctggactggatcacccaggccgaggacatcgaccccgagaacgaggacgagggcatggacgaggagaagcccagaaacatgagcatgcccaccagcgagaccgagagcgtgaacaccgagaacgtggccggcggcgacatcgagggcgagaactgcggcgccagactggcccacagaatcagcaagagcaagttcagcagatactggagaagatggaacagattctgcagaagaaagtgcagagccgccgtgaagagcaacgtgttctactggctggtgatcttcctggtgttcctgaacaccctgaccatcgccagcgagcactacaaccagcccaactggctgaccgaggtgcaggacaccgccaacaaggccctgctggccctgttcaccgccgagatgctgctgaagatgtacagcctgggcctgcaggcctacttcgtgagcctgttcaacagattcgactgcttcgtggtgtgcggcggcatcctggagaccatcctggtggagaccaagatcatgagccccctgggcatcagcgtgctgagatgcgtgagactgctgagaatcttcaagatcaccagatactggaacagcctgagcaacctggtggccagcctgctgaacagcgtgagaagcatcgccagcctgctgctgctgctgttcctgttcatcatcatcttcagcctgctgggcatgcagctgttcggcggcaagttcaacttcgacgagatgcagaccagaagaagcaccttcgacaacttcccccagagcctgctgaccgtgttccagatcctgaccggcgaggactggaacagcgtgatgtacgacggcatcatggcctacggcggccccagcttccccggcatgctggtgtgcatctacttcatcatcctgttcatctgcggcaactacatcctgctgaacgtgttcctggccatcgccgtggacaacctggccgacgccgagagcctgaccagcgcccagaaggaggaggaggaggagaaggagagaaagaagctggccagaaccgccagccccgagaagaagcaggagctggtggagaagcccgccgtgggcgagagcaaggaggagaagatcgagctgaagagcatcaccgccgacggcgagagcccccccgccaccaagatcaacatggacgacctgcagcccaacgagaacgaggacaagagcccctaccccaaccccgagaccaccggcgaggaggacgaggaggagcccgagatgcccgtgggccccagacccagacccctgagcgagctgcacctgaaggagaaggccgtgcccatgcccgaggccagcgccttcttcatcttcagcagcaacaacagattcagactgcagtgccacagaatcgtgaacgacaccatcttcaccaacctgatcctgttcttcatcctgctgagcagcatcagcctggccgccgaggaccccgtgcagcacaccagcttcagaaaccacatcctgttctacttcgacatcgtgttcaccaccatcttcaccatcgagatcgccctgaagatgaccgcctacggcgccttcctgcacaagggcagcttctgcagaaactacttcaacatcctggacctgctggtggtgagcgtgagcctgatcagcttcggcatccagagcagcgccatcaacgtggtgaagatcctgagagtgctgagagtgctgagacccctgagagccatcaacagagccaagggcctgaagcacgtggtgcagtgcgtgttcgtggccatcagaaccatcggcaacatcgtgatcgtgaccaccctgctgcagttcatgttcgcctgcatcggcgtgcagctgttcaagggcaagctgtacacctgcagcgacagcagcaagcagaccgaggccgagtgcaagggcaactacatcacctacaaggacggcgaggtggaccaccccatcatccagcccagaagctgggagaacagcaagttcgacttcgacaacgtgctggccgccatgatggccctgttcaccgtgagcaccttcgagggctggcccgagctgctgtacagaagcatcgacagccacaccgaggacaagggccccatctacaactacagagtggagatcagcatcttcttcatcatctacatcatcatcatcgccttcttcatgatgaacatcttcgtgggcttcgtgatcgtgaccttccaggagcagggcgagcaggagtacaagaactgcgagctggacaagaaccagagacagtgcgtggagtacgccctgaaggccagacccctgagaagatacatccccaagaaccagcaccagtacaaggtgtggtacgtggtgaacagcacctacttcgagtacctgatgttcgtgctgatcctgctgaacaccatctgcctggccatgcagcactacggccagagctgcctgttcaagatcgccatgaacatcctgaacatgctgttcaccggcctgttcaccgtggagatgatcctgaagctgatcgccttcaagcccaagggctacttcagcgacccctggaacgtgttcgacttcctgatcgtgatcggcagcatcatcgacgtgatcctgagcgagaccaaccactacttctgcgacgcctggaacaccttcgacgccctgatcgtggtgggcagcatcgtggacatcgccatcaccgaggtgaaccccgccgagcacacccagtgcagccccagcatgaacgccgaggagaacagcagaatcagcatcaccttcttcagactgttcagagtgatgagactggtgaagctgctgagcagaggcgagggcatcagaaccctgctgtggaccttcatcaagagcttccaggccctgccctacgtggccctgctgatcgtgatgctgttcttcatctacgccgtgatcggcatgcaggtgttcggcaagatcgccctgaacgacaccaccgagatcaacagaaacaacaacttccagaccttcccccaggccgtgctgctgctgttcagatgcgccaccggcgaggcctggcaggacatcatgctggcctgcatgcccggcaagaagtgcgcccccgagagcgagcccagcaacagcaccgagggcgagaccccctgcggcagcagcttcgccgtgttctacttcatcagcttctacatgctgtgcgccttcctgatcatcaacctgttcgtggccgtgatcatggacaacttcgactacctgaccagagactggagcatcctgggcccccaccacctggacgagttcaagagaatctgggccgagtacgaccccgaggccaagggcagaatcaagcacctggacgtggtgaccctgctgagaagaatccagccccccctgggcttcggcaagctgtgcccccacagagtggcctgcaagagactggtgagcatgaacatgcccctgaacagcgacggcaccgtgatgttcaacgccaccctgttcgccctggtgagaaccgccctgagaatcaagaccgagggcaacctggagcaggccaacgaggagctgagagccatcatcaagaagatctggaagagaaccagcatgaagctgctggaccaggtggtgccccccgccggcgacgacgaggtgaccgtgggcaagttctacgccaccttcctgatccaggagtacttcagaaagttcaagaagagaaaggagcagggcctggtgggcaagcccagccagagaaacgccctgagcctgcaggccggcctgagaaccctgcacgacatcggccccgagatcagaagagccatcagcggcgacctgaccgccgaggaggagctggacaaggccatgaaggaggccgtgagcgccgccagcgaggacgacatcttcagaagagccggcggcctgttcggcaaccacgtgagctactaccagagcgacggcagaagcgccttcccccagaccttcaccacccagagacccctgcacatcaacaaggccggcagcagccagggcgacaccgagagccccagccacgagaagctggtggacagcaccttcacccccagcagctacagcagcaccggcagcaacgccaacatcaacaacgccaacaacaccgccctgggcagactgcccagacccgccggctaccccagcaccgtgagcaccgtggagggccacggcccccccctgagccccgccatcagagtgcaggaggtggcctggaagctgagcagcaacagatgccacagcagagagagccaggccgccatggccggccaggaggagaccagccaggacgagacctacgaggtgaagatgaaccacgacaccgaggcctgcagcgagcccagcctgctgagcaccgagatgctgagctaccaggacgacgagaacagacagctgaccctgcccgaggaggacaagagagacatcagacagagccccaagagaggcttcctgagaagcgccagcctgggcagaagagccagcttccacctggagtgcctgaagagacagaaggacagaggcggcgacatcagccagaagaccgtgctgcccctgcacctggtgcaccaccaggccctggccgtggccggcctgagccccctgctgcagagaagccacagccccgccagcttccccagacccttcgccaccccccccgccacccccggcagcagaggctggcccccccagcccgtgcccaccctgagactggagggcgtggagagcagcgagaagctgaacagcagcttccccagcatccactgcggcagctgggccgagaccacccccggcggcggcggcagcagcgccgccagaagagtgagacccgtgagcctgatggtgcccagccaggccggcgcccccggcagacagttccacggcagcgccagcagcctggtggaggccgtgctgatcagcgagggcctgggccagttcgcccaggaccccaagttcatcgaggtgaccacccaggagctggccgacgcctgcgacatgaccatcgaggagatggagagcgccgccgacaacatcctgagcggcggcgccccccagagccccaacggcgccctgctgcccttcgtgaactgcagagacgccggccaggacagagccggcggcgaggaggacgccggctgcgtgagagccagaggcagacccagcgaggaggagctgcaggacagcagagtgtacgtgagcagcctgtag

SEQ ID NO: 75031 - DNA, 6417 bp, synthetic construct
  misc_feature 1..6417: note = Description of Artificial Sequence: Synthetic coding sequence
  source 1..6417: mol_type = other DNA
atggtgaacgagaacaccagaatgtacatccccgaggagaaccaccagggcagcaactacggcagccccagacccgcccacgccaacatgaacgccaacgccgccgccggcctggcccccgagcacatccccacccccggcgccgccctgagctggcaggccgccatcgacgccgccagacaggccaagctgatgggcagcgccggcaacgccaccatcagcaccgtgagcagcacccagagaaagagacagcagtacggcaagcccaagaagcagggcagcaccaccgccaccagaccccccagagccctgctgtgcctgaccctgaagaaccccatcagaagagcctgcatcagcatcgtggagtggaagcccttcgagatcatcatcctgctgaccatcttcgccaactgcgtggccctggccatctacatccccttccccgaggacgacagcaacgccaccaacagcaacctggagagagtggagtacctgttcctgatcatcttcaccgtggaggccttcctgaaggtgatcgcctacggcctgctgttccaccccaacgcctacctgagaaacggctggaacctgctggacttcatcatcgtggtggtgggcctgttcagcgccatcctggagcaggccaccaaggccgacggcgccaacgccctgggcggcaagggcgccggcttcgacgtgaaggccctgagagccttcagagtgctgagacccctgagactggtgagcggcgtgcccagcctgcaggtggtgctgaacagcatcatcaaggccatggtgcccctgctgcacatcgccctgctggtgctgttcgtgatcatcatctacgccatcatcggcctggagctgttcatgggcaagatgcacaagacctgctacaaccaggagggcatcgccgacgtgcccgccgaggacgaccccagcccctgcgccctggagaccggccacggcagacagtgccagaacggcaccgtgtgcaagcccggctgggacggccccaagcacggcatcaccaacttcgacaacttcgccttcgccatgctgaccgtgttccagtgcatcaccatggagggctggaccgacgtgctgtactggatgcaggacgccatgggctacgagctgccctgggtgtacttcgtgagcctggtgatcttcggcagcttcttcgtgctgaacctggtgctgggcgtgctgagcggcgagttcagcaaggagagagagaaggccaaggccagaggcgacttccagaagctgagagagaagcagcagctggaggaggacctgaagggctacctggactggatcacccaggccgaggacatcgaccccgagaacgaggacgagggcatggacgaggagaagcccagaaacatgagcatgcccaccagcgagaccgagagcgtgaacaccgagaacgtggccggcggcgacatcgagggcgagaactgcggcgccagactggcccacagaatcagcaagagcaagttcagcagatactggagaagatggaacagattctgcagaagaaagtgcagagccgccgtgaagagcaacgtgttctactggctggtgatcttcctggtgttcctgaacaccctgaccatcgccagcgagcactacaaccagcccaactggctgaccgaggtgcaggacaccgccaacaaggccctgctggccctgttcaccgccgagatgctgctgaagatgtacagcctgggcctgcaggcctacttcgtgagcctgttcaacagattcgactgcttcgtggtgtgcggcggcatcctggagaccatcctggtggagaccaagatcatgagccccctgggcatcagcgtgctgagatgcgtgagactgctgagaatcttcaagatcaccagatactggaacagcctgagcaacctggtggccagcctgctgaacagcgtgagaagcatcgccagcctgctgctgctgctgttcctgttcatcatcatcttcagcctgctgggcatgcagctgttcggcggcaagttcaacttcgacgagatgcagaccagaagaagcaccttcgacaacttcccccagagcctgctgaccgtgttccagatcctgaccggcgaggactggaacagcgtgatgtacgacggcatcatggcctacggcggccccagcttccccggcatgctggtgtgcatctacttcatcatcctgttcatctgcggcaactacatcctgctgaacgtgttcctggccatcgccgtggacaacctggccgacgccgagagcctgaccagcgcccagaaggaggaggaggaggagaaggagagaaagaagctggccagaaccgccagccccgagaagaagcaggagctggtggagaagcccgccgtgggcgagagcaaggaggagaagatcgagctgaagagcatcaccgccgacggcgagagcccccccgccaccaagatcaacatggacgacctgcagcccaacgagaacgaggacaagagcccctaccccaaccccgagaccaccggcgaggaggacgaggaggagcccgagatgcccgtgggccccagacccagacccctgagcgagctgcacctgaaggagaaggccgtgcccatgcccgaggccagcgccttcttcatcttcagcagcaacaacagattcagactgcagtgccacagaatcgtgaacgacaccatcttcaccaacctgatcctgttcttcatcctgctgagcagcatcagcctggccgccgaggaccccgtgcagcacaccagcttcagaaaccacatcctgggcaacgccgactacgtgttcaccagcatcttcaccctggagatcatcctgaagatgaccgcctacggcgccttcctgcacaagggcagcttctgcagaaactacttcaacatcctggacctgctggtggtgagcgtgagcctgatcagcttcggcatccagagcagcgccatcaacgtggtgaagatcctgagagtgctgagagtgctgagacccctgagagccatcaacagagccaagggcctgaagcacgtggtgcagtgcgtgttcgtggccatcagaaccatcggcaacatcgtgatcgtgaccaccctgctgcagttcatgttcgcctgcatcggcgtgcagctgttcaagggcaagctgtacacctgcagcgacagcagcaagcagaccgaggccgagtgcaagggcaactacatcacctacaaggacggcgaggtggaccaccccatcatccagcccagaagctgggagaacagcaagttcgacttcgacaacgtgctggccgccatgatggccctgttcaccgtgagcaccttcgagggctggcccgagctgctgtacagaagcatcgacagccacaccgaggacaagggccccatctacaactacagagtggagatcagcatcttcttcatcatctacatcatcatcatcgccttcttcatgatgaacatcttcgtgggcttcgtgatcgtgaccttccaggagcagggcgagcaggagtacaagaactgcgagctggacaagaaccagagacagtgcgtggagtacgccctgaaggccagacccctgagaagatacatccccaagaaccagcaccagtacaaggtgtggtacgtggtgaacagcacctacttcgagtacctgatgttcgtgctgatcctgctgaacaccatctgcctggccatgcagcactacggccagagctgcctgttcaagatcgccatgaacatcctgaacatgctgttcaccggcctgttcaccgtggagatgatcctgaagctgatcgccttcaagcccaagcactacttctgcgacgcctggaacaccttcgacgccctgatcgtggtgggcagcatcgtggacatcgccatcaccgaggtgaaccccgccgagcacacccagtgcagccccagcatgaacgccgaggagaacagcagaatcagcatcaccttcttcagactgttcagagtgatgagactggtgaagctgctgagcagaggcgagggcatcagaaccctgctgtggaccttcatcaagagcttccaggccctgccctacgtggccctgctgatcgtgatgctgttcttcatctacgccgtgatcggcatgcaggtgttcggcaagatcgccctgaacgacaccaccgagatcaacagaaacaacaacttccagaccttcccccaggccgtgctgctgctgttcagatgcgccaccggcgaggcctggcaggacatcatgctggcctgcatgcccggcaagaagtgcgcccccgagagcgagcccagcaacagcaccgagggcgagaccccctgcggcagcagcttcgccgtgttctacttcatcagcttctacatgctgtgcgccttcctgatcatcaacctgttcgtggccgtgatcatggacaacttcgactacctgaccagagactggagcatcctgggcccccaccacctggacgagttcaagagaatctgggccgagtacgaccccgaggccaagggcagaatcaagcacctggacgtggtgaccctgctgagaagaatccagccccccctgggcttcggcaagctgtgcccccacagagtggcctgcaagagactggtgagcatgaacatgcccctgaacagcgacggcaccgtgatgttcaacgccaccctgttcgccctggtgagaaccgccctgagaatcaagaccgagggcaacctggagcaggccaacgaggagctgagagccatcatcaagaagatctggaagagaaccagcatgaagctgctggaccaggtggtgccccccgccggcgacgacgaggtgaccgtgggcaagttctacgccaccttcctgatccaggagtacttcagaaagttcaagaagagaaaggagcagggcctggtgggcaagcccagccagagaaacgccctgagcctgcaggccggcctgagaaccctgcacgacatcggccccgagatcagaagagccatcagcggcgacctgaccgccgaggaggagctggacaaggccatgaaggaggccgtgagcgccgccagcgaggacgacatcttcagaagagccggcggcctgttcggcaaccacgtgagctactaccagagcgacggcagaagcgccttcccccagaccttcaccacccagagacccctgcacatcaacaaggccggcagcagccagggcgacaccgagagccccagccacgagaagctggtggacagcaccttcacccccagcagctacagcagcaccggcagcaacgccaacatcaacaacgccaacaacaccgccctgggcagactgcccagacccgccggctaccccagcaccgtgagcaccgtggagggccacggcccccccctgagccccgccatcagagtgcaggaggtggcctggaagctgagcagcaacagatgccacagcagagagagccaggccgccatggccggccaggaggagaccagccaggacgagacctacgaggtgaagatgaaccacgacaccgaggcctgcagcgagcccagcctgctgagcaccgagatgctgagctaccaggacgacgagaacagacagctgaccctgcccgaggaggacaagagagacatcagacagagccccaagagaggcttcctgagaagcgccagcctgggcagaagagccagcttccacctggagtgcctgaagagacagaaggacagaggcggcgacatcagccagaagaccgtgctgcccctgcacctggtgcaccaccaggccctggccgtggccggcctgagccccctgctgcagagaagccacagccccgccagcttccccagacccttcgccaccccccccgccacccccggcagcagaggctggcccccccagcccgtgcccaccctgagactggagggcgtggagagcagcgagaagctgaacagcagcttccccagcatccactgcggcagctgggccgagaccacccccggcggcggcggcagcagcgccgccagaagagtgagacccgtgagcctgatggtgcccagccaggccggcgcccccggcagacagttccacggcagcgccagcagcctggtggaggccgtgctgatcagcgagggcctgggccagttcgcccaggaccccaagttcatcgaggtgaccacccaggagctggccgacgcctgcgacatgaccatcgaggagatggagagcgccgccgacaacatcctgagcggcggcgccccccagagccccaacggcgccctgctgcccttcgtgaactgcagagacgccggccaggacagagccggcggcgaggaggacgccggctgcgtgagagccagaggcagacccagcgaggaggagctgcaggacagcagagtgtacgtgagcagcctgtag

SEQ ID NO: 75032 - DNA, 6417 bp, synthetic construct
  misc_feature 1..6417: note = Description of Artificial Sequence: Synthetic coding sequence
  source 1..6417: mol_type = other DNA
atggtgaacgagaacaccagaatgtacatccccgaggagaaccaccagggcagcaactacggcagccccagacccgcccacgccaacatgaacgccaacgccgccgccggcctggcccccgagcacatccccacccccggcgccgccctgagctggcaggccgccatcgacgccgccagacaggccaagctgatgggcagcgccggcaacgccaccatcagcaccgtgagcagcacccagagaaagagacagcagtacggcaagcccaagaagcagggcagcaccaccgccaccagaccccccagagccctgctgtgcctgaccctgaagaaccccatcagaagagcctgcatcagcatcgtggagtggaagcccttcgagatcatcatcctgctgaccatcttcgccaactgcgtggccctggccatctacatccccttccccgaggacgacagcaacgccaccaacagcaacctggagagagtggagtacctgttcctgatcatcttcaccgtggaggccttcctgaaggtgatcgcctacggcctgctgttccaccccaacgcctacctgagaaacggctggaacctgctggacttcatcatcgtggtggtgggcctgttcagcgccatcctggagcaggccaccaaggccgacggcgccaacgccctgggcggcaagggcgccggcttcgacgtgaaggccctgagagccttcagagtgctgagacccctgagactggtgagcggcgtgcccagcctgcaggtggtgctgaacagcatcatcaaggccatggtgcccctgctgcacatcgccctgctggtgctgttcgtgatcatcatctacgccatcatcggcctggagctgttcatgggcaagatgcacaagacctgctacaaccaggagggcatcgccgacgtgcccgccgaggacgaccccagcccctgcgccctggagaccggccacggcagacagtgccagaacggcaccgtgtgcaagcccggctgggacggccccaagcacggcatcaccaacttcgacaacttcgccttcgccatgctgaccgtgttccagtgcatcaccatggagggctggaccgacgtgctgtactgggtgaacgacgccgtgggcagagactggccctggatctacttcgtgaccctgatcatcatcggcagcttcttcgtgctgaacctggtgctgggcgtgctgagcggcgagttcagcaaggagagagagaaggccaaggccagaggcgacttccagaagctgagagagaagcagcagctggaggaggacctgaagggctacctggactggatcacccaggccgaggacatcgaccccgagaacgaggacgagggcatggacgaggagaagcccagaaacatgagcatgcccaccagcgagaccgagagcgtgaacaccgagaacgtggccggcggcgacatcgagggcgagaactgcggcgccagactggcccacagaatcagcaagagcaagttcagcagatactggagaagatggaacagattctgcagaagaaagtgcagagccgccgtgaagagcaacgtgttctactggctggtgatcttcctggtgttcctgaacaccctgaccatcgccagcgagcactacaaccagcccaactggctgaccgaggtgcaggacaccgccaacaaggccctgctggccctgttcaccgccgagatgctgctgaagatgtacagcctgggcctgcaggcctacttcgtgagcctgttcaacagattcgactgcttcgtggtgtgcggcggcatcctggagaccatcctggtggagaccaagatcatgagccccctgggcatcagcgtgctgagatgcgtgagactgctgagaatcttcaagatcaccagatactggaacagcctgagcaacctggtggccagcctgctgaacagcgtgagaagcatcgccagcctgctgctgctgctgttcctgttcatcatcatcttcagcctgctgggcatgcagctgttcggcggcaagttcaacttcgacgagatgcagaccagaagaagcaccttcgacaacttcccccagagcctgctgaccgtgttccagatcctgaccggcgaggactggaacagcgtgatgtacgacggcatcatggcctacggcggccccagcttccccggcatgctggtgtgcatctacttcatcatcctgttcatctgcggcaactacatcctgctgaacgtgttcctggccatcgccgtggacaacctggccgacgccgagagcctgaccagcgcccagaaggaggaggaggaggagaaggagagaaagaagctggccagaaccgccagccccgagaagaagcaggagctggtggagaagcccgccgtgggcgagagcaaggaggagaagatcgagctgaagagcatcaccgccgacggcgagagcccccccgccaccaagatcaacatggacgacctgcagcccaacgagaacgaggacaagagcccctaccccaaccccgagaccaccggcgaggaggacgaggaggagcccgagatgcccgtgggccccagacccagacccctgagcgagctgcacctgaaggagaaggccgtgcccatgcccgaggccagcgccttcttcatcttcagcagcaacaacagattcagactgcagtgccacagaatcgtgaacgacaccatcttcaccaacctgatcctgttcttcatcctgctgagcagcatcagcctggccgccgaggaccccgtgcagcacaccagcttcagaaaccacatcctgggcaacgccgactacgtgttcaccagcatcttcaccctggagatcatcctgaagatgaccgcctacggcgccttcctgcacaagggcagcttctgcagaaactacttcaacatcctggacctgctggtggtgagcgtgagcctgatcagcttcggcatccagagcagcgccatcaacgtggtgaagatcctgagagtgctgagagtgctgagacccctgagagccatcaacagagccaagggcctgaagcacgtggtgcagtgcgtgttcgtggccatcagaaccatcggcaacatcgtgatcgtgaccaccctgctgcagttcatgttcgcctgcatcggcgtgcagctgttcaagggcaagctgtacacctgcagcgacagcagcaagcagaccgaggccgagtgcaagggcaactacatcacctacaaggacggcgaggtggaccaccccatcatccagcccagaagctgggagaacagcaagttcgacttcgacaacgtgctggccgccatgatggccctgttcaccgtgagcaccttcgagggctggcccgagctgctgtacagaagcatcgacagccacaccgaggacaagggccccatctacaactacagagtggagatcagcatcttcttcatcatctacatcatcatcatcgccttcttcatgatgaacatcttcgtgggcttcgtgatcgtgaccttccaggagcagggcgagcaggagtacaagaactgcgagctggacaagaaccagagacagtgcgtggagtacgccctgaaggccagacccctgagaagatacatccccaagaaccagcaccagtacaaggtgtggtacgtggtgaacagcacctacttcgagtacctgatgttcgtgctgatcctgctgaacaccatctgcctggccatgcagcactacggccagagctgcctgttcaagatcgccatgaacatcctgaacatgctgttcaccggcctgttcaccgtggagatgatcctgaagctgatcgccttcaagcccaagggctacttcagcgacccctggaacgtgttcgacttcctgatcgtgatcggcagcatcatcgacgtgatcctgagcgagaccaaccccgccgagcacacccagtgcagccccagcatgaacgccgaggagaacagcagaatcagcatcaccttcttcagactgttcagagtgatgagactggtgaagctgctgagcagaggcgagggcatcagaaccctgctgtggaccttcatcaagagcttccaggccctgccctacgtggccctgctgatcgtgatgctgttcttcatctacgccgtgatcggcatgcaggtgttcggcaagatcgccctgaacgacaccaccgagatcaacagaaacaacaacttccagaccttcccccaggccgtgctgctgctgttcagatgcgccaccggcgaggcctggcaggacatcatgctggcctgcatgcccggcaagaagtgcgcccccgagagcgagcccagcaacagcaccgagggcgagaccccctgcggcagcagcttcgccgtgttctacttcatcagcttctacatgctgtgcgccttcctgatcatcaacctgttcgtggccgtgatcatggacaacttcgactacctgaccagagactggagcatcctgggcccccaccacctggacgagttcaagagaatctgggccgagtacgaccccgaggccaagggcagaatcaagcacctggacgtggtgaccctgctgagaagaatccagccccccctgggcttcggcaagctgtgcccccacagagtggcctgcaagagactggtgagcatgaacatgcccctgaacagcgacggcaccgtgatgttcaacgccaccctgttcgccctggtgagaaccgccctgagaatcaagaccgagggcaacctggagcaggccaacgaggagctgagagccatcatcaagaagatctggaagagaaccagcatgaagctgctggaccaggtggtgccccccgccggcgacgacgaggtgaccgtgggcaagttctacgccaccttcctgatccaggagtacttcagaaagttcaagaagagaaaggagcagggcctggtgggcaagcccagccagagaaacgccctgagcctgcaggccggcctgagaaccctgcacgacatcggccccgagatcagaagagccatcagcggcgacctgaccgccgaggaggagctggacaaggccatgaaggaggccgtgagcgccgccagcgaggacgacatcttcagaagagccggcggcctgttcggcaaccacgtgagctactaccagagcgacggcagaagcgccttcccccagaccttcaccacccagagacccctgcacatcaacaaggccggcagcagccagggcgacaccgagagccccagccacgagaagctggtggacagcaccttcacccccagcagctacagcagcaccggcagcaacgccaacatcaacaacgccaacaacaccgccctgggcagactgcccagacccgccggctaccccagcaccgtgagcaccgtggagggccacggcccccccctgagccccgccatcagagtgcaggaggtggcctggaagctgagcagcaacagatgccacagcagagagagccaggccgccatggccggccaggaggagaccagccaggacgagacctacgaggtgaagatgaaccacgacaccgaggcctgcagcgagcccagcctgctgagcaccgagatgctgagctaccaggacgacgagaacagacagctgaccctgcccgaggaggacaagagagacatcagacagagccccaagagaggcttcctgagaagcgccagcctgggcagaagagccagcttccacctggagtgcctgaagagacagaaggacagaggcggcgacatcagccagaagaccgtgctgcccctgcacctggtgcaccaccaggccctggccgtggccggcctgagccccctgctgcagagaagccacagccccgccagcttccccagacccttcgccaccccccccgccacccccggcagcagaggctggcccccccagcccgtgcccaccctgagactggagggcgtggagagcagcgagaagctgaacagcagcttccccagcatccactgcggcagctgggccgagaccacccccggcggcggcggcagcagcgccgccagaagagtgagacccgtgagcctgatggtgcccagccaggccggcgcccccggcagacagttccacggcagcgccagcagcctggtggaggccgtgctgatcagcgagggcctgggccagttcgcccaggaccccaagttcatcgaggtgaccacccaggagctggccgacgcctgcgacatgaccatcgaggagatggagagcgccgccgacaacatcctgagcggcggcgccccccagagccccaacggcgccctgctgcccttcgtgaactgcagagacgccggccaggacagagccggcggcgaggaggacgccggctgcgtgagagccagaggcagacccagcgaggaggagctgcaggacagcagagtgtacgtgagcagcctgtag

SEQ ID NO: 75033 - DNA, 6435 bp, synthetic construct
  misc_feature 1..6435: note = Description of Artificial Sequence: Synthetic coding sequence
  source 1..6435: mol_type = other DNA
atggtgaacgagaacaccagaatgtacatccccgaggagaaccaccagggcagcaactacggcagccccagacccgcccacgccaacatgaacgccaacgccgccgccggcctggcccccgagcacatccccacccccggcgccgccctgagctggcaggccgccatcgacgccgccagacaggccaagctgatgggcagcgccggcaacgccaccatcagcaccgtgagcagcacccagagaaagagacagcagtacggcaagcccaagaagcagggcagcaccaccgccaccagaccccccagagccctgctgtgcctgaccctgaagaaccccatcagaagagcctgcatcagcatcgtggagtggaagcccttcgagatcatcatcctgctgaccatcttcgccaactgcgtggccctggccatctacatccccttccccgaggacgacagcaacgccaccaacagcaacctggagagagtggagtacctgttcctgatcatcttcaccgtggaggccttcctgaaggtgatcgcctacggcctgctgttccaccccaacgcctacctgagaaacggctggaacctgctggacttcatcatcgtggtggtgggcctgttcagcgccatcctggagcaggccaccaaggccgacggcgccaacgccctgggcggcaagggcgccggcttcgacgtgaaggccctgagagccttcagagtgctgagacccctgagactggtgagcggcgtgcccagcctgcaggtggtgctgaacagcatcatcaaggccatggtgcccctgctgcacatcgccctgctggtgctgttcgtgatcatcatctacgccatcatcggcctggagctgttcatgggcaagatgcacaagacctgctacaaccaggagggcatcgccgacgtgcccgccgaggacgaccccagcccctgcgccctggagaccggccacggcagacagtgccagaacggcaccgtgtgcaagcccggctgggacggccccaagcacggcatcaccaacttcgacaacttcgccttcgccatgctgaccgtgttccagtgcatcaccatggagggctggaccgacgtgctgtactgggtgaacgacgccgtgggcagagactggccctggatctacttcgtgaccctgatcatcatcggcagcttcttcgtgctgaacctggtgctgggcgtgctgagcggcgagttcagcaaggagagagagaaggccaaggccagaggcgacttccagaagctgagagagaagcagcagctggaggaggacctgaagggctacctggactggatcacccaggccgaggacatcgaccccgagaacgaggacgagggcatggacgaggagaagcccagaaacatgagcatgcccaccagcgagaccgagagcgtgaacaccgagaacgtggccggcggcgacatcgagggcgagaactgcggcgccagactggcccacagaatcagcaagagcaagttcagcagatactggagaagatggaacagattctgcagaagaaagtgcagagccgccgtgaagagcaacgtgttctactggctggtgatcttcctggtgttcctgaacaccctgaccatcgccagcgagcactacaaccagcccaactggctgaccgaggtgcaggacaccgccaacaaggccctgctggccctgttcaccgccgagatgctgctgaagatgtacagcctgggcctgcaggcctacttcgtgagcctgttcaacagattcgactgcttcgtggtgtgcggcggcatcctggagaccatcctggtggagaccaagatcatgagccccctgggcatcagcgtgctgagatgcgtgagactgctgagaatcttcaagatcaccagatactggaacagcctgagcaacctggtggccagcctgctgaacagcgtgagaagcatcgccagcctgctgctgctgctgttcctgttcatcatcatcttcagcctgctgggcatgcagctgttcggcggcaagttcaacttcgacgagatgcagaccagaagaagcaccttcgacaacttcccccagagcctgctgaccgtgttccagatcctgaccggcgaggactggaacagcgtgatgtacgacggcatcatggcctacggcggccccagcttccccggcatgctggtgtgcatctacttcatcatcctgttcatctgcggcaactacatcctgctgaacgtgttcctggccatcgccgtggacaacctggccgacgccgagagcctgaccagcgcccagaaggaggaggaggaggagaaggagagaaagaagctggccagaaccgccagccccgagaagaagcaggagctggtggagaagcccgccgtgggcgagagcaaggaggagaagatcgagctgaagagcatcaccgccgacggcgagagcccccccgccaccaagatcaacatggacgacctgcagcccaacgagaacgaggacaagagcccctaccccaaccccgagaccaccggcgaggaggacgaggaggagcccgagatgcccgtgggccccagacccagacccctgagcgagctgcacctgaaggagaaggccgtgcccatgcccgaggccagcgccttcttcatcttcagcagcaacaacagattcagactgcagtgccacagaatcgtgaacgacaccatcttcaccaacctgatcctgttcttcatcctgctgagcagcatcagcctggccgccgaggaccccgtgcagcacaccagcttcagaaaccacatcctgttctacttcgacatcgtgttcaccaccatcttcaccatcgagatcgccctgaagatgaccgcctacggcgccttcctgcacaagggcagcttctgcagaaactacttcaacatcctggacctgctggtggtgagcgtgagcctgatcagcttcggcatccagagcagcgccatcaacgtggtgaagatcctgagagtgctgagagtgctgagacccctgagagccatcaacagagccaagggcctgaagcacgtggtgcagtgcgtgttcgtggccatcagaaccatcggcaacatcgtgatcgtgaccaccctgctgcagttcatgttcgcctgcatcggcgtgcagctgttcaagggcaagctgtacacctgcagcgacagcagcaagcagaccgaggccgagtgcaagggcaactacatcacctacaaggacggcgaggtggaccaccccatcatccagcccagaagctgggagaacagcaagttcgacttcgacaacgtgctggccgccatgatggccctgttcaccgtgagcaccttcgagggctggcccgagctgctgtacagaagcatcgacagccacaccgaggacaagggccccatctacaactacagagtggagatcagcatcttcttcatcatctacatcatcatcatcgccttcttcatgatgaacatcttcgtgggcttcgtgatcgtgaccttccaggagcagggcgagcaggagtacaagaactgcgagctggacaagaaccagagacagtgcgtggagtacgccctgaaggccagacccctgagaagatacatccccaagaaccagcaccagtacaaggtgtggtacgtggtgaacagcacctacttcgagtacctgatgttcgtgctgatcctgctgaacaccatctgcctggccatgcagcactacggccagagctgcctgttcaagatcgccatgaacatcctgaacatgctgttcaccggcctgttcaccgtggagatgatcctgaagctgatcgccttcaagcccaagcactacttctgcgacgcctggaacaccttcgacgccctgatcgtggtgggcagcatcgtggacatcgccatcaccgagaacgccgaggagaacagcagaatcagcatcaccttcttcagactgttcagagtgatgagactggtgaagctgctgagcagaggcgagggcatcagaaccctgctgtggaccttcatcaagagcttccaggccctgccctacgtggccctgctgatcgtgatgctgttcttcatctacgccgtgatcggcatgcaggtgttcggcaagatcgccctgaacgacaccaccgagatcaacagaaacaacaacttccagaccttcccccaggccgtgctgctgctgttcagatgcgccaccggcgaggcctggcaggacatcatgctggcctgcatgcccggcaagaagtgcgcccccgagagcgagcccagcaacagcaccgagggcgagaccccctgcggcagcagcttcgccgtgttctacttcatcagcttctacatgctgtgcgccttcctgatcatcaacctgttcgtggccgtgatcatggacaacttcgactacctgaccagagactggagcatcctgggcccccaccacctggacgagttcaagagaatctgggccgagtacgaccccgaggccaagggcagaatcaagcacctggacgtggtgaccctgctgagaagaatccagccccccctgggcttcggcaagctgtgcccccacagagtggcctgcaagagactggtgagcatgaacatgcccctgaacagcgacggcaccgtgatgttcaacgccaccctgttcgccctggtgagaaccgccctgagaatcaagaccgaggagggccccagccccagcgaggcccaccagggcgccgaggaccccttcagacccgccggcaacctggagcaggccaacgaggagctgagagccatcatcaagaagatctggaagagaaccagcatgaagctgctggaccaggtggtgccccccgccggcgacgacgaggtgaccgtgggcaagttctacgccaccttcctgatccaggagtacttcagaaagttcaagaagagaaaggagcagggcctggtgggcaagcccagccagagaaacgccctgagcctgcaggccggcctgagaaccctgcacgacatcggccccgagatcagaagagccatcagcggcgacctgaccgccgaggaggagctggacaaggccatgaaggaggccgtgagcgccgccagcgaggacgacatcttcagaagagccggcggcctgttcggcaaccacgtgagctactaccagagcgacggcagaagcgccttcccccagaccttcaccacccagagacccctgcacatcaacaaggccggcagcagccagggcgacaccgagagccccagccacgagaagctggtggacagcaccttcacccccagcagctacagcagcaccggcagcaacgccaacatcaacaacgccaacaacaccgccctgggcagactgcccagacccgccggctaccccagcaccgtgagcaccgtggagggccacggcccccccctgagccccgccatcagagtgcaggaggtggcctggaagctgagcagcaacagatgccacagcagagagagccaggccgccatggccggccaggaggagaccagccaggacgagacctacgaggtgaagatgaaccacgacaccgaggcctgcagcgagcccagcctgctgagcaccgagatgctgagctaccaggacgacgagaacagacagctgaccctgcccgaggaggacaagagagacatcagacagagccccaagagaggcttcctgagaagcgccagcctgggcagaagagccagcttccacctggagtgcctgaagagacagaaggacagaggcggcgacatcagccagaagaccgtgctgcccctgcacctggtgcaccaccaggccctggccgtggccggcctgagccccctgctgcagagaagccacagccccgccagcttccccagacccttcgccaccccccccgccacccccggcagcagaggctggcccccccagcccgtgcccaccctgagactggagggcgtggagagcagcgagaagctgaacagcagcttccccagcatccactgcggcagctgggccgagaccacccccggcggcggcggcagcagcgccgccagaagagtgagacccgtgagcctgatggtgcccagccaggccggcgcccccggcagacagttccacggcagcgccagcagcctggtggaggccgtgctgatcagcgagggcctgggccagttcgcccaggaccccaagttcatcgaggtgaccacccaggagctggccgacgcctgcgacatgaccatcgaggagatggagagcgccgccgacaacatcctgagcggcggcgccccccagagccccaacggcgccctgctgcccttcgtgaactgcagagacgccggccaggacagagccggcggcgaggaggacgccggctgcgtgagagccagaggcagacccagcgaggaggagctgcaggacagcagagtgtacgtgagcagcctgtag

SEQ ID NO: 75034 - DNA, 6417 bp, synthetic construct
  misc_feature 1..6417: note = Description of Artificial Sequence: Synthetic coding sequence
  source 1..6417: mol_type = other DNA
atggtgaacgagaacaccagaatgtacatccccgaggagaaccaccagggcagcaactacggcagccccagacccgcccacgccaacatgaacgccaacgccgccgccggcctggcccccgagcacatccccacccccggcgccgccctgagctggcaggccgccatcgacgccgccagacaggccaagctgatgggcagcgccggcaacgccaccatcagcaccgtgagcagcacccagagaaagagacagcagtacggcaagcccaagaagcagggcagcaccaccgccaccagaccccccagagccctgctgtgcctgaccctgaagaaccccatcagaagagcctgcatcagcatcgtggagtggaagcccttcgagatcatcatcctgctgaccatcttcgccaactgcgtggccctggccatctacatccccttccccgaggacgacagcaacgccaccaacagcaacctggagagagtggagtacctgttcctgatcatcttcaccgtggaggccttcctgaaggtgatcgcctacggcctgctgttccaccccaacgcctacctgagaaacggctggaacctgctggacttcatcatcgtggtggtgggcctgttcagcgccatcctggagcaggccaccaaggccgacggcgccaacgccctgggcggcaagggcgccggcttcgacgtgaaggccctgagagccttcagagtgctgagacccctgagactggtgagcggcgtgcccagcctgcaggtggtgctgaacagcatcatcaaggccatggtgcccctgctgcacatcgccctgctggtgctgttcgtgatcatcatctacgccatcatcggcctggagctgttcatgggcaagatgcacaagacctgctacaaccaggagggcatcgccgacgtgcccgccgaggacgaccccagcccctgcgccctggagaccggccacggcagacagtgccagaacggcaccgtgtgcaagcccggctgggacggccccaagcacggcatcaccaacttcgacaacttcgccttcgccatgctgaccgtgttccagtgcatcaccatggagggctggaccgacgtgctgtactgggtgaacgacgccgtgggcagagactggccctggatctacttcgtgaccctgatcatcatcggcagcttcttcgtgctgaacctggtgctgggcgtgctgagcggcgagttcagcaaggagagagagaaggccaaggccagaggcgacttccagaagctgagagagaagcagcagctggaggaggacctgaagggctacctggactggatcacccaggccgaggacatcgaccccgagaacgaggacgagggcatggacgaggagaagcccagaaacatgagcatgcccaccagcgagaccgagagcgtgaacaccgagaacgtggccggcggcgacatcgagggcgagaactgcggcgccagactggcccacagaatcagcaagagcaagttcagcagatactggagaagatggaacagattctgcagaagaaagtgcagagccgccgtgaagagcaacgtgttctactggctggtgatcttcctggtgttcctgaacaccctgaccatcgccagcgagcactacaaccagcccaactggctgaccgaggtgcaggacaccgccaacaaggccctgctggccctgttcaccgccgagatgctgctgaagatgtacagcctgggcctgcaggcctacttcgtgagcctgttcaacagattcgactgcttcgtggtgtgcggcggcatcctggagaccatcctggtggagaccaagatcatgagccccctgggcatcagcgtgctgagatgcgtgagactgctgagaatcttcaagatcaccagatactggaacagcctgagcaacctggtggccagcctgctgaacagcgtgagaagcatcgccagcctgctgctgctgctgttcctgttcatcatcatcttcagcctgctgggcatgcagctgttcggcggcaagttcaacttcgacgagatgcagaccagaagaagcaccttcgacaacttcccccagagcctgctgaccgtgttccagatcctgaccggcgaggactggaacagcgtgatgtacgacggcatcatggcctacggcggccccagcttccccggcatgctggtgtgcatctacttcatcatcctgttcatctgcggcaactacatcctgctgaacgtgttcctggccatcgccgtggacaacctggccgacgccgagagcctgaccagcgcccagaaggaggaggaggaggagaaggagagaaagaagctggccagaaccgccagccccgagaagaagcaggagctggtggagaagcccgccgtgggcgagagcaaggaggagaagatcgagctgaagagcatcaccgccgacggcgagagcccccccgccaccaagatcaacatggacgacctgcagcccaacgagaacgaggacaagagcccctaccccaaccccgagaccaccggcgaggaggacgaggaggagcccgagatgcccgtgggccccagacccagacccctgagcgagctgcacctgaaggagaaggccgtgcccatgcccgaggccagcgccttcttcatcttcagcagcaacaacagattcagactgcagtgccacagaatcgtgaacgacaccatcttcaccaacctgatcctgttcttcatcctgctgagcagcatcagcctggccgccgaggaccccgtgcagcacaccagcttcagaaaccacatcctgttctacttcgacatcgtgttcaccaccatcttcaccatcgagatcgccctgaagatgaccgcctacggcgccttcctgcacaagggcagcttctgcagaaactacttcaacatcctggacctgctggtggtgagcgtgagcctgatcagcttcggcatccagagcagcgccatcaacgtggtgaagatcctgagagtgctgagagtgctgagacccctgagagccatcaacagagccaagggcctgaagcacgtggtgcagtgcgtgttcgtggccatcagaaccatcggcaacatcgtgatcgtgaccaccctgctgcagttcatgttcgcctgcatcggcgtgcagctgttcaagggcaagctgtacacctgcagcgacagcagcaagcagaccgaggccgagtgcaagggcaactacatcacctacaaggacggcgaggtggaccaccccatcatccagcccagaagctgggagaacagcaagttcgacttcgacaacgtgctggccgccatgatggccctgttcaccgtgagcaccttcgagggctggcccgagctgctgtacagaagcatcgacagccacaccgaggacaagggccccatctacaactacagagtggagatcagcatcttcttcatcatctacatcatcatcatcgccttcttcatgatgaacatcttcgtgggcttcgtgatcgtgaccttccaggagcagggcgagcaggagtacaagaactgcgagctggacaagaaccagagacagtgcgtggagtacgccctgaaggccagacccctgagaagatacatccccaagaaccagcaccagtacaaggtgtggtacgtggtgaacagcacctacttcgagtacctgatgttcgtgctgatcctgctgaacaccatctgcctggccatgcagcactacggccagagctgcctgttcaagatcgccatgaacatcctgaacatgctgttcaccggcctgttcaccgtggagatgatcctgaagctgatcgccttcaagcccaagcactacttctgcgacgcctggaacaccttcgacgccctgatcgtggtgggcagcatcgtggacatcgccatcaccgaggtgaaccccgccgagcacacccagtgcagccccagcatgaacgccgaggagaacagcagaatcagcatcaccttcttcagactgttcagagtgatgagactggtgaagctgctgagcagaggcgagggcatcagaaccctgctgtggaccttcatcaagagcttccaggccctgccctacgtggccctgctgatcgtgatgctgttcttcatctacgccgtgatcggcatgcaggtgttcggcaagatcgccctgaacgacaccaccgagatcaacagaaacaacaacttccagaccttcccccaggccgtgctgctgctgttcagatgcgccaccggcgaggcctggcaggacatcatgctggcctgcatgcccggcaagaagtgcgcccccgagagcgagcccagcaacagcaccgagggcgagaccccctgcggcagcagcttcgccgtgttctacttcatcagcttctacatgctgtgcgccttcctgatcatcaacctgttcgtggccgtgatcatggacaacttcgactacctgaccagagactggagcatcctgggcccccaccacctggacgagttcaagagaatctgggccgagtacgaccccgaggccaagggcagaatcaagcacctggacgtggtgaccctgctgagaagaatccagccccccctgggcttcggcaagctgtgcccccacagagtggcctgcaagagactggtgagcatgaacatgcccctgaacagcgacggcaccgtgatgttcaacgccaccctgttcgccctggtgagaaccgccctgagaatcaagaccgagggcaacctggagcaggccaacgaggagctgagagccatcatcaagaagatctggaagagaaccagcatgaagctgctggaccaggtggtgccccccgccggcgacgacgaggtgaccgtgggcaagttctacgccaccttcctgatccaggagtacttcagaaagttcaagaagagaaaggagcagggcctggtgggcaagcccagccagagaaacgccctgagcctgcaggccggcctgagaaccctgcacgacatcggccccgagatcagaagagccatcagcggcgacctgaccgccgaggaggagctggacaaggccatgaaggaggccgtgagcgccgccagcgaggacgacatcttcagaagagccggcggcctgttcggcaaccacgtgagctactaccagagcgacggcagaagcgccttcccccagaccttcaccacccagagacccctgcacatcaacaaggccggcagcagccagggcgacaccgagagccccagccacgagaagctggtggacagcaccttcacccccagcagctacagcagcaccggcagcaacgccaacatcaacaacgccaacaacaccgccctgggcagactgcccagacccgccggctaccccagcaccgtgagcaccgtggagggccacggcccccccctgagccccgccatcagagtgcaggaggtggcctggaagctgagcagcaacagatgccacagcagagagagccaggccgccatggccggccaggaggagaccagccaggacgagacctacgaggtgaagatgaaccacgacaccgaggcctgcagcgagcccagcctgctgagcaccgagatgctgagctaccaggacgacgagaacagacagctgaccctgcccgaggaggacaagagagacatcagacagagccccaagagaggcttcctgagaagcgccagcctgggcagaagagccagcttccacctggagtgcctgaagagacagaaggacagaggcggcgacatcagccagaagaccgtgctgcccctgcacctggtgcaccaccaggccctggccgtggccggcctgagccccctgctgcagagaagccacagccccgccagcttccccagacccttcgccaccccccccgccacccccggcagcagaggctggcccccccagcccgtgcccaccctgagactggagggcgtggagagcagcgagaagctgaacagcagcttccccagcatccactgcggcagctgggccgagaccacccccggcggcggcggcagcagcgccgccagaagagtgagacccgtgagcctgatggtgcccagccaggccggcgcccccggcagacagttccacggcagcgccagcagcctggtggaggccgtgctgatcagcgagggcctgggccagttcgcccaggaccccaagttcatcgaggtgaccacccaggagctggccgacgcctgcgacatgaccatcgaggagatggagagcgccgccgacaacatcctgagcggcggcgccccccagagccccaacggcgccctgctgcccttcgtgaactgcagagacgccggccaggacagagccggcggcgaggaggacgccggctgcgtgagagccagaggcagacccagcgaggaggagctgcaggacagcagagtgtacgtgagcagcctgtag

SEQ ID NO: 75035 - DNA, 6474 bp, synthetic construct
  misc_feature 1..6474: note = Description of Artificial Sequence: Synthetic coding sequence
  source 1..6474: mol_type = other DNA
atggtgaacgagaacaccagaatgtacatccccgaggagaaccaccagggcagcaactacggcagccccagacccgcccacgccaacatgaacgccaacgccgccgccggcctggcccccgagcacatccccacccccggcgccgccctgagctggcaggccgccatcgacgccgccagacaggccaagctgatgggcagcgccggcaacgccaccatcagcaccgtgagcagcacccagagaaagagacagcagtacggcaagcccaagaagcagggcagcaccaccgccaccagaccccccagagccctgctgtgcctgaccctgaagaaccccatcagaagagcctgcatcagcatcgtggagtggaagcccttcgagatcatcatcctgctgaccatcttcgccaactgcgtggccctggccatctacatccccttccccgaggacgacagcaacgccaccaacagcaacctggagagagtggagtacctgttcctgatcatcttcaccgtggaggccttcctgaaggtgatcgcctacggcctgctgttccaccccaacgcctacctgagaaacggctggaacctgctggacttcatcatcgtggtggtgggcctgttcagcgccatcctggagcaggccaccaaggccgacggcgccaacgccctgggcggcaagggcgccggcttcgacgtgaaggccctgagagccttcagagtgctgagacccctgagactggtgagcggcgtgcccagcctgcaggtggtgctgaacagcatcatcaaggccatggtgcccctgctgcacatcgccctgctggtgctgttcgtgatcatcatctacgccatcatcggcctggagctgttcatgggcaagatgcacaagacctgctacaaccaggagggcatcgccgacgtgcccgccgaggacgaccccagcccctgcgccctggagaccggccacggcagacagtgccagaacggcaccgtgtgcaagcccggctgggacggccccaagcacggcatcaccaacttcgacaacttcgccttcgccatgctgaccgtgttccagtgcatcaccatggagggctggaccgacgtgctgtactgggtgaacgacgccgtgggcagagactggccctggatctacttcgtgaccctgatcatcatcggcagcttcttcgtgctgaacctggtgctgggcgtgctgagcggcgagttcagcaaggagagagagaaggccaaggccagaggcgacttccagaagctgagagagaagcagcagctggaggaggacctgaagggctacctggactggatcacccaggccgaggacatcgaccccgagaacgaggacgagggcatggacgaggagaagcccagaaacatgagcatgcccaccagcgagaccgagagcgtgaacaccgagaacgtggccggcggcgacatcgagggcgagaactgcggcgccagactggcccacagaatcagcaagagcaagttcagcagatactggagaagatggaacagattctgcagaagaaagtgcagagccgccgtgaagagcaacgtgttctactggctggtgatcttcctggtgttcctgaacaccctgaccatcgccagcgagcactacaaccagcccaactggctgaccgaggtgcaggacaccgccaacaaggccctgctggccctgttcaccgccgagatgctgctgaagatgtacagcctgggcctgcaggcctacttcgtgagcctgttcaacagattcgactgcttcgtggtgtgcggcggcatcctggagaccatcctggtggagaccaagatcatgagccccctgggcatcagcgtgctgagatgcgtgagactgctgagaatcttcaagatcaccagatactggaacagcctgagcaacctggtggccagcctgctgaacagcgtgagaagcatcgccagcctgctgctgctgctgttcctgttcatcatcatcttcagcctgctgggcatgcagctgttcggcggcaagttcaacttcgacgagatgcagaccagaagaagcaccttcgacaacttcccccagagcctgctgaccgtgttccagatcctgaccggcgaggactggaacagcgtgatgtacgacggcatcatggcctacggcggccccagcttccccggcatgctggtgtgcatctacttcatcatcctgttcatctgcggcaactacatcctgctgaacgtgttcctggccatcgccgtggacaacctggccgacgccgagagcctgaccagcgcccagaaggaggaggaggaggagaaggagagaaagaagctggccagaaccgccagccccgagaagaagcaggagctggtggagaagcccgccgtgggcgagagcaaggaggagaagatcgagctgaagagcatcaccgccgacggcgagagcccccccgccaccaagatcaacatggacgacctgcagcccaacgagaacgaggacaagagcccctaccccaaccccgagaccaccggcgaggaggacgaggaggagcccgagatgcccgtgggccccagacccagacccctgagcgagctgcacctgaaggagaaggccgtgcccatgcccgaggccagcgccttcttcatcttcagcagcaacaacagattcagactgcagtgccacagaatcgtgaacgacaccatcttcaccaacctgatcctgttcttcatcctgctgagcagcatcagcctggccgccgaggaccccgtgcagcacaccagcttcagaaaccacatcctgttctacttcgacatcgtgttcaccaccatcttcaccatcgagatcgccctgaagatgaccgcctacggcgccttcctgcacaagggcagcttctgcagaaactacttcaacatcctggacctgctggtggtgagcgtgagcctgatcagcttcggcatccagagcagcgccatcaacgtggtgaagatcctgagagtgctgagagtgctgagacccctgagagccatcaacagagccaagggcctgaagcacgtggtgcagtgcgtgttcgtggccatcagaaccatcggcaacatcgtgatcgtgaccaccctgctgcagttcatgttcgcctgcatcggcgtgcagctgttcaagggcaagctgtacacctgcagcgacagcagcaagcagaccgaggccgagtgcaagggcaactacatcacctacaaggacggcgaggtggaccaccccatcatccagcccagaagctgggagaacagcaagttcgacttcgacaacgtgctggccgccatgatggccctgttcaccgtgagcaccttcgagggctggcccgagctgctgtacagaagcatcgacagccacaccgaggacaagggccccatctacaactacagagtggagatcagcatcttcttcatcatctacatcatcatcatcgccttcttcatgatgaacatcttcgtgggcttcgtgatcgtgaccttccaggagcagggcgagcaggagtacaagaactgcgagctggacaagaaccagagacagtgcgtggagtacgccctgaaggccagacccctgagaagatacatccccaagaaccagcaccagtacaaggtgtggtacgtggtgaacagcacctacttcgagtacctgatgttcgtgctgatcctgctgaacaccatctgcctggccatgcagcactacggccagagctgcctgttcaagatcgccatgaacatcctgaacatgctgttcaccggcctgttcaccgtggagatgatcctgaagctgatcgccttcaagcccaagggctacttcagcgacccctggaacgtgttcgacttcctgatcgtgatcggcagcatcatcgacgtgatcctgagcgagaccaaccccgccgagcacacccagtgcagccccagcatgaacgccgaggagaacagcagaatcagcatcaccttcttcagactgttcagagtgatgagactggtgaagctgctgagcagaggcgagggcatcagaaccctgctgtggaccttcatcaagagcttccaggccctgccctacgtggccctgctgatcgtgatgctgttcttcatctacgccgtgatcggcatgcaggtgttcggcaagatcgccctgaacgacaccaccgagatcaacagaaacaacaacttccagaccttcccccaggccgtgctgctgctgttcagatgcgccaccggcgaggcctggcaggacatcatgctggcctgcatgcccggcaagaagtgcgcccccgagagcgagcccagcaacagcaccgagggcgagaccccctgcggcagcagcttcgccgtgttctacttcatcagcttctacatgctgtgcgccttcctgatcatcaacctgttcgtggccgtgatcatggacaacttcgactacctgaccagagactggagcatcctgggcccccaccacctggacgagttcaagagaatctgggccgagtacgaccccgaggccaagggcagaatcaagcacctggacgtggtgaccctgctgagaagaatccagccccccctgggcttcggcaagctgtgcccccacagagtggcctgcaagagactggtgagcatgaacatgcccctgaacagcgacggcaccgtgatgttcaacgccaccctgttcgccctggtgagaaccgccctgagaatcaagaccgaggagggccccagccccagcgaggcccaccagggcgccgaggaccccttcagacccgccggcaacctggagcaggccaacgaggagctgagagccatcatcaagaagatctggaagagaaccagcatgaagctgctggaccaggtggtgccccccgccggcgacgacgaggtgaccgtgggcaagttctacgccaccttcctgatccaggagtacttcagaaagttcaagaagagaaaggagcagggcctggtgggcaagcccagccagagaaacgccctgagcctgcaggccggcctgagaaccctgcacgacatcggccccgagatcagaagagccatcagcggcgacctgaccgccgaggaggagctggacaaggccatgaaggaggccgtgagcgccgccagcgaggacgacatcttcagaagagccggcggcctgttcggcaaccacgtgagctactaccagagcgacggcagaagcgccttcccccagaccttcaccacccagagacccctgcacatcaacaaggccggcagcagccagggcgacaccgagagccccagccacgagaagctggtggacagcaccttcacccccagcagctacagcagcaccggcagcaacgccaacatcaacaacgccaacaacaccgccctgggcagactgcccagacccgccggctaccccagcaccgtgagcaccgtggagggccacggcccccccctgagccccgccatcagagtgcaggaggtggcctggaagctgagcagcaacagatgccacagcagagagagccaggccgccatggccggccaggaggagaccagccaggacgagacctacgaggtgaagatgaaccacgacaccgaggcctgcagcgagcccagcctgctgagcaccgagatgctgagctaccaggacgacgagaacagacagctgaccctgcccgaggaggacaagagagacatcagacagagccccaagagaggcttcctgagaagcgccagcctgggcagaagagccagcttccacctggagtgcctgaagagacagaaggacagaggcggcgacatcagccagaagaccgtgctgcccctgcacctggtgcaccaccaggccctggccgtggccggcctgagccccctgctgcagagaagccacagccccgccagcttccccagacccttcgccaccccccccgccacccccggcagcagaggctggcccccccagcccgtgcccaccctgagactggagggcgtggagagcagcgagaagctgaacagcagcttccccagcatccactgcggcagctgggccgagaccacccccggcggcggcggcagcagcgccgccagaagagtgagacccgtgagcctgatggtgcccagccaggccggcgcccccggcagacagttccacggcagcgccagcagcctggtggaggccgtgctgatcagcgagggcctgggccagttcgcccaggaccccaagttcatcgaggtgaccacccaggagctggccgacgcctgcgacatgaccatcgaggagatggagagcgccgccgacaacatcctgagcggcggcgccccccagagccccaacggcgccctgctgcccttcgtgaactgcagagacgccggccaggacagagccggcggcgaggaggacgccggctgcgtgagagccagaggcagacccagcgaggaggagctgcaggacagcagagtgtacgtgagcagcctgtag

SEQ ID NO: 75036 - DNA, 6630 bp, synthetic construct
  misc_feature 1..6630: note = Description of Artificial Sequence: Synthetic coding sequence
  source 1..6630: mol_type = other DNA
atggtgaacgagaacaccagaatgtacatccccgaggagaaccaccagggcagcaactacggcagccccagacccgcccacgccaacatgaacgccaacgccgccgccggcctggcccccgagcacatccccacccccggcgccgccctgagctggcaggccgccatcgacgccgccagacaggccaagctgatgggcagcgccggcaacgccaccatcagcaccgtgagcagcacccagagaaagagacagcagtacggcaagcccaagaagcagggcagcaccaccgccaccagaccccccagagccctgctgtgcctgaccctgaagaaccccatcagaagagcctgcatcagcatcgtggagtggaagcccttcgagatcatcatcctgctgaccatcttcgccaactgcgtggccctggccatctacatccccttccccgaggacgacagcaacgccaccaacagcaacctggagagagtggagtacctgttcctgatcatcttcaccgtggaggccttcctgaaggtgatcgcctacggcctgctgttccaccccaacgcctacctgagaaacggctggaacctgctggacttcatcatcgtggtggtgggcctgttcagcgccatcctggagcaggccaccaaggccgacggcgccaacgccctgggcggcaagggcgccggcttcgacgtgaaggccctgagagccttcagagtgctgagacccctgagactggtgagcggcgtgcccagcctgcaggtggtgctgaacagcatcatcaaggccatggtgcccctgctgcacatcgccctgctggtgctgttcgtgatcatcatctacgccatcatcggcctggagctgttcatgggcaagatgcacaagacctgctacaaccaggagggcatcgccgacgtgcccgccgaggacgaccccagcccctgcgccctggagaccggccacggcagacagtgccagaacggcaccgtgtgcaagcccggctgggacggccccaagcacggcatcaccaacttcgacaacttcgccttcgccatgctgaccgtgttccagtgcatcaccatggagggctggaccgacgtgctgtactggatgcaggacgccatgggctacgagctgccctgggtgtacttcgtgagcctggtgatcttcggcagcttcttcgtgctgaacctggtgctgggcgtgctgagcggcgagttcagcaaggagagagagaaggccaaggccagaggcgacttccagaagctgagagagaagcagcagctggaggaggacctgaagggctacctggactggatcacccaggccgaggacatcgaccccgagaacgaggacgagggcatggacgaggagaagcccagaaacatgagcatgcccaccagcgagaccgagagcgtgaacaccgagaacgtggccggcggcgacatcgagggcgagaactgcggcgccagactggcccacagaatcagcaagagcaagttcagcagatactggagaagatggaacagattctgcagaagaaagtgcagagccgccgtgaagagcaacgtgttctactggctggtgatcttcctggtgttcctgaacaccctgaccatcgccagcgagcactacaaccagcccaactggctgaccgaggtgcaggacaccgccaacaaggccctgctggccctgttcaccgccgagatgctgctgaagatgtacagcctgggcctgcaggcctacttcgtgagcctgttcaacagattcgactgcttcgtggtgtgcggcggcatcctggagaccatcctggtggagaccaagatcatgagccccctgggcatcagcgtgctgagatgcgtgagactgctgagaatcttcaagatcaccagatactggaacagcctgagcaacctggtggccagcctgctgaacagcgtgagaagcatcgccagcctgctgctgctgctgttcctgttcatcatcatcttcagcctgctgggcatgcagctgttcggcggcaagttcaacttcgacgagatgcagaccagaagaagcaccttcgacaacttcccccagagcctgctgaccgtgttccagatcctgaccggcgaggactggaacagcgtgatgtacgacggcatcatggcctacggcggccccagcttccccggcatgctggtgtgcatctacttcatcatcctgttcatctgcggcaactacatcctgctgaacgtgttcctggccatcgccgtggacaacctggccgacgccgagagcctgaccagcgcccagaaggaggaggaggaggagaaggagagaaagaagctggccagaaccgccagccccgagaagaagcaggagctggtggagaagcccgccgtgggcgagagcaaggaggagaagatcgagctgaagagcatcaccgccgacggcgagagcccccccgccaccaagatcaacatggacgacctgcagcccaacgagaacgaggacaagagcccctaccccaaccccgagaccaccggcgaggaggacgaggaggagcccgagatgcccgtgggccccagacccagacccctgagcgagctgcacctgaaggagaaggccgtgcccatgcccgaggccagcgccttcttcatcttcagcagcaacaacagattcagactgcagtgccacagaatcgtgaacgacaccatcttcaccaacctgatcctgttcttcatcctgctgagcagcatcagcctggccgccgaggaccccgtgcagcacaccagcttcagaaaccacatcctgttctacttcgacatcgtgttcaccaccatcttcaccatcgagatcgccctgaagatgaccgcctacggcgccttcctgcacaagggcagcttctgcagaaactacttcaacatcctggacctgctggtggtgagcgtgagcctgatcagcttcggcatccagagcagcgccatcaacgtggtgaagatcctgagagtgctgagagtgctgagacccctgagagccatcaacagagccaagggcctgaagcacgtggtgcagtgcgtgttcgtggccatcagaaccatcggcaacatcgtgatcgtgaccaccctgctgcagttcatgttcgcctgcatcggcgtgcagctgttcaagggcaagctgtacacctgcagcgacagcagcaagcagaccgaggccgagtgcaagggcaactacatcacctacaaggacggcgaggtggaccaccccatcatccagcccagaagctgggagaacagcaagttcgacttcgacaacgtgctggccgccatgatggccctgttcaccgtgagcaccttcgagggctggcccgagctgctgtacagaagcatcgacagccacaccgaggacaagggccccatctacaactacagagtggagatcagcatcttcttcatcatctacatcatcatcatcgccttcttcatgatgaacatcttcgtgggcttcgtgatcgtgaccttccaggagcagggcgagcaggagtacaagaactgcgagctggacaagaaccagagacagtgcgtggagtacgccctgaaggccagacccctgagaagatacatccccaagaaccagcaccagtacaaggtgtggtacgtggtgaacagcacctacttcgagtacctgatgttcgtgctgatcctgctgaacaccatctgcctggccatgcagcactacggccagagctgcctgttcaagatcgccatgaacatcctgaacatgctgttcaccggcctgttcaccgtggagatgatcctgaagctgatcgccttcaagcccaagggctacttcagcgacccctggaacgtgttcgacttcctgatcgtgatcggcagcatcatcgacgtgatcctgagcgagaccaaccccgccgagcacacccagtgcagccccagcatgaacgccgaggagaacagcagaatcagcatcaccttcttcagactgttcagagtgatgagactggtgaagctgctgagcagaggcgagggcatcagaaccctgctgtggaccttcatcaagagcttccaggccctgccctacgtggccctgctgatcgtgatgctgttcttcatctacgccgtgatcggcatgcaggtgttcggcaagatcgccctgaacgacaccaccgagatcaacagaaacaacaacttccagaccttcccccaggccgtgctgctgctgttcagatgcgccaccggcgaggcctggcaggacatcatgctggcctgcatgcccggcaagaagtgcgcccccgagagcgagcccagcaacagcaccgagggcgagaccccctgcggcagcagcttcgccgtgttctacttcatcagcttctacatgctgtgcgccttcctgatcatcaacctgttcgtggccgtgatcatggacaacttcgactacctgaccagagactggagcatcctgggcccccaccacctggacgagttcaagagaatctgggccgagtacgaccccgaggccaagggcagaatcaagcacctggacgtggtgaccctgctgagaagaatccagccccccctgggcttcggcaagctgtgcccccacagagtggcctgcaagagactggtgagcatgaacatgcccctgaacagcgacggcaccgtgatgttcaacgccaccctgttcgccctggtgagaaccgccctgagaatcaagaccgagggcaacctggagcaggccaacgaggagctgagagccatcatcaagaagatctggaagagaaccagcatgaagctgctggaccaggtggtgccccccgccggcgacgacgaggtgaccgtgggcaagttctacgccaccttcctgatccaggagtacttcagaaagttcaagaagagaaaggagcagggcctggtgggcaagcccagccagagaaacgccctgagcctgcaggccggcctgagaaccctgcacgacatcggccccgagatcagaagagccatcagcggcgacctgaccgccgaggaggagctggacaaggccatgaaggaggccgtgagcgccgccagcgaggacgacatcttcagaagagccggcggcctgttcggcaaccacgtgagctactaccagagcgacggcagaagcgccttcccccagaccttcaccacccagagacccctgcacatcaacaaggccggcagcagccagggcgacaccgagagccccagccacgagaagctggtggacagcaccttcacccccagcagctacagcagcaccggcagcaacgccaacatcaacaacgccaacaacaccgccctgggcagactgcccagacccgccggctaccccagcaccgtgagcaccgtggagggccacggcccccccctgagccccgccatcagagtgcaggaggtggcctggaagctgagcagcaacagaatgcactgctgcgacatgctggacggcggcaccttcccccccgccctgggccccagaagagcccccccctgcctgcaccagcagctgcagggcagcctggccggcctgagagaggacaccccctgcatcgtgcccggccacgccagcctgtgctgcagcagcagagtgggcgagtggctgcccgccggctgcaccgccccccagcacgccagatgccacagcagagagagccaggccgccatggccggccaggaggagaccagccaggacgagacctacgaggtgaagatgaaccacgacaccgaggcctgcagcgagcccagcctgctgagcaccgagatgctgagctaccaggacgacgagaacagacagctgaccctgcccgaggaggacaagagagacatcagacagagccccaagagaggcttcctgagaagcgccagcctgggcagaagagccagcttccacctggagtgcctgaagagacagaaggacagaggcggcgacatcagccagaagaccgtgctgcccctgcacctggtgcaccaccaggccctggccgtggccggcctgagccccctgctgcagagaagccacagccccgccagcttccccagacccttcgccaccccccccgccacccccggcagcagaggctggcccccccagcccgtgcccaccctgagactggagggcgtggagagcagcgagaagctgaacagcagcttccccagcatccactgcggcagctgggccgagaccacccccggcggcggcggcagcagcgccgccagaagagtgagacccgtgagcctgatggtgcccagccaggccggcgcccccggcagacagttccacggcagcgccagcagcctggtggaggccgtgctgatcagcgagggcctgggccagttcgcccaggaccccaagttcatcgaggtgaccacccaggagctggccgacgcctgcgacatgaccatcgaggagatggagagcgccgccgacaacatcctgagcggcggcgccccccagagccccaacggcgccctgctgcccttcgtgaactgcagagacgccggccaggacagagccggcggcgaggaggacgccggctgcgtgagagccagaggcagacccagcgaggaggagctgcaggacagcagagtgtacgtgagcagcctgtag

SEQ ID NO: 75037 - DNA, 3840 bp, synthetic construct
  misc_feature 1..3840: note = Description of Artificial Sequence: Synthetic coding sequence
  source 1..3840: mol_type = other DNA
atggtgaacgagaacaccagaatgtacatccccgaggagaaccaccagggcagcaactacggcagccccagacccgcccacgccaacatgaacgccaacgccgccgccggcctggcccccgagcacatccccacccccggcgccgccctgagctggcaggccgccatcgacgccgccagacaggccaagctgatgggcagcgccggcaacgccaccatcagcaccgtgagcagcacccagagaaagagacagcagtacggcaagcccaagaagcagggcagcaccaccgccaccagaccccccagagccctgctgtgcctgaccctgaagaaccccatcagaagagcctgcatcagcatcgtggagtggaagcccttcgagatcatcatcctgctgaccatcttcgccaactgcgtggccctggccatctacatccccttccccgaggacgacagcaacgccaccaacagcaacctggagagagtggagtacctgttcctgatcatcttcaccgtggaggccttcctgaaggtgatcgcctacggcctgctgttccaccccaacgcctacctgagaaacggctggaacctgctggacttcatcatcgtggtggtgggcctgttcagcgccatcctggagcaggccaccaaggccgacggcgccaacgccctgggcggcaagggcgccggcttcgacgtgaaggccctgagagccttcagagtgctgagacccctgagactggtgagcggcgtgcccagcctgcaggtggtgctgaacagcatcatcaaggccatggtgcccctgctgcacatcgccctgctggtgctgttcgtgatcatcatctacgccatcatcggcctggagctgttcatgggcaagatgcacaagacctgctacaaccaggagggcatcgccgacgtgcccgccgaggacgaccccagcccctgcgccctggagaccggccacggcagacagtgccagaacggcaccgtgtgcaagcccggctgggacggccccaagcacggcatcaccaacttcgacaacttcgccttcgccatgctgaccgtgttccagtgcatcaccatggagggctggaccgacgtgctgtactgggtgaacgacgccgtgggcagagactggccctggatctacttcgtgaccctgatcatcatcggcagcttcttcgtgctgaacctggtgctgggcgtgctgagcggcgagttcagcaaggagagagagaaggccaaggccagaggcgacttccagaagctgagagagaagcagcagctggaggaggacctgaagggctacctggactggatcacccaggccgaggacatcgaccccgagaacgaggacgagggcatggacgaggagaagcccagaaacatgagcatgcccaccagcgagaccgagagcgtgaacaccgagaacgtggccggcggcgacatcgagggcgagaactgcggcgccagactggcccacagaatcagcaagagcaagttcagcagatactggagaagatggaacagattctgcagaagaaagtgcagagccgccgtgaagagcaacgtgttctactggctggtgatcttcctggtgttcctgaacaccctgaccatcgccagcgagcactacaaccagcccaactggctgaccgaggtgcaggacaccgccaacaaggccctgctggccctgttcaccgccgagatgctgctgaagatgtacagcctgggcctgcaggcctacttcgtgagcctgttcaacagattcgactgcttcgtggtgtgcggcggcatcctggagaccatcctggtggagaccaagatcatgagccccctgggcatcagcgtgctgagatgcgtgagactgctgagaatcttcaagatcaccagatactggaacagcctgagcaacctggtggccagcctgctgaacagcgtgagaagcatcgccagcctgctgctgctgctgttcctgttcatcatcatcttcagcctgctgggcatgcagctgttcggcggcaagttcaacttcgacgagatgcagaccagaagaagcaccttcgacaacttcccccagagcctgctgaccgtgttccagatcctgaccggcgaggactggaacagcgtgatgtacgacggcatcatggcctacggcggccccagcttccccggcatgctggtgtgcatctacttcatcatcctgttcatctgcggcaactacatcctgctgaacgtgttcctggccatcgccgtggacaacctggccgacgccgagagcctgaccagcgcccagaaggaggaggaggaggagaaggagagaaagaagctggccagaaccgccagccccgagaagaagcaggagctggtggagaagcccgccgtgggcgagagcaaggaggagaagatcgagctgaagagcatcaccgccgacggcgagagcccccccgccaccaagatcaacatggacgacctgcagcccaacgagaacgaggacaagagcccctaccccaaccccgagaccaccggcgaggaggacgaggaggagcccgagatgcccgtgggccccagacccagacccctgagcgagctgcacctgaaggagaaggccgtgcccatgcccgaggccagcgccttcttcatcttcagcagcaacaacagattcagactgcagtgccacagaatcgtgaacgacaccatcttcaccaacctgatcctgttcttcatcctgctgagcagcatcagcctggccgccgaggaccccgtgcagcacaccagcttcagaaaccacatcctgggcaacgccgactacgtgttcaccagcatcttcaccctggagatcatcctgaagatgaccgcctacggcgccttcctgcacaagggcagcttctgcagaaactacttcaacatcctggacctgctggtggtgagcgtgagcctgatcagcttcggcatccagagcagcgccatcaacgtggtgaagatcctgagagtgctgagagtgctgagacccctgagagccatcaacagagccaagggcctgaagcacgtggtgcagtgcgtgttcgtggccatcagaaccatcggcaacatcgtgatcgtgaccaccctgctgcagttcatgttcgcctgcatcggcgtgcagctgttcaagggcaagctgtacacctgcagcgacagcagcaagcagaccgaggccgagtgcaagggcaactacatcacctacaaggacggcgaggtggaccaccccatcatccagcccagaagctgggagaacagcaagttcgacttcgacaacgtgctggccgccatgatggccctgttcaccgtgagcaccttcgagggctggcccgagctgctgtacagaagcatcgacagccacaccgaggacaagggccccatctacaactacagagtggagatcagcatcttcttcatcatctacatcatcatcatcgccttcttcatgatgaacatcttcgtgggcttcgtgatcgtgaccttccaggagcagggcgagcaggagtacaagaactgcgagctggacaagaaccagagacagtgcgtggagtacgccctgaaggccagacccctgagaagatacatccccaagaaccagcaccagtacaaggtgtggtacgtggtgaacagcacctacttcgagtacctgatgttcgtgctgatcctgctgaacaccatctgcctggccatgcagcactacggccagagctgcctgttcaagatcgccatgaacatcctgaacatgctgttcaccggcctgttcaccgtggagatgatcctgaagctgatcgccttcaagcccaaggtgggcctgtag

SEQ ID NO: 75038 - DNA, 6546 bp, synthetic construct
  misc_feature 1..6546: note = Description of Artificial Sequence: Synthetic coding sequence
  source 1..6546: mol_type = other DNA
atgatgatgatgatgatgatgaagaagatgcagcaccagagacagcagcaggccgaccacgccaacgaggccaactacgccagaggcaccagactgcccctgagcggcgagggccccaccagccagcccaacagcagcaagcagaccgtgctgagctggcaggccgccatcgacgccgccagacaggccaaggccgcccagaccatgagcaccagcgcccccccccccgtgggcagcctgagccagagaaagagacagcagtacgccaagagcaagaagcagggcaacagcagcaacagcagacccgccagagccctgttctgcctgagcctgaacaaccccatcagaagagcctgcatcagcatcgtggagtggaagcccttcgacatcttcatcctgctggccatcttcgccaactgcgtggccctggccatctacatccccttccccgaggacgacagcaacagcaccaaccacaacctggagaaggtggagtacgccttcctgatcatcttcaccgtggagaccttcctgaagatcatcgcctacggcctgctgctgcaccccaacgcctacgtgagaaacggctggaacctgctggacttcgtgatcgtgatcgtgggcctgttcagcgtgatcctggagcagctgaccaaggagaccgagggcggcaaccacagcagcggcaagagcggcggcttcgacgtgaaggccctgagagccttcagagtgctgagacccctgagactggtgagcggcgtgcccagcctgcaggtggtgctgaacagcatcatcaaggccatggtgcccctgctgcacatcgccctgctggtgctgttcgtgatcatcatctacgccatcatcggcctggagctgttcatcggcaagatgcacaagacctgcttcttcgccgacagcgacatcgtggccgaggaggaccccgccccctgcgccttcagcggcaacggcagacagtgcaccgccaacggcaccgagtgcagaagcggctgggtgggccccaacggcggcatcaccaacttcgacaacttcgccttcgccatgctgaccgtgttccagtgcatcaccatggagggctggaccgacgtgctgtactgggtgaacgacgccatcggctgggagtggccctgggtgtacttcgtgagcctgatcatcctgggcagcttcttcgtgctgaacctggtgctgggcgtgctgagcggcgagttcagcaaggagagagagaaggccaaggccagaggcgacttccagaagctgagagagaagcagcagctggaggaggacctgaagggctacctggactggatcacccaggccgaggacatcgaccccgagaacgaggaggagggcggcgaggagggcaagagaaacaccagcatgcccaccagcgagaccgagagcgtgaacaccgagaacgtgagcggcgagggcgagaacagaggctgctgcggcagcctgtggtgctggtggagaagaagaggcgccgccaaggccggccccagcggctgcagaagatggggccaggccatcagcaagagcaagctgagcagaagatggagaagatggaacagattcaacagaagaagatgcagagccgccgtgaagagcgtgaccttctactggctggtgatcgtgctggtgttcctgaacaccctgaccatcagcagcgagcactacaaccagcccgactggctgacccagatccaggacatcgccaacaaggtgctgctggccctgttcacctgcgagatgctggtgaagatgtacagcctgggcctgcaggcctacttcgtgagcctgttcaacagattcgactgcttcgtggtgtgcggcggcatcaccgagaccatcctggtggagctggagatcatgagccccctgggcatcagcgtgttcagatgcgtgagactgctgagaatcttcaaggtgaccagacactggaccagcctgagcaacctggtggccagcctgctgaacagcatgaagagcatcgccagcctgctgctgctgctgttcctgttcatcatcatcttcagcctgctgggcatgcagctgttcggcggcaagttcaacttcgacgagacccagaccaagagaagcaccttcgacaacttcccccaggccctgctgaccgtgttccagatcctgaccggcgaggactggaacgccgtgatgtacgacggcatcatggcctacggcggccccagcagcagcggcatgatcgtgtgcatctacttcatcatcctgttcatctgcggcaactacatcctgctgaacgtgttcctggccatcgccgtggacaacctggccgacgccgagagcctgaacaccgcccagaaggaggaggccgaggagaaggagagaaagaagatcgccagaaaggagagcctggagaacaagaagaacaacaagcccgaggtgaaccagatcgccaacagcgacaacaaggtgaccatcgacgactacagagaggaggacgaggacaaggacccctaccccccctgcgacgtgcccgtgggcgaggaggaggaggaggaggaggaggacgagcccgaggtgcccgccggccccagacccagaagaatcagcgagctgaacatgaaggagaagatcgcccccatccccgagggcagcgccttcttcatcctgagcaagaccaaccccatcagagtgggctgccacaagctgatcaaccaccacatcttcaccaacctgatcctggtgttcatcatgctgagcagcgccgccctggccgccgaggaccccatcagaagccacagcttcagaaacaccatcctgggctacttcgactacgccttcaccgccatcttcaccgtggagatcctgctgaagatgaccaccttcggcgccttcctgcacaagggcgccttctgcagaaactacttcaacctgctggacatgctggtggtgggcgtgagcctggtgagcttcggcatccagagcagcgccatcagcgtggtgaagatcctgagagtgctgagagtgctgagacccctgagagccatcaacagagccaagggcctgaagcacgtggtgcagtgcgtgttcgtggccatcagaaccatcggcaacatcatgatcgtgaccaccctgctgcagttcatgttcgcctgcatcggcgtgcagctgttcaagggcaagttctacagatgcaccgacgaggccaagagcaaccccgaggagtgcagaggcctgttcatcctgtacaaggacggcgacgtggacagccccgtggtgagagagagaatctggcagaacagcgacttcaacttcgacaacgtgctgagcgccatgatggccctgttcaccgtgagcaccttcgagggctggcccgccctgctgtacaaggccatcgacagcaacggcgagaacatcggccccatctacaaccacagagtggagatcagcatcttcttcatcatctacatcatcatcgtggccttcttcatgatgaacatcttcgtgggcttcgtgatcgtgaccttccaggagcagggcgagaaggagtacaagaactgcgagctggacaagaaccagagacagtgcgtggagtacgccctgaaggccagacccctgagaagatacatccccaagaacccctaccagtacaagttctggtacgtggtgaacagcagccccttcgagtacatgatgttcgtgctgatcatgctgaacaccctgtgcctggccatgcagcactacgagcagagcaagatgttcaacgacgccatggacatcctgaacatggtgttcaccggcgtgttcaccgtggagatggtgctgaaggtgatcgccttcaagcccaagggctacttcagcgacgcctggaacaccttcgacagcctgatcgtgatcggcagcatcatcgacgtggccctgagcgaggccgaccccaccgagagcgagaacgtgcccgtgcccaccgccacccccggcaacagcgaggagagcaacagaatcagcatcaccttcttcagactgttcagagtgatgagactggtgaagctgctgagcagaggcgagggcatcagaaccctgctgtggaccttcatcaagagcttccaggccctgccctacgtggccctgctgatcgccatgctgttcttcatctacgccgtgatcggcatgcagatgttcggcaaggtggccatgagagacaacaaccagatcaacagaaacaacaacttccagaccttcccccaggccgtgctgctgctgttcagatgcgccaccggcgaggcctggcaggagatcatgctggcctgcctgcccggcaagctgtgcgaccccgagagcgactacaaccccggcgaggagtacacctgcggcagcaacttcgccatcgtgtacttcatcagcttctacatgctgtgcgccttcctgatcatcaacctgttcgtggccgtgatcatggacaacttcgactacctgaccagagactggagcatcctgggcccccaccacctggacgagttcaagagaatctggagcgagtacgaccccgaggccaagggcagaatcaagcacctggacgtggtgaccctgctgagaagaatccagccccccctgggcttcggcaagctgtgcccccacagagtggcctgcaagagactggtggccatgaacatgcccctgaacagcgacggcaccgtgatgttcaacgccaccctgttcgccctggtgagaaccgccctgaagatcaagaccgagggcaacctggagcaggccaacgaggagctgagagccgtgatcaagaagatctggaagaagaccagcatgaagctgctggaccaggtggtgccccccgccggcgacgacgaggtgaccgtgggcaagttctacgccaccttcctgatccaggactacttcagaaagttcaagaagagaaaggagcagggcctggtgggcaagtaccccgccaagaacaccaccatcgccctgcaggccggcctgagaaccctgcacgacatcggccccgagatcagaagagccatcagctgcgacctgcaggacgacgagcccgaggagaccaagagagaggaggaggacgacgtgttcaagagaaacggcgccctgctgggcaaccacgtgaaccacgtgaacagcgacagaagagacagcctgcagcagaccaacaccacccacagacccctgcacgtgcagagacccagcatcccccccgccagcgacaccgagaagcccctgttcccccccgccggcaacagcgtgtgccacaaccaccacaaccacaacagcatcggcaagcaggtgcccaccagcaccaacgccaacctgaacaacgccaacatgagcaaggccgcccacggcaagagacccagcatcggcaacctggagcacgtgagcgagaacggccaccacagcagccacaagcacgacagagagccccagagaagaagcagcgtgaagagaaccagatactacgagacctacatcagaagcgacagcggcgacgagcagctgcccaccatctgcagagaggaccccgagatccacggctacttcagagacccccactgcctgggcgagcaggagtacttcagcagcgaggagtgctacgaggacgacagcagccccacctggagcagacagaactacggctactacagcagataccccggcagaaacatcgacagcgagagacccagaggctaccaccacccccagggcttcctggaggacgacgacagccccgtgtgctacgacagcagaagaagccccagaagaagactgctgccccccacccccgccagccacagaagaagcagcttcaacttcgagtgcctgagaagacagagcagccaggaggaggtgcccagcagccccatcttcccccacagaaccgccctgcccctgcacctgatgcagcagcagatcatggccgtggccggcctggacagcagcaaggcccagaagtacagccccagccacagcaccagaagctgggccaccccccccgccacccccccctacagagactggaccccctgctacacccccctgatccaggtggagcagagcgaggccctggaccaggtgaacggcagcctgcccagcctgcacagaagcagctggtacaccgacgagcccgacatcagctacagaaccttcacccccgccagcctgaccgtgcccagcagcttcagaaacaagaacagcgacaagcagagaagcgccgacagcctggtggaggccgtgctgatcagcgagggcctgggcagatacgccagagaccccaagttcgtgagcgccaccaagcacgagatcgccgacgcctgcgacctgaccatcgacgagatggagagcgccgccagcaccctgctgaacggcaacgtgagacccagagccaacggcgacgtgggccccctgagccacagacaggactacgagctgcaggacttcggccccggctacagcgacgaggagcccgaccccggcagagacgaggaggacctggccgacgagatgatctgcatcaccaccctgtag

SEQ ID NO: 75039 - DNA, 6486 bp, synthetic construct
  misc_feature 1..6486: note = Description of Artificial Sequence: Synthetic coding sequence
  source 1..6486: mol_type = other DNA
atgatgatgatgatgatgatgaagaagatgcagcaccagagacagcagcaggccgaccacgccaacgaggccaactacgccagaggcaccagactgcccctgagcggcgagggccccaccagccagcccaacagcagcaagcagaccgtgctgagctggcaggccgccatcgacgccgccagacaggccaaggccgcccagaccatgagcaccagcgcccccccccccgtgggcagcctgagccagagaaagagacagcagtacgccaagagcaagaagcagggcaacagcagcaacagcagacccgccagagccctgttctgcctgagcctgaacaaccccatcagaagagcctgcatcagcatcgtggagtggaagcccttcgacatcttcatcctgctggccatcttcgccaactgcgtggccctggccatctacatccccttccccgaggacgacagcaacagcaccaaccacaacctggagaaggtggagtacgccttcctgatcatcttcaccgtggagaccttcctgaagatcatcgcctacggcctgctgctgcaccccaacgcctacgtgagaaacggctggaacctgctggacttcgtgatcgtgatcgtgggcctgttcagcgtgatcctggagcagctgaccaaggagaccgagggcggcaaccacagcagcggcaagagcggcggcttcgacgtgaaggccctgagagccttcagagtgctgagacccctgagactggtgagcggcgtgcccagcctgcaggtggtgctgaacagcatcatcaaggccatggtgcccctgctgcacatcgccctgctggtgctgttcgtgatcatcatctacgccatcatcggcctggagctgttcatcggcaagatgcacaagacctgcttcttcgccgacagcgacatcgtggccgaggaggaccccgccccctgcgccttcagcggcaacggcagacagtgcaccgccaacggcaccgagtgcagaagcggctgggtgggccccaacggcggcatcaccaacttcgacaacttcgccttcgccatgctgaccgtgttccagtgcatcaccatggagggctggaccgacgtgctgtactggatgaacgacgccatgggcttcgagctgccctgggtgtacttcgtgagcctggtgatcttcggcagcttcttcgtgctgaacctggtgctgggcgtgctgagcggcgagttcagcaaggagagagagaaggccaaggccagaggcgacttccagaagctgagagagaagcagcagctggaggaggacctgaagggctacctggactggatcacccaggccgaggacatcgaccccgagaacgaggaggagggcggcgaggagggcaagagaaacaccagcatgcccaccagcgagaccgagagcgtgaacaccgagaacgtgagcggcgagggcgagaacagaggctgctgcggcagcctgtgccaggccatcagcaagagcaagctgagcagaagatggagaagatggaacagattcaacagaagaagatgcagagccgccgtgaagagcgtgaccttctactggctggtgatcgtgctggtgttcctgaacaccctgaccatcagcagcgagcactacaaccagcccgactggctgacccagatccaggacatcgccaacaaggtgctgctggccctgttcacctgcgagatgctggtgaagatgtacagcctgggcctgcaggcctacttcgtgagcctgttcaacagattcgactgcttcgtggtgtgcggcggcatcaccgagaccatcctggtggagctggagatcatgagccccctgggcatcagcgtgttcagatgcgtgagactgctgagaatcttcaaggtgaccagacactggaccagcctgagcaacctggtggccagcctgctgaacagcatgaagagcatcgccagcctgctgctgctgctgttcctgttcatcatcatcttcagcctgctgggcatgcagctgttcggcggcaagttcaacttcgacgagacccagaccaagagaagcaccttcgacaacttcccccaggccctgctgaccgtgttccagatcctgaccggcgaggactggaacgccgtgatgtacgacggcatcatggcctacggcggccccagcagcagcggcatgatcgtgtgcatctacttcatcatcctgttcatctgcggcaactacatcctgctgaacgtgttcctggccatcgccgtggacaacctggccgacgccgagagcctgaacaccgcccagaaggaggaggccgaggagaaggagagaaagaagatcgccagaaaggagagcctggagaacaagaagaacaacaagcccgaggtgaaccagatcgccaacagcgacaacaaggtgaccatcgacgactacagagaggaggacgaggacaaggacccctaccccccctgcgacgtgcccgtgggcgaggaggaggaggaggaggaggaggacgagcccgaggtgcccgccggccccagacccagaagaatcagcgagctgaacatgaaggagaagatcgcccccatccccgagggcagcgccttcttcatcctgagcaagaccaaccccatcagagtgggctgccacaagctgatcaaccaccacatcttcaccaacctgatcctggtgttcatcatgctgagcagcgccgccctggccgccgaggaccccatcagaagccacagcttcagaaacaccatcctgggctacttcgactacgccttcaccgccatcttcaccgtggagatcctgctgaagatgaccaccttcggcgccttcctgcacaagggcgccttctgcagaaactacttcaacctgctggacatgctggtggtgggcgtgagcctggtgagcttcggcatccagagcagcgccatcagcgtggtgaagatcctgagagtgctgagagtgctgagacccctgagagccatcaacagagccaagggcctgaagcacgtggtgcagtgcgtgttcgtggccatcagaaccatcggcaacatcatgatcgtgaccaccctgctgcagttcatgttcgcctgcatcggcgtgcagctgttcaagggcaagttctacagatgcaccgacgaggccaagagcaaccccgaggagtgcagaggcctgttcatcctgtacaaggacggcgacgtggacagccccgtggtgagagagagaatctggcagaacagcgacttcaacttcgacaacgtgctgagcgccatgatggccctgttcaccgtgagcaccttcgagggctggcccgccctgctgtacaaggccatcgacagcaacggcgagaacatcggccccatctacaaccacagagtggagatcagcatcttcttcatcatctacatcatcatcgtggccttcttcatgatgaacatcttcgtgggcttcgtgatcgtgaccttccaggagcagggcgagaaggagtacaagaactgcgagctggacaagaaccagagacagtgcgtggagtacgccctgaaggccagacccctgagaagatacatccccaagaacccctaccagtacaagttctggtacgtggtgaacagcagccccttcgagtacatgatgttcgtgctgatcatgctgaacaccctgtgcctggccatgcagcactacgagcagagcaagatgttcaacgacgccatggacatcctgaacatggtgttcaccggcgtgttcaccgtggagatggtgctgaaggtgatcgccttcaagcccaagggctacttcagcgacgcctggaacaccttcgacagcctgatcgtgatcggcagcatcatcgacgtggccctgagcgaggccgaccccaccgagagcgagaacgtgcccgtgcccaccgccacccccggcaacagcgaggagagcaacagaatcagcatcaccttcttcagactgttcagagtgatgagactggtgaagctgctgagcagaggcgagggcatcagaaccctgctgtggaccttcatcaagagcttccaggccctgccctacgtggccctgctgatcgccatgctgttcttcatctacgccgtgatcggcatgcagatgttcggcaaggtggccatgagagacaacaaccagatcaacagaaacaacaacttccagaccttcccccaggccgtgctgctgctgttcagatgcgccaccggcgaggcctggcaggagatcatgctggcctgcctgcccggcaagctgtgcgaccccgagagcgactacaaccccggcgaggagtacacctgcggcagcaacttcgccatcgtgtacttcatcagcttctacatgctgtgcgccttcctgatcatcaacctgttcgtggccgtgatcatggacaacttcgactacctgaccagagactggagcatcctgggcccccaccacctggacgagttcaagagaatctggagcgagtacgaccccgaggccaagggcagaatcaagcacctggacgtggtgaccctgctgagaagaatccagccccccctgggcttcggcaagctgtgcccccacagagtggcctgcaagagactggtggccatgaacatgcccctgaacagcgacggcaccgtgatgttcaacgccaccctgttcgccctggtgagaaccgccctgaagatcaagaccgagggcaacctggagcaggccaacgaggagctgagagccgtgatcaagaagatctggaagaagaccagcatgaagctgctggaccaggtggtgccccccgccggcgacgacgaggtgaccgtgggcaagttctacgccaccttcctgatccaggactacttcagaaagttcaagaagagaaaggagcagggcctggtgggcaagtaccccgccaagaacaccaccatcgccctgcaggccggcctgagaaccctgcacgacatcggccccgagatcagaagagccatcagctgcgacctgcaggacgacgagcccgaggagaccaagagagaggaggaggacgacgtgttcaagagaaacggcgccctgctgggcaaccacgtgaaccacgtgaacagcgacagaagagacagcctgcagcagaccaacaccacccacagacccctgcacgtgcagagacccagcatcccccccgccagcgacaccgagaagcccctgttcccccccgccggcaacagcgtgtgccacaaccaccacaaccacaacagcatcggcaagcaggtgcccaccagcaccaacgccaacctgaacaacgccaacatgagcaaggccgcccacggcaagagacccagcatcggcaacctggagcacgtgagcgagaacggccaccacagcagccacaagcacgacagagagccccagagaagaagcagcgtgaagagaaccagatactacgagacctacatcagaagcgacagcggcgacgagcagctgcccaccatctgcagagaggaccccgagatccacggctacttcagagacccccactgcctgggcgagcaggagtacttcagcagcgaggagtgctacgaggacgacagcagccccacctggagcagacagaactacggctactacagcagataccccggcagaaacatcgacagcgagagacccagaggctaccaccacccccagggcttcctggaggacgacgacagccccgtgtgctacgacagcagaagaagccccagaagaagactgctgccccccacccccgccagccacagaagaagcagcttcaacttcgagtgcctgagaagacagagcagccaggaggaggtgcccagcagccccatcttcccccacagaaccgccctgcccctgcacctgatgcagcagcagatcatggccgtggccggcctggacagcagcaaggcccagaagtacagccccagccacagcaccagaagctgggccaccccccccgccacccccccctacagagactggaccccctgctacacccccctgatccaggtggagcagagcgaggccctggaccaggtgaacggcagcctgcccagcctgcacagaagcagctggtacaccgacgagcccgacatcagctacagaaccttcacccccgccagcctgaccgtgcccagcagcttcagaaacaagaacagcgacaagcagagaagcgccgacagcctggtggaggccgtgctgatcagcgagggcctgggcagatacgccagagaccccaagttcgtgagcgccaccaagcacgagatcgccgacgcctgcgacctgaccatcgacgagatggagagcgccgccagcaccctgctgaacggcaacgtgagacccagagccaacggcgacgtgggccccctgagccacagacaggactacgagctgcaggacttcggccccggctacagcgacgaggagcccgaccccggcagagacgaggaggacctggccgacgagatgatctgcatcaccaccctgtag

SEQ ID NO: 75040 - DNA, 6414 bp, synthetic construct
  misc_feature 1..6414: note = Description of Artificial Sequence: Synthetic coding sequence
  source 1..6414: mol_type = other DNA
atgatgatgatgatgatgatgaagaagatgcagcaccagagacagcagcaggccgaccacgccaacgaggccaactacgccagaggcaccagactgcccctgagcggcgagggccccaccagccagcccaacagcagcaagcagaccgtgctgagctggcaggccgccatcgacgccgccagacaggccaaggccgcccagaccatgagcaccagcgcccccccccccgtgggcagcctgagccagagaaagagacagcagtacgccaagagcaagaagcagggcaacagcagcaacagcagacccgccagagccctgttctgcctgagcctgaacaaccccatcagaagagcctgcatcagcatcgtggagtggaagcccttcgacatcttcatcctgctggccatcttcgccaactgcgtggccctggccatctacatccccttccccgaggacgacagcaacagcaccaaccacaacctggagaaggtggagtacgccttcctgatcatcttcaccgtggagaccttcctgaagatcatcgcctacggcctgctgctgcaccccaacgcctacgtgagaaacggctggaacctgctggacttcgtgatcgtgatcgtgggcctgttcagcgtgatcctggagcagctgaccaaggagaccgagggcggcaaccacagcagcggcaagagcggcggcttcgacgtgaaggccctgagagccttcagagtgctgagacccctgagactggtgagcggcgtgcccagcctgcaggtggtgctgaacagcatcatcaaggccatggtgcccctgctgcacatcgccctgctggtgctgttcgtgatcatcatctacgccatcatcggcctggagctgttcatcggcaagatgcacaagacctgcttcttcgccgacagcgacatcgtggccgaggaggaccccgccccctgcgccttcagcggcaacggcagacagtgcaccgccaacggcaccgagtgcagaagcggctgggtgggccccaacggcggcatcaccaacttcgacaacttcgccttcgccatgctgaccgtgttccagtgcatcaccatggagggctggaccgacgtgctgtactggatgaacgacgccatgggcttcgagctgccctgggtgtacttcgtgagcctggtgatcttcggcagcttcttcgtgctgaacctggtgctgggcgtgctgagcggcgagttcagcaaggagagagagaaggccaaggccagaggcgacttccagaagctgagagagaagcagcagctggaggaggacctgaagggctacctggactggatcacccaggccgaggacatcgaccccgagaacgaggaggagggcggcgaggagggcaagagaaacaccagcatgcccaccagcgagaccgagagcgtgaacaccgagaacgtgagcggcgagggcgagaacagaggctgctgcggcagcctgtgccaggccatcagcaagagcaagctgagcagaagatggagaagatggaacagattcaacagaagaagatgcagagccgccgtgaagagcgtgaccttctactggctggtgatcgtgctggtgttcctgaacaccctgaccatcagcagcgagcactacaaccagcccgactggctgacccagatccaggacatcgccaacaaggtgctgctggccctgttcacctgcgagatgctggtgaagatgtacagcctgggcctgcaggcctacttcgtgagcctgttcaacagattcgactgcttcgtggtgtgcggcggcatcaccgagaccatcctggtggagctggagatcatgagccccctgggcatcagcgtgttcagatgcgtgagactgctgagaatcttcaaggtgaccagacactggaccagcctgagcaacctggtggccagcctgctgaacagcatgaagagcatcgccagcctgctgctgctgctgttcctgttcatcatcatcttcagcctgctgggcatgcagctgttcggcggcaagttcaacttcgacgagacccagaccaagagaagcaccttcgacaacttcccccaggccctgctgaccgtgttccagatcctgaccggcgaggactggaacgccgtgatgtacgacggcatcatggcctacggcggccccagcagcagcggcatgatcgtgtgcatctacttcatcatcctgttcatctgcggcaactacatcctgctgaacgtgttcctggccatcgccgtggacaacctggccgacgccgagagcctgaacaccgcccagaaggaggaggccgaggagaaggagagaaagaagatcgccagaaaggagagcctggagaacaagaagaacaacaagcccgaggtgaaccagatcgccaacagcgacaacaaggtgaccatcgacgactacagagaggaggacgaggacaaggacccctaccccccctgcgacgtgcccgtgggcgaggaggaggaggaggaggaggaggacgagcccgaggtgcccgccggccccagacccagaagaatcagcgagctgaacatgaaggagaagatcgcccccatccccgagggcagcgccttcttcatcctgagcaagaccaaccccatcagagtgggctgccacaagctgatcaaccaccacatcttcaccaacctgatcctggtgttcatcatgctgagcagcgccgccctggccgccgaggaccccatcagaagccacagcttcagaaacaccatcctgggctacttcgactacgccttcaccgccatcttcaccgtggagatcctgctgaagatgaccaccttcggcgccttcctgcacaagggcgccttctgcagaaactacttcaacctgctggacatgctggtggtgggcgtgagcctggtgagcttcggcatccagagcagcgccatcagcgtggtgaagatcctgagagtgctgagagtgctgagacccctgagagccatcaacagagccaagggcctgaagcacgtggtgcagtgcgtgttcgtggccatcagaaccatcggcaacatcatgatcgtgaccaccctgctgcagttcatgttcgcctgcatcggcgtgcagctgttcaagggcaagttctacagatgcaccgacgaggccaagagcaaccccgaggagtgcagaggcctgttcatcctgtacaaggacggcgacgtggacagccccgtggtgagagagagaatctggcagaacagcgacttcaacttcgacaacgtgctgagcgccatgatggccctgttcaccgtgagcaccttcgagggctggcccgccctgctgtacaaggccatcgacagcaacggcgagaacatcggccccatctacaaccacagagtggagatcagcatcttcttcatcatctacatcatcatcgtggccttcttcatgatgaacatcttcgtgggcttcgtgatcgtgaccttccaggagcagggcgagaaggagtacaagaactgcgagctggacaagaaccagagacagtgcgtggagtacgccctgaaggccagacccctgagaagatacatccccaagaacccctaccagtacaagttctggtacgtggtgaacagcagccccttcgagtacatgatgttcgtgctgatcatgctgaacaccctgtgcctggccatgcagcactacgagcagagcaagatgttcaacgacgccatggacatcctgaacatggtgttcaccggcgtgttcaccgtggagatggtgctgaaggtgatcgccttcaagcccaagggctacttcagcgacgcctggaacaccttcgacagcctgatcgtgatcggcagcatcatcgacgtggccctgagcgaggccgacaacagcgaggagagcaacagaatcagcatcaccttcttcagactgttcagagtgatgagactggtgaagctgctgagcagaggcgagggcatcagaaccctgctgtggaccttcatcaagagcttccaggccctgccctacgtggccctgctgatcgccatgctgttcttcatctacgccgtgatcggcatgcagatgttcggcaaggtggccatgagagacaacaaccagatcaacagaaacaacaacttccagaccttcccccaggccgtgctgctgctgttcagatgcgccaccggcgaggcctggcaggagatcatgctggcctgcctgcccggcaagctgtgcgaccccgagagcgactacaaccccggcgaggagtacacctgcggcagcaacttcgccatcgtgtacttcatcagcttctacatgctgtgcgccttcctgatcatcaacctgttcgtggccgtgatcatggacaacttcgactacctgaccagagactggagcatcctgggcccccaccacctggacgagttcaagagaatctggagcgagtacgaccccgaggccaagggcagaatcaagcacctggacgtggtgaccctgctgagaagaatccagccccccctgggcttcggcaagctgtgcccccacagagtggcctgcaagagactggtggccatgaacatgcccctgaacagcgacggcaccgtgatgttcaacgccaccctgttcgccctggtgagaaccgccctgaagatcaagaccgagggcaacctggagcaggccaacgaggagctgagagccgtgatcaagaagatctggaagaagaccagcatgaagctgctggaccaggtggtgccccccgccggcgacgacgaggtgaccgtgggcaagttctacgccaccttcctgatccaggactacttcagaaagttcaagaagagaaaggagcagggcctggtgggcaagtaccccgccaagaacaccaccatcgccctgcaggccggcctgagaaccctgcacgacatcggccccgagatcagaagagccatcagctgcgacctgcaggacgacgagcccgaggagaccaagagagaggaggaggacgacgtgttcaagagaaacggcgccctgctgggcaaccacgtgaaccacgtgaacagcgacagaagagacagcctgcagcagaccaacaccacccacagacccctgcacgtgcagagacccagcatcccccccgccagcgacaccgagaagcccctgttcccccccgccggcaacagcgtgtgccacaaccaccacaaccacaacagcatcggcaagcaggtgcccaccagcaccaacgccaacctgaacaacgccaacatgagcaaggccgcccacggcaagagacccagcatcggcaacctggagcacgtgagcgagaacggccaccacagcagccacaagcacgacagagagccccagagaagaagcagcgtgaagagaagcgacagcggcgacgagcagctgcccaccatctgcagagaggaccccgagatccacggctacttcagagacccccactgcctgggcgagcaggagtacttcagcagcgaggagtgctacgaggacgacagcagccccacctggagcagacagaactacggctactacagcagataccccggcagaaacatcgacagcgagagacccagaggctaccaccacccccagggcttcctggaggacgacgacagccccgtgtgctacgacagcagaagaagccccagaagaagactgctgccccccacccccgccagccacagaagaagcagcttcaacttcgagtgcctgagaagacagagcagccaggaggaggtgcccagcagccccatcttcccccacagaaccgccctgcccctgcacctgatgcagcagcagatcatggccgtggccggcctggacagcagcaaggcccagaagtacagccccagccacagcaccagaagctgggccaccccccccgccacccccccctacagagactggaccccctgctacacccccctgatccaggtggagcagagcgaggccctggaccaggtgaacggcagcctgcccagcctgcacagaagcagctggtacaccgacgagcccgacatcagctacagaaccttcacccccgccagcctgaccgtgcccagcagcttcagaaacaagaacagcgacaagcagagaagcgccgacagcctggtggaggccgtgctgatcagcgagggcctgggcagatacgccagagaccccaagttcgtgagcgccaccaagcacgagatcgccgacgcctgcgacctgaccatcgacgagatggagagcgccgccagcaccctgctgaacggcaacgtgagacccagagccaacggcgacgtgggccccctgagccacagacaggactacgagctgcaggacttcggccccggctacagcgacgaggagcccgaccccggcagagacgaggaggacctggccgacgagatgatctgcatcaccaccctgtag

SEQ ID NO: 75041 - DNA, 5565 bp, synthetic construct
  misc_feature 1..5565: note = Description of Artificial Sequence: Synthetic coding sequence
  source 1..5565: mol_type = other DNA
gccaacggcaccgagtgcagaagcggctgggtgggccccaacggcggcatcaccaacttcgacaacttcgccttcgccatgctgaccgtgttccagtgcatcaccatggagggctggaccgacgtgctgtactggatgaacgacgccatgggcttcgagctgccctgggtgtacttcgtgagcctggtgatcttcggcagcttcttcgtgctgaacctggtgctgggcgtgctgagcggcgagttcagcaaggagagagagaaggccaaggccagaggcgacttccagaagctgagagagaagcagcagctggaggaggacctgaagggctacctggactggatcacccaggccgaggacatcgaccccgagaacgaggaggagggcggcgaggagggcaagagaaacaccagcatgcccaccagcgagaccgagagcgtgaacaccgagaacgtgagcggcgagggcgagaacagaggctgctgcggcagcctgtggtgctggtggagaagaagaggcgccgccaaggccggccccagcggctgcagaagatggggccaggccatcagcaagagcaagctgagcagaagatggagaagatggaacagattcaacagaagaagatgcagagccgccgtgaagagcgtgaccttctactggctggtgatcgtgctggtgttcctgaacaccctgaccatcagcagcgagcactacaaccagcccgactggctgacccagatccaggacatcgccaacaaggtgctgctggccctgttcacctgcgagatgctggtgaagatgtacagcctgggcctgcaggcctacttcgtgagcctgttcaacagattcgactgcttcgtggtgtgcggcggcatcaccgagaccatcctggtggagctggagatcatgagccccctgggcatcagcgtgttcagatgcgtgagactgctgagaatcttcaaggtgaccagacactggaccagcctgagcaacctggtggccagcctgctgaacagcatgaagagcatcgccagcctgctgctgctgctgttcctgttcatcatcatcttcagcctgctgggcatgcagctgttcggcggcaagttcaacttcgacgagacccagaccaagagaagcaccttcgacaacttcccccaggccctgctgaccgtgttccagatcctgaccggcgaggactggaacgccgtgatgtacgacggcatcatggcctacggcggccccagcagcagcggcatgatcgtgtgcatctacttcatcatcctgttcatctgcggcaactacatcctgctgaacgtgttcctggccatcgccgtggacaacctggccgacgccgagagcctgaacaccgcccagaaggaggaggccgaggagaaggagagaaagaagatcgccagaaaggagagcctggagaacaagaagaacaacaagcccgaggtgaaccagatcgccaacagcgacaacaaggtgaccatcgacgactacagagaggaggacgaggacaaggacccctaccccccctgcgacgtgcccgtgggcgaggaggaggaggaggaggaggaggacgagcccgaggtgcccgccggccccagacccagaagaatcagcgagctgaacatgaaggagaagatcgcccccatccccgagggcagcgccttcttcatcctgagcaagaccaaccccatcagagtgggctgccacaagctgatcaaccaccacatcttcaccaacctgatcctggtgttcatcatgctgagcagcgccgccctggccgccgaggaccccatcagaagccacagcttcagaaacaccatcctgggctacttcgactacgccttcaccgccatcttcaccgtggagatcctgctgaagatgaccaccttcggcgccttcctgcacaagggcgccttctgcagaaactacttcaacctgctggacatgctggtggtgggcgtgagcctggtgagcttcggcatccagagcagcgccatcagcgtggtgaagatcctgagagtgctgagagtgctgagacccctgagagccatcaacagagccaagggcctgaagcacgtggtgcagtgcgtgttcgtggccatcagaaccatcggcaacatcatgatcgtgaccaccctgctgcagttcatgttcgcctgcatcggcgtgcagctgttcaagggcaagttctacagatgcaccgacgaggccaagagcaaccccgaggagtgcagaggcctgttcatcctgtacaaggacggcgacgtggacagccccgtggtgagagagagaatctggcagaacagcgacttcaacttcgacaacgtgctgagcgccatgatggccctgttcaccgtgagcaccttcgagggctggcccgccctgctgtacaaggccatcgacagcaacggcgagaacatcggccccatctacaaccacagagtggagatcagcatcttcttcatcatctacatcatcatcgtggccttcttcatgatgaacatcttcgtgggcttcgtgatcgtgaccttccaggagcagggcgagaaggagtacaagaactgcgagctggacaagaaccagagacagtgcgtggagtacgccctgaaggccagacccctgagaagatacatccccaagaacccctaccagtacaagttctggtacgtggtgaacagcagccccttcgagtacatgatgttcgtgctgatcatgctgaacaccctgtgcctggccatgcagcactacgagcagagcaagatgttcaacgacgccatggacatcctgaacatggtgttcaccggcgtgttcaccgtggagatggtgctgaaggtgatcgccttcaagcccaagcactacttcaccgacgcctggaacaccttcgacgccctgatcgtggtgggcagcgtggtggacatcgccatcaccgaggtgaaccccaccgagagcgagaacgtgcccgtgcccaccgccacccccggcaacagcgaggagagcaacagaatcagcatcaccttcttcagactgttcagagtgatgagactggtgaagctgctgagcagaggcgagggcatcagaaccctgctgtggaccttcatcaagagcttccaggccctgccctacgtggccctgctgatcgccatgctgttcttcatctacgccgtgatcggcatgcagatgttcggcaaggtggccatgagagacaacaaccagatcaacagaaacaacaacttccagaccttcccccaggccgtgctgctgctgttcagatgcgccaccggcgaggcctggcaggagatcatgctggcctgcctgcccggcaagctgtgcgaccccgagagcgactacaaccccggcgaggagtacacctgcggcagcaacttcgccatcgtgtacttcatcagcttctacatgctgtgcgccttcctgatcatcaacctgttcgtggccgtgatcatggacaacttcgactacctgaccagagactggagcatcctgggcccccaccacctggacgagttcaagagaatctggagcgagtacgaccccgaggccaagggcagaatcaagcacctggacgtggtgaccctgctgagaagaatccagccccccctgggcttcggcaagctgtgcccccacagagtggcctgcaagagactggtggccatgaacatgcccctgaacagcgacggcaccgtgatgttcaacgccaccctgttcgccctggtgagaaccgccctgaagatcaagaccgagggcaacctggagcaggccaacgaggagctgagagccgtgatcaagaagatctggaagaagaccagcatgaagctgctggaccaggtggtgccccccgccggcgacgacgaggtgaccgtgggcaagttctacgccaccttcctgatccaggactacttcagaaagttcaagaagagaaaggagcagggcctggtgggcaagtaccccgccaagaacaccaccatcgccctgcaggccggcctgagaaccctgcacgacatcggccccgagatcagaagagccatcagctgcgacctgcaggacgacgagcccgaggagaccaagagagaggaggaggacgacgtgttcaagagaaacggcgccctgctgggcaaccacgtgaaccacgtgaacagcgacagaagagacagcctgcagcagaccaacaccacccacagacccctgcacgtgcagagacccagcatcccccccgccagcgacaccgagaagcccctgttcccccccgccggcaacagcgtgtgccacaaccaccacaaccacaacagcatcggcaagcaggtgcccaccagcaccaacgccaacctgaacaacgccaacatgagcaaggccgcccacggcaagagacccagcatcggcaacctggagcacgtgagcgagaacggccaccacagcagccacaagcacgacagagagccccagagaagaagcagcgtgaagagaaccagatactacgagacctacatcagaagcgacagcggcgacgagcagctgcccaccatctgcagagaggaccccgagatccacggctacttcagagacccccactgcctgggcgagcaggagtacttcagcagcgaggagtgctacgaggacgacagcagccccacctggagcagacagaactacggctactacagcagataccccggcagaaacatcgacagcgagagacccagaggctaccaccacccccagggcttcctggaggacgacgacagccccgtgtgctacgacagcagaagaagccccagaagaagactgctgccccccacccccgccagccacagaagaagcagcttcaacttcgagtgcctgagaagacagagcagccaggaggaggtgcccagcagccccatcttcccccacagaaccgccctgcccctgcacctgatgcagcagcagatcatggccgtggccggcctggacagcagcaaggcccagaagtacagccccagccacagcaccagaagctgggccaccccccccgccacccccccctacagagactggaccccctgctacacccccctgatccaggtggagcagagcgaggccctggaccaggtgaacggcagcctgcccagcctgcacagaagcagctggtacaccgacgagcccgacatcagctacagaaccttcacccccgccagcctgaccgtgcccagcagcttcagaaacaagaacagcgacaagcagagaagcgccgacagcctggtggaggccgtgctgatcagcgagggcctgggcagatacgccagagaccccaagttcgtgagcgccaccaagcacgagatcgccgacgcctgcgacctgaccatcgacgagatggagagcgccgccagcaccctgctgaacggcaacgtgagacccagagccaacggcgacgtgggccccctgagccacagacaggactacgagctgcaggacttcggccccggctacagcgacgaggagcccgaccccggcagagacgaggaggacctggccgacgagatgatctgcatcaccaccctgtag

SEQ ID NO: 75042 - DNA, 1620 bp, synthetic construct
  misc_feature 1..1620: note = Description of Artificial Sequence: Synthetic coding sequence
  source 1..1620: mol_type = other DNA
atgggcgagacctggctgtgccccgccgccctgggcctgctgtacaaggccatcgacagcaacggcgagaacatcggccccatctacaaccacagagtggagatcagcatcttcttcatcatctacatcatcatcgtggccttcttcatgatgaacatcttcgtgggcttcgtgatcgtgaccttccaggagcagggcgagaaggagtacaagaactgcgagctggacaagaaccagagacagtgcgtggagtacgccctgaaggccagacccctgagaagatacatccccaagaacccctaccagtacaagttctggtacgtggtgaacagcagccccttcgagtacatgatgttcgtgctgatcatgctgaacaccctgtgcctggccatgcagcactacgagcagagcaagatgttcaacgacgccatggacatcctgaacatggtgttcaccggcgtgttcaccgtggagatggtgctgaaggtgatcgccttcaagcccaagggctacttcagcgacgcctggaacaccttcgacagcctgatcgtgatcggcagcatcatcgacgtggccctgagcgaggccgacaacagcgaggagagcaacagaatcagcatcaccttcttcagactgttcagagtgatgagactggtgaagctgctgagcagaggcgagggcatcagaaccctgctgtggaccttcatcaagagcttccaggccctgccctacgtggccctgctgatcgccatgctgttcttcatctacgccgtgatcggcatgcagatgttcggcaaggtggccatgagagacaacaaccagatcaacagaaacaacaacttccagaccttcccccaggccgtgctgctgctgttcagatgcgccaccggcgaggcctggcaggagatcatgctggcctgcctgcccggcaagctgtgcgaccccgagagcgactacaaccccggcgaggagtacacctgcggcagcaacttcgccatcgtgtacttcatcagcttctacatgctgtgcgccttcctgatcatcaacctgttcgtggccgtgatcatggacaacttcgactacctgaccagagactggagcatcctgggcccccaccacctggacgagttcaagagaatctggagcgagtacgaccccgaggccaagggcagaatcaagcacctggacgtggtgaccctgctgagaagaatccagccccccctgggcttcggcaagctgtgcccccacagagtggcctgcaagagactggtggccatgaacatgcccctgaacagcgacggcaccgtgatgttcaacgccaccctgttcgccctggtgagaaccgccctgaagatcaagaccgagggcaacctggagcaggccaacgaggagctgagagccgtgatcaagaagatctggaagaagaccagcatgaagctgctggaccaggtggtgccccccgccggcgacgacgaggtgaccgtgggcaagttctacgccaccttcctgatccaggactacttcagaaagttcaagaagagaaaggagcagggcctggtgggcaagtaccccgccaagaacaccaccatcgccctgcagatgctggagagaatgctgtag

SEQ ID NO: 75043 - DNA, 1056 bp, synthetic construct
  misc_feature 1..1056: note = Description of Artificial Sequence: Synthetic coding sequence
  source 1..1056: mol_type = other DNA
atgaacggcctggcccagagcagactggagacctgcatcagctacctgcactgctacagcgccggcctgagaaccctgcacgacatcggccccgagatcagaagagccatcagctgcgacctgcaggacgacgagcccgaggagaccaagagagaggaggaggacgacgtgttcaagagaaacggcgccctgctgggcaaccacgtgaaccacgtgaacagcgacagaagagacagcctgcagcagaccaacaccacccacagacccctgcacgtgcagagacccagcatcccccccgccagcgacaccgagaagcccctgttcccccccgccggcaacagcgtgtgccacaaccaccacaaccacaacagcatcggcaagcaggtgcccaccagcaccaacgccaacctgaacaacgccaacatgagcaaggccgcccacggcaagagacccagcatcggcaacctggagcacgtgagcgagaacggccaccacagcagccacaagcacgacagagagccccagagaagaagcagcgtgaagagaaccagatactacgagacctacatcagaagcgacagcggcgacgagcagctgcccaccatctgcagagaggaccccgagatccacggctacttcagagacccccactgcctgggcgagcaggagtacttcagcagcgaggagtgctacgaggacgacagcagccccacctggagcagacagaactacggctactacagcagataccccggcagaaacatcgacagcgagagacccagaggctaccaccacccccagggcttcctggaggacgacgacagccccgtgtgctacgacagcagaagaagccccagaagaagactgctgccccccacccccgccagccacagaagaagcagcttcaacttcgagtgcctgagaagacagagcagccaggaggaggtgcccagcagccccatcttcccccacagaaccgccctgcccctgcacctgatgcagcagcagagccccctgagcagcgaccacggcagctgcagacccagattcaagtag

SEQ ID NO: 75044 - DNA, 5901 bp, synthetic construct
  misc_feature 1..5901: note = Description of Artificial Sequence: Synthetic coding sequence
  source 1..5901: mol_type = other DNA
atgagcgagagcgagggcggcaaggacaccacccccgagcccagccccgccaacggcgccggccccggccccgagtggggcctgtgccccggcccccccgccgtggagggcgagagcagcggcgccagcggcctgggcacccccaagagaagaaaccagcacagcaagcacaagaccgtggccgtggccagcgcccagagaagccccagagccctgttctgcctgaccctggccaaccccctgagaagaagctgcatcagcatcgtggagtggaagcccttcgacatcctgatcctgctgaccatcttcgccaactgcgtggccctgggcgtgtacatccccttccccgaggacgacagcaacaccgccaaccacaacctggagcaggtggagtacgtgttcctggtgatcttcaccgtggagaccgtgctgaagatcgtggcctacggcctggtgctgcaccccagcgcctacatcagaaacggctggaacctgctggacttcatcatcgtggtggtgggcctgttcagcgtgctgctggagcagggccccggcagacccggcgacgccccccacaccggcggcaagcccggcggcttcgacgtgaaggccctgagagccttcagagtgctgagacccctgagactggtgagcggcgtgcccagcctgcacatcgtgctgaacagcatcatgaaggccctggtgcccctgctgcacatcgccctgctggtgctgttcgtgatcatcatctacgccatcatcggcctggagctgttcctgggcagaatgcacaagacctgctacttcctgggcagcgacatggaggccgaggaggaccccagcccctgcgccagcagcggcagcggcagagcctgcaccctgaaccagaccgagtgcagaggcagatggcccggccccaacggcggcatcaccaacttcgacaacttcttcttcgccatgctgaccgtgttccagtgcgtgaccatggagggctggaccgacgtgctgtactggatgcaggacgccatgggctacgagctgccctgggtgtacttcgtgagcctggtgatcttcggcagcttcttcgtgctgaacctggtgctgggcgtgctgagcggcgagttcagcaaggagagagagaaggccaaggccagaggcgacttccagaagcagagagagaagcagcagatggaggaggacctgagaggctacctggactggatcacccaggccgaggagctggacatggaggaccccagcgccgacgacaacctgggcccccagctggccgagctgaccaacagaagaagaggcagactgagatggttcagccacagcaccagaagcacccacagcaccagcagccacgccagcctgcccgccagcgacaccggcagcatgaccgagacccagggcgacgaggacgaggaggagggcgccctggccagctgcaccagatgcctgaacaagatcatgaagaccagagtgtgcagaagactgagaagagccaacagagtgctgagagccagatgcagaagagccgtgaagagcaacgcctgctactgggccgtgctgctgctggtgttcctgaacaccctgaccatcgccagcgagcaccacggccagcccgtgtggctgacccagatccaggagtacgccaacaaggtgctgctgtgcctgttcaccgtggagatgctgctgaagctgtacggcctgggccccagcgcctacgtgagcagcttcttcaacagattcgactgcttcgtggtgtgcggcggcatcctggagaccaccctggtggaggtgggcgccatgcagcccctgggcatcagcgtgctgagatgcgtgagactgctgagaatcttcaaggtgaccagacactgggccagcctgagcaacctggtggccagcctgctgaacagcatgaagagcatcgccagcctgctgctgctgctgttcctgttcatcatcatcttcagcctgctgggcatgcagctgttcggcggcaagttcaacttcgaccagacccacaccaagagaagcaccttcgacaccttcccccaggccctgctgaccgtgttccagatcctgaccggcgaggactggaacgtggtgatgtacgacggcatcatggcctacggcggccccttcttccccggcatgctggtgtgcatctacttcatcatcctgttcatctgcggcaactacatcctgctgaacgtgttcctggccatcgccgtggacaacctggccagcggcgacgccggcaccgccaaggacaagggcggcgagaagagcaacgagaaggacctgccccaggagaacgagggcctggtgcccggcgtggagaaggaggaggaggagggcgccagaagagagggcgccgacatggaggaggaggaggaggaggaggaggaggaggaggaggaggaggaggaggagggcgccggcggcgtggagctgctgcaggaggtggtgcccaaggagaaggtggtgcccatccccgagggcagcgccttcttctgcctgagccagaccaaccccctgagaaagggctgccacaccctgatccaccaccacgtgttcaccaacctgatcctggtgttcatcatcctgagcagcgtgagcctggccgccgaggaccccatcagagcccacagcttcagaaaccacatcctgggctacttcgactacgccttcaccagcatcttcaccgtggagatcctgctgaagatgaccgtgttcggcgccttcctgcacagaggcagcttctgcagaagctggttcaacatgctggacctgctggtggtgagcgtgagcctgatcagcttcggcatccacagcagcgccatcagcgtggtgaagatcctgagagtgctgagagtgctgagacccctgagagccatcaacagagccaagggcctgaagcacgtggtgcagtgcgtgttcgtggccatcagaaccatcggcaacatcatgatcgtgaccaccctgctgcagttcatgttcgcctgcatcggcgtgcagctgttcaagggcaagttctacacctgcaccgacgaggccaagcacaccccccaggagtgcaagggcagcttcctggtgtaccccgacggcgacgtgagcagacccctggtgagagagagactgtgggtgaacagcgacttcaacttcgacaacgtgctgagcgccatgatggccctgttcaccgtgagcaccttcgagggctggcccgccctgctgtacaaggccatcgacgcctacgccgaggaccacggccccatctacaactacagagtggagatcagcgtgttcttcatcgtgtacatcatcatcatcgccttcttcatgatgaacatcttcgtgggcttcgtgatcatcaccttcagagcccagggcgagcaggagtaccagaactgcgagctggacaagaaccagagacagtgcgtggagtacgccctgaaggcccagcccctgagaagatacatccccaagaacccccaccagtacagagtgtgggccaccgtgaacagcgccgccttcgagtacctgatgttcctgctgatcctgctgaacaccgtggccctggccatgcagcactacgagcagaccgcccccttcaactacgccatggacatcctgaacatggtgttcaccggcctgttcaccatcgagatggtgctgaagatcatcgccttcaagcccaagcactacttcaccgacgcctggaacaccttcgacgccctgatcgtggtgggcagcatcgtggacatcgccgtgaccgaggtgaacaacggcggccacctgggcgagagcagcgaggacagcagcagaatcagcatcaccttcttcagactgttcagagtgatgagactggtgaagctgctgagcaagggcgagggcatcagaaccctgctgtggaccttcatcaagagcttccaggccctgccctacgtggccctgctgatcgccatgatcttcttcatctacgccgtgatcggcatgcagatgttcggcaaggtggccctgcaggacggcacccagatcaacagaaacaacaacttccagaccttcccccaggccgtgctgctgctgttcagatgcgccaccggcgaggcctggcaggagatcatgctggccagcctgcccggcaacagatgcgaccccgagagcgacttcggccccggcgaggagttcacctgcggcagcaacttcgccatcgcctacttcatcagcttcttcatgctgtgcgccttcctgatcatcaacctgttcgtggccgtgatcatggacaacttcgactacctgaccagagactggagcatcctgggcccccaccacctggacgagttcaagagaatctggagcgagtacgaccccggcgccaagggcagaatcaagcacctggacgtggtggccctgctgagaagaatccagccccccctgggcttcggcaagctgtgcccccacagagtggcctgcaagagactggtggccatgaacatgcccctgaacagcgacggcaccgtgaccttcaacgccaccctgttcgccctggtgagaaccagcctgaagatcaagaccgagggcaacctggagcaggccaaccaggagctgagaatcgtgatcaagaagatctggaagagaatgaagcagaagctgctggacgaggtgatccccccccccgacgaggaggaggtgaccgtgggcaagttctacgccaccttcctgatccaggactacttcagaaagttcagaagaagaaaggagaagggcctgctgggcaacgacgccgcccccagcaccagcagcgccctgcaggccggcctgagaagcctgcaggacctgggccccgagatgagacaggccctgacctgcgacaccgaggaggaggaggaggagggccaggagggcgtggaggaggaggacgagaaggacctggagaccaacaaggccaccatggtgagccagcccagcgccagaagaggcagcggcatcagcgtgagcctgcccgtgggcgacagactgcccgacagcctgagcttcggccccagcgacgacgacagaggcacccccaccagcagccagcccagcgtgccccaggccggcagcaacacccacagaagaggcagcggcgccctgatcttcaccatccccgaggagggcaacagccagcccaagggcaccaagggccagaacaagcaggacgaggacgaggaggtgcccgacagactgagctacctggacgagcaggccggcacccccccctgcagcgtgctgctgcccccccacagagcccagagatacatggacggccacctggtgcccagaagaagactgctgccccccacccccgccggcagaaagcccagcttcaccatccagtgcctgcagagacagggcagctgcgaggacctgcccatccccggcacctaccacagaggcagaaacagcggccccaacagagcccagggcagctgggccacccccccccagagaggcagactgctgtacgcccccctgctgctggtggaggagggcgccgccggcgagggctacctgggcagaagcagcggccccctgagaaccttcacctgcctgcacgtgcccggcacccacagcgaccccagccacggcaagagaggcagcgccgacagcctggtggaggccgtgctgatcagcgagggcctgggcctgttcgccagagaccccagattcgtggccctggccaagcaggagatcgccgacgcctgcagactgaccctggacgagatggacaacgccgccagcgacctgctggcccagggcaccagcagcctgtacagcgacgaggagagcatcctgagcagattcgacgaggaggacctgggcgacgagatggcctgcgtgcacgccctgtag

SEQ ID NO: 75045 - DNA, 5739 bp, synthetic construct
  misc_feature 1..5739: note = Description of Artificial Sequence: Synthetic coding sequence
  source 1..5739: mol_type = other DNA
atgagcgagagcgagggcggcaagggcgagagaatcctgcccagcctgcagaccctgggcgccagcatcgtggagtggaagcccttcgacatcctgatcctgctgaccatcttcgccaactgcgtggccctgggcgtgtacatccccttccccgaggacgacagcaacaccgccaaccacaacctggagcaggtggagtacgtgttcctggtgatcttcaccgtggagaccgtgctgaagatcgtggcctacggcctggtgctgcaccccagcgcctacatcagaaacggctggaacctgctggacttcatcatcgtggtggtgggcctgttcagcgtgctgctggagcagggccccggcagacccggcgacgccccccacaccggcggcaagcccggcggcttcgacgtgaaggccctgagagccttcagagtgctgagacccctgagactggtgagcggcgtgcccagcctgcacatcgtgctgaacagcatcatgaaggccctggtgcccctgctgcacatcgccctgctggtgctgttcgtgatcatcatctacgccatcatcggcctggagctgttcctgggcagaatgcacaagacctgctacttcctgggcagcgacatggaggccgaggaggaccccagcccctgcgccagcagcggcagcggcagagcctgcaccctgaaccagaccgagtgcagaggcagatggcccggccccaacggcggcatcaccaacttcgacaacttcttcttcgccatgctgaccgtgttccagtgcgtgaccatggagggctggaccgacgtgctgtactggatgcaggacgccatgggctacgagctgccctgggtgtacttcgtgagcctggtgatcttcggcagcttcttcgtgctgaacctggtgctgggcgtgctgagcggcgagttcagcaaggagagagagaaggccaaggccagaggcgacttccagaagcagagagagaagcagcagatggaggaggacctgagaggctacctggactggatcacccaggccgaggagctggacatggaggaccccagcgccgacgacaacctgggcagcatggccgaggagggcagagccggccacagaccccagctggccgagctgaccaacagaagaagaggcagactgagatggttcagccacagcaccagaagcacccacagcaccagcagccacgccagcctgcccgccagcgacaccggcagcatgaccgagacccagggcgacgaggacgaggaggagggcgccctggccagctgcaccagatgcctgaacaagatcatgaagaccagagtgtgcagaagactgagaagagccaacagagtgctgagagccagatgcagaagagccgtgaagagcaacgcctgctactgggccgtgctgctgctggtgttcctgaacaccctgaccatcgccagcgagcaccacggccagcccgtgtggctgacccagatccaggagtacgccaacaaggtgctgctgtgcctgttcaccgtggagatgctgctgaagctgtacggcctgggccccagcgcctacgtgagcagcttcttcaacagattcgactgcttcgtggtgtgcggcggcatcctggagaccaccctggtggaggtgggcgccatgcagcccctgggcatcagcgtgctgagatgcgtgagactgctgagaatcttcaaggtgaccagacactgggccagcctgagcaacctggtggccagcctgctgaacagcatgaagagcatcgccagcctgctgctgctgctgttcctgttcatcatcatcttcagcctgctgggcatgcagctgttcggcggcaagttcaacttcgaccagacccacaccaagagaagcaccttcgacaccttcccccaggccctgctgaccgtgttccagatcctgaccggcgaggactggaacgtggtgatgtacgacggcatcatggcctacggcggccccttcttccccggcatgctggtgtgcatctacttcatcatcctgttcatctgcggcaactacatcctgctgaacgtgttcctggccatcgccgtggacaacctggccagcggcgacgccggcaccgccaaggacaagggcggcgagaagagcaacgagaaggacctgccccaggagaacgagggcctggtgcccggcgtggagaaggaggaggaggagggcgccagaagagagggcgccgacatggaggaggaggaggaggaggaggaggaggaggaggaggaggaggaggaggagggcgccggcggcgtggagctgctgcaggaggtggtgcccaaggagaaggtggtgcccatccccgagggcagcgccttcttctgcctgagccagaccaaccccctgagaaagggctgccacaccctgatccaccaccacgtgttcaccaacctgatcctggtgttcatcatcctgagcagcgtgagcctggccgccgaggaccccatcagagcccacagcttcagaaaccacatcctgggctacttcgactacgccttcaccagcatcttcaccgtggagatcctgctgaagatgaccgtgttcggcgccttcctgcacagaggcagcttctgcagaagctggttcaacatgctggacctgctggtggtgagcgtgagcctgatcagcttcggcatccacagcagcgccatcagcgtggtgaagatcctgagagtgctgagagtgctgagacccctgagagccatcaacagagccaagggcctgaagcacgtggtgcagtgcgtgttcgtggccatcagaaccatcggcaacatcatgatcgtgaccaccctgctgcagttcatgttcgcctgcatcggcgtgcagctgttcaagggcaagttctacacctgcaccgacgaggccaagcacaccccccaggagtgcaagggcagcttcctggtgtaccccgacggcgacgtgagcagacccctggtgagagagagactgtgggtgaacagcgacttcaacttcgacaacgtgctgagcgccatgatggccctgttcaccgtgagcaccttcgagggctggcccgccctgctgtacaaggccatcgacgcctacgccgaggaccacggccccatctacaactacagagtggagatcagcgtgttcttcatcgtgtacatcatcatcatcgccttcttcatgatgaacatcttcgtgggcttcgtgatcatcaccttcagagcccagggcgagcaggagtaccagaactgcgagctggacaagaaccagagacagtgcgtggagtacgccctgaaggcccagcccctgagaagatacatccccaagaacccccaccagtacagagtgtgggccaccgtgaacagcgccgccttcgagtacctgatgttcctgctgatcctgctgaacaccgtggccctggccatgcagcactacgagcagaccgcccccttcaactacgccatggacatcctgaacatggtgttcaccggcctgttcaccatcgagatggtgctgaagatcatcgccttcaagcccaagcactacttcaccgacgcctggaacaccttcgacgccctgatcgtggtgggcagcatcgtggacatcgccgtgaccgaggtgaacaacggcggccacctgggcgagagcagcgaggacagcagcagaatcagcatcaccttcttcagactgttcagagtgatgagactggtgaagctgctgagcaagggcgagggcatcagaaccctgctgtggaccttcatcaagagcttccaggccctgccctacgtggccctgctgatcgccatgatcttcttcatctacgccgtgatcggcatgcagatgttcggcaaggtggccctgcaggacggcacccagatcaacagaaacaacaacttccagaccttcccccaggccgtgctgctgctgttcagatgcgccaccggcgaggcctggcaggagatcatgctggccagcctgcccggcaacagatgcgaccccgagagcgacttcggccccggcgaggagttcacctgcggcagcaacttcgccatcgcctacttcatcagcttcttcatgctgtgcgccttcctgatcatcaacctgttcgtggccgtgatcatggacaacttcgactacctgaccagagactggagcatcctgggcccccaccacctggacgagttcaagagaatctggagcgagtacgaccccggcgccaagggcagaatcaagcacctggacgtggtggccctgctgagaagaatccagccccccctgggcttcggcaagctgtgcccccacagagtggcctgcaagagactggtggccatgaacatgcccctgaacagcgacggcaccgtgaccttcaacgccaccctgttcgccctggtgagaaccagcctgaagatcaagaccgagggcaacctggagcaggccaaccaggagctgagaatcgtgatcaagaagatctggaagagaatgaagcagaagctgctggacgaggtgatccccccccccgacgaggaggaggtgaccgtgggcaagttctacgccaccttcctgatccaggactacttcagaaagttcagaagaagaaaggagaagggcctgctgggcaacgacgccgcccccagcaccagcagcgccctgcaggccggcctgagaagcctgcaggacctgggccccgagatgagacaggccctgacctgcgacaccgaggaggaggaggaggagggccaggagggcgtggaggaggaggacgagaaggacctggagaccaacaaggccaccatggtgagccagcccagcgccagaagaggcagcggcatcagcgtgagcctgcccgtgggcgacagactgcccgacagcctgagcttcggccccagcgacgacgacagaggcacccccaccagcagccagcccagcgtgccccaggccggcagcaacacccacagaagaggcagcggcgccctgatcttcaccatccccgaggagggcaacagccagcccaagggcaccaagggccagaacaagcaggacgaggacgaggaggtgcccgacagactgagctacctggacgagcaggccggcacccccccctgcagcgtgctgctgcccccccacagagcccagagatacatggacggccacctggtgcccagaagaagactgctgccccccacccccgccggcagaaagcccagcttcaccatccagtgcctgcagagacagggcagctgcgaggacctgcccatccccggcacctaccacagaggcagaaacagcggccccaacagagcccagggcagctgggccacccccccccagagaggcagactgctgtacgcccccctgctgctggtggaggagggcgccgccggcgagggctacctgggcagaagcagcggccccctgagaaccttcacctgcctgcacgtgcccggcacccacagcgaccccagccacggcaagagaggcagcgccgacagcctggtggaggccgtgctgatcagcgagggcctgggcctgttcgccagagaccccagattcgtggccctggccaagcaggagatcgccgacgcctgcagactgaccctggacgagatggacaacgccgccagcgacctgctggcccagggcaccagcagcctgtacagcgacgaggagagcatcctgagcagattcgacgaggaggacctgggcgacgagatggcctgcgtgcacgccctgtag

SEQ ID NO: 75046 - DNA, 5934 bp, synthetic construct
  misc_feature 1..5934: note = Description of Artificial Sequence: Synthetic coding sequence
  source 1..5934: mol_type = other DNA
atgagcgagagcgagggcggcaaggacaccacccccgagcccagccccgccaacggcgccggccccggccccgagtggggcctgtgccccggcccccccgccgtggagggcgagagcagcggcgccagcggcctgggcacccccaagagaagaaaccagcacagcaagcacaagaccgtggccgtggccagcgcccagagaagccccagagccctgttctgcctgaccctggccaaccccctgagaagaagctgcatcagcatcgtggagtggaagcccttcgacatcctgatcctgctgaccatcttcgccaactgcgtggccctgggcgtgtacatccccttccccgaggacgacagcaacaccgccaaccacaacctggagcaggtggagtacgtgttcctggtgatcttcaccgtggagaccgtgctgaagatcgtggcctacggcctggtgctgcaccccagcgcctacatcagaaacggctggaacctgctggacttcatcatcgtggtggtgggcctgttcagcgtgctgctggagcagggccccggcagacccggcgacgccccccacaccggcggcaagcccggcggcttcgacgtgaaggccctgagagccttcagagtgctgagacccctgagactggtgagcggcgtgcccagcctgcacatcgtgctgaacagcatcatgaaggccctggtgcccctgctgcacatcgccctgctggtgctgttcgtgatcatcatctacgccatcatcggcctggagctgttcctgggcagaatgcacaagacctgctacttcctgggcagcgacatggaggccgaggaggaccccagcccctgcgccagcagcggcagcggcagagcctgcaccctgaaccagaccgagtgcagaggcagatggcccggccccaacggcggcatcaccaacttcgacaacttcttcttcgccatgctgaccgtgttccagtgcgtgaccatggagggctggaccgacgtgctgtactggatgcaggacgccatgggctacgagctgccctgggtgtacttcgtgagcctggtgatcttcggcagcttcttcgtgctgaacctggtgctgggcgtgctgagcggcgagttcagcaaggagagagagaaggccaaggccagaggcgacttccagaagcagagagagaagcagcagatggaggaggacctgagaggctacctggactggatcacccaggccgaggagctggacatggaggaccccagcgccgacgacaacctgggcagcatggccgaggagggcagagccggccacagaccccagctggccgagctgaccaacagaagaagaggcagactgagatggttcagccacagcaccagaagcacccacagcaccagcagccacgccagcctgcccgccagcgacaccggcagcatgaccgagacccagggcgacgaggacgaggaggagggcgccctggccagctgcaccagatgcctgaacaagatcatgaagaccagagtgtgcagaagactgagaagagccaacagagtgctgagagccagatgcagaagagccgtgaagagcaacgcctgctactgggccgtgctgctgctggtgttcctgaacaccctgaccatcgccagcgagcaccacggccagcccgtgtggctgacccagatccaggagtacgccaacaaggtgctgctgtgcctgttcaccgtggagatgctgctgaagctgtacggcctgggccccagcgcctacgtgagcagcttcttcaacagattcgactgcttcgtggtgtgcggcggcatcctggagaccaccctggtggaggtgggcgccatgcagcccctgggcatcagcgtgctgagatgcgtgagactgctgagaatcttcaaggtgaccagacactgggccagcctgagcaacctggtggccagcctgctgaacagcatgaagagcatcgccagcctgctgctgctgctgttcctgttcatcatcatcttcagcctgctgggcatgcagctgttcggcggcaagttcaacttcgaccagacccacaccaagagaagcaccttcgacaccttcccccaggccctgctgaccgtgttccagatcctgaccggcgaggactggaacgtggtgatgtacgacggcatcatggcctacggcggccccttcttccccggcatgctggtgtgcatctacttcatcatcctgttcatctgcggcaactacatcctgctgaacgtgttcctggccatcgccgtggacaacctggccagcggcgacgccggcaccgccaaggacaagggcggcgagaagagcaacgagaaggacctgccccaggagaacgagggcctggtgcccggcgtggagaaggaggaggaggagggcgccagaagagagggcgccgacatggaggaggaggaggaggaggaggaggaggaggaggaggaggaggaggaggagggcgccggcggcgtggagctgctgcaggaggtggtgcccaaggagaaggtggtgcccatccccgagggcagcgccttcttctgcctgagccagaccaaccccctgagaaagggctgccacaccctgatccaccaccacgtgttcaccaacctgatcctggtgttcatcatcctgagcagcgtgagcctggccgccgaggaccccatcagagcccacagcttcagaaaccacatcctgggctacttcgactacgccttcaccagcatcttcaccgtggagatcctgctgaagatgaccgtgttcggcgccttcctgcacagaggcagcttctgcagaagctggttcaacatgctggacctgctggtggtgagcgtgagcctgatcagcttcggcatccacagcagcgccatcagcgtggtgaagatcctgagagtgctgagagtgctgagacccctgagagccatcaacagagccaagggcctgaagcacgtggtgcagtgcgtgttcgtggccatcagaaccatcggcaacatcatgatcgtgaccaccctgctgcagttcatgttcgcctgcatcggcgtgcagctgttcaagggcaagttctacacctgcaccgacgaggccaagcacaccccccaggagtgcaagggcagcttcctggtgtaccccgacggcgacgtgagcagacccctggtgagagagagactgtgggtgaacagcgacttcaacttcgacaacgtgctgagcgccatgatggccctgttcaccgtgagcaccttcgagggctggcccgccctgctgtacaaggccatcgacgcctacgccgaggaccacggccccatctacaactacagagtggagatcagcgtgttcttcatcgtgtacatcatcatcatcgccttcttcatgatgaacatcttcgtgggcttcgtgatcatcaccttcagagcccagggcgagcaggagtaccagaactgcgagctggacaagaaccagagacagtgcgtggagtacgccctgaaggcccagcccctgagaagatacatccccaagaacccccaccagtacagagtgtgggccaccgtgaacagcgccgccttcgagtacctgatgttcctgctgatcctgctgaacaccgtggccctggccatgcagcactacgagcagaccgcccccttcaactacgccatggacatcctgaacatggtgttcaccggcctgttcaccatcgagatggtgctgaagatcatcgccttcaagcccaagcactacttcaccgacgcctggaacaccttcgacgccctgatcgtggtgggcagcatcgtggacatcgccgtgaccgaggtgaacaacggcggccacctgggcgagagcagcgaggacagcagcagaatcagcatcaccttcttcagactgttcagagtgatgagactggtgaagctgctgagcaagggcgagggcatcagaaccctgctgtggaccttcatcaagagcttccaggccctgccctacgtggccctgctgatcgccatgatcttcttcatctacgccgtgatcggcatgcagatgttcggcaaggtggccctgcaggacggcacccagatcaacagaaacaacaacttccagaccttcccccaggccgtgctgctgctgttcagatgcgccaccggcgaggcctggcaggagatcatgctggccagcctgcccggcaacagatgcgaccccgagagcgacttcggccccggcgaggagttcacctgcggcagcaacttcgccatcgcctacttcatcagcttcttcatgctgtgcgccttcctgatcatcaacctgttcgtggccgtgatcatggacaacttcgactacctgaccagagactggagcatcctgggcccccaccacctggacgagttcaagagaatctggagcgagtacgaccccggcgccaagggcagaatcaagcacctggacgtggtggccctgctgagaagaatccagccccccctgggcttcggcaagctgtgcccccacagagtggcctgcaagagactggtggccatgaacatgcccctgaacagcgacggcaccgtgaccttcaacgccaccctgttcgccctggtgagaaccagcctgaagatcaagaccgagggcaacctggagcaggccaaccaggagctgagaatcgtgatcaagaagatctggaagagaatgaagcagaagctgctggacgaggtgatccccccccccgacgaggaggaggtgaccgtgggcaagttctacgccaccttcctgatccaggactacttcagaaagttcagaagaagaaaggagaagggcctgctgggcaacgacgccgcccccagcaccagcagcgccctgcaggccggcctgagaagcctgcaggacctgggccccgagatgagacaggccctgacctgcgacaccgaggaggaggaggaggagggccaggagggcgtggaggaggaggacgagaaggacctggagaccaacaaggccaccatggtgagccagcccagcgccagaagaggcagcggcatcagcgtgagcctgcccgtgggcgacagactgcccgacagcctgagcttcggccccagcgacgacgacagaggcacccccaccagcagccagcccagcgtgccccaggccggcagcaacacccacagaagaggcagcggcgccctgatcttcaccatccccgaggagggcaacagccagcccaagggcaccaagggccagaacaagcaggacgaggacgaggaggtgcccgacagactgagctacctggacgagcaggccggcacccccccctgcagcgtgctgctgcccccccacagagcccagagatacatggacggccacctggtgcccagaagaagactgctgccccccacccccgccggcagaaagcccagcttcaccatccagtgcctgcagagacagggcagctgcgaggacctgcccatccccggcacctaccacagaggcagaaacagcggccccaacagagcccagggcagctgggccacccccccccagagaggcagactgctgtacgcccccctgctgctggtggaggagggcgccgccggcgagggctacctgggcagaagcagcggccccctgagaaccttcacctgcctgcacgtgcccggcacccacagcgaccccagccacggcaagagaggcagcgccgacagcctggtggaggccgtgctgatcagcgagggcctgggcctgttcgccagagaccccagattcgtggccctggccaagcaggagatcgccgacgcctgcagactgaccctggacgagatggacaacgccgccagcgacctgctggcccagggcaccagcagcctgtacagcgacgaggagagcatcctgagcagattcgacgaggaggacctgggcgacgagatggcctgcgtgcacgccctgtag

SEQ ID NO: 75047 - DNA, 5622 bp, synthetic construct
  misc_feature 1..5622: note = Description of Artificial Sequence: Synthetic coding sequence
  source 1..5622: mol_type = other DNA
atggagcccagcagcccccaggacgagggcctgagaaagaagcagcccaagaagcccgtgcccgagatcctgcccagaccccccagagccctgttctgcctgaccctggagaaccccctgagaaaggcctgcatcagcatcgtggagtggaagcccttcgagaccatcatcctgctgaccatcttcgccaactgcgtggccctggccgtgtacctgcccatgcccgaggacgacaacaacagcctgaacctgggcctggagaagctggagtacttcttcctgatcgtgttcagcatcgaggccgccatgaagatcatcgcctacggcttcctgttccaccaggacgcctacctgagaagcggctggaacgtgctggacttcaccatcgtgttcctgggcgtgttcaccgtgatcctggagcaggtgaacgtgatccagagccacaccgcccccatgagcagcaagggcgccggcctggacgtgaaggccctgagagccttcagagtgctgagacccctgagactggtgagcggcgtgcccagcctgcaggtggtgctgaacagcatcttcaaggccatgctgcccctgttccacatcgccctgctggtgctgttcatggtgatcatctacgccatcatcggcctggagctgttcaagggcaagatgcacaagacctgctacttcatcggcaccgacatcgtggccaccgtggagaacgaggagcccagcccctgcgccagaaccggcagcggcagaagatgcaccatcaacggcagcgagtgcagaggcggctggcccggccccaaccacggcatcacccacttcgacaacttcggcttcagcatgctgaccgtgtaccagtgcatcaccatggagggctggaccgacgtgctgtactgggtgaacgacgccatcggcaacgagtggccctggatctacttcgtgaccctgatcctgctgggcagcttcttcatcctgaacctggtgctgggcgtgctgagcggcgagttcaccaaggagagagagaaggccaagagcagaggcaccttccagaagctgagagagaagcagcagctggacgaggacctgagaggctacatgagctggatcacccagggcgaggtgatggacgtggaggacttcagagagggcaagctgagcctggacgagggcggcagcgacaccgagagcctgtacgagatcgccggcctgaacaagatcatccagttcatcagacactggagacagtggaacagaatcttcagatggaagtgccacgacatcgtgaagagcaaggtgttctactggctggtgatcctgatcgtggccctgaacaccctgagcatcgccagcgagcaccacaaccagcccctgtggctgaccagactgcaggacatcgccaacagagtgctgctgagcctgttcaccaccgagatgctgatgaagatgtacggcctgggcctgagacagtacttcatgagcatcttcaacagattcgactgcttcgtggtgtgcagcggcatcctggagatcctgctggtggagagcggcgccatgacccccctgggcatcagcgtgctgagatgcatcagactgctgagaatcttcaagatcaccaagtactggaccagcctgagcaacctggtggccagcctgctgaacagcatcagaagcatcgccagcctgctgctgctgctgttcctgttcatcgtgatcttcgccctgctgggcatgcagctgttcggcggcagatacgacttcgaggacaccgaggtgagaagaagcaacttcgacaacttcccccaggccctgatcagcgtgttccaggtgctgaccggcgaggactggaccagcatgatgtacaacggcatcatggcctacggcggccccagctaccccggcatgctggtgtgcatctacttcatcatcctgttcgtgtgcggcaactacatcctgctgaacgtgttcctggccatcgccgtggacaacctggccgaggccgagagcctgaccagcgcccagaaggccaaggccgaggagaagaagagaagaaagatgagcaagggcctgcccgacaagagcgaggaggagaagagcaccatggccaagaagctggagcagaagcccaagggcgagggcatccccaccaccgccaagctgaagatcgacgagttcgagagcaacgtgaacgaggtgaaggacccctaccccagcgccgacttccccggcgacgacgaggaggacgagcccgagatccccctgagccccagacccagacccctggccgagctgcagctgaaggagaaggccgtgcccatccccgaggccagcagcttcttcatcttcagccccaccaacaagatcagagtgctgtgccacagaatcgtgaacgccacctggttcaccaacttcatcctgctgttcatcctgctgagcagcgccgccctggccgccgaggaccccatcagagccgacagcatgagaaaccagatcctgaagcacttcgacatcggcttcaccagcgtgttcaccgtggagatcgtgctgaagatgaccacctacggcgccttcctgcacaagggcagcttctgcagaaactacttcaacatgctggacctgctggtggtggccgtgagcctgatcagcatgggcctggagagcagcgccatcagcgtggtgaagatcctgagagtgctgagagtgctgagacccctgagagccatcaacagagccaagggcctgaagcacgtggtgcagtgcatgttcgtggccatcagcaccatcggcaacatcgtgctggtgaccaccctgctgcagttcatgttcgcctgcatcggcgtgcagctgttcaagggcaagttcttcagatgcaccgacctgagcaagatgaccgaggaggagtgcagaggctactactacgtgtacaaggacggcgaccccatgcagatcgagctgagacacagagagtgggtgcacagcgacttccacttcgacaacgtgctgagcgccatgatgagcctgttcaccgtgagcaccttcgagggctggccccagctgctgtacaaggccatcgacagcaacgccgaggacgtgggccccatctacaacaacagagtggagatggccatcttcttcatcatctacatcatcctgatcgccttcttcatgatgaacatcttcgtgggcttcgtgatcgtgaccttccaggagcagggcgagaccgagtacaagaactgcgagctggacaagaaccagagacagtgcgtgcagtacgccctgaaggccagacccctgagatgctacatccccaagaacccctaccagtaccaggtgtggtacatcgtgaccagcagctacttcgagtacctgatgttcgccctgatcatgctgaacaccatctgcctgggcatgcagcactacaaccagagcgagcagatgaaccacatcagcgacatcctgaacgtggccttcaccatcatcttcaccctggagatgatcctgaagctgatggccttcaaggccagaggctacttcggcgacccctggaacgtgttcgacttcctgatcgtgatcggcagcatcatcgacgtgatcctgagcgagatcgacaccttcctggccagcagcggcggcctgtactgcctgggcggcggctgcggcaacgtggaccccgacgagagcgccagaatcagcagcgccttcttcagactgttcagagtgatgagactgatcaagctgctgagcagagccgagggcgtgagaaccctgctgtggaccttcatcaagagcttccaggccctgccctacgtggccctgctgatcgtgatgctgttcttcatctacgccgtgatcggcatgcagatgttcggcaagatcgccctggtggacggcacccagatcaacagaaacaacaacttccagaccttcccccaggccgtgctgctgctgttcagatgcgccaccggcgaggcctggcaggagatcctgctggcctgcagctacggcaagctgtgcgaccccgagagcgactacgcccccggcgaggagtacacctgcggcaccaacttcgcctactactacttcatcagcttctacatgctgtgcgccttcctggtgatcaacctgttcgtggccgtgatcatggacaacttcgactacctgaccagagactggagcatcctgggcccccaccacctggacgagttcaaggccatctgggccgagtacgaccccgaggccaagggcagaatcaagcacctggacgtggtgaccctgctgagaagaatccagccccccctgggcttcggcaagttctgcccccacagagtggcctgcaagagactggtgggcatgaacatgcccctgaacagcgacggcaccgtgaccttcaacgccaccctgttcgccctggtgagaaccgccctgaagatcaagaccgagggcaacttcgagcaggccaacgaggagctgagagccatcatcaagaagatctggaagagaaccagcatgaagctgctggaccaggtgatcccccccatcggcgacgacgaggtgaccgtgggcaagttctacgccaccttcctgatccaggagcacttcagaaagttcatgaagagacaggaggagtactacggctacagacccaagaaggacatcgtgcagatccaggccggcctgagaaccatcgaggaggaggccgcccccgagatctgcagaaccgtgagcggcgacctggccgccgaggaggagctggagagagccatggtggaggccgccatggaggagggcatcttcagaagaaccggcggcctgttcggccaggtggacaacttcctggagagaaccaacagcctgccccccgtgatggccaaccagagacccctgcagttcgccgagatcgagatggaggagatggagagccccgtgttcctggaggacttcccccaggaccccagaaccaaccccctggccagagccaacaccaacaacgccaacgccaacgtggcctacggcaacagcaaccacagcaacagccacgtgttcagcagcgtgcactacgagagagagttccccgaggagaccgagacccccgccaccagaggcagagccctgggccagccctgcagagtgctgggcccccacagcaagccctgcgtggagatgctgaagggcctgctgacccagagagccatgcccagaggccaggccccccccgccccctgccagtgccccagagtggagagcagcatgcccgaggacagaaagagcagcacccccggcagcctgcacgaggagaccccccacagcagaagcaccagagagaacaccagcagatgcagcgcccccgccaccgccctgctgatccagaaggccctggtgagaggcggcctgggcaccctggccgccgacgccaacttcatcatggccaccggccaggccctggccgacgcctgccagatggagcccgaggaggtggagatcatggccaccgagctgctgaagggcagagaggcccccgagggcatggccagcagcctgggctgcctgaacctgggcagcagcctgggcagcctggaccagcaccagggcagccaggagaccctgatcccccccagactgtag

SEQ ID NO: 75048 - DNA, 5565 bp, synthetic construct
  misc_feature 1..5565: note = Description of Artificial Sequence: Synthetic coding sequence
  source 1..5565: mol_type = other DNA
atggagcccagcagcccccaggacgagggcctgagaaagaagcagcccaagaagcccgtgcccgagatcctgcccagaccccccagagccctgttctgcctgaccctggagaaccccctgagaaaggcctgcatcagcatcgtggagtggaagcccttcgagaccatcatcctgctgaccatcttcgccaactgcgtggccctggccgtgtacctgcccatgcccgaggacgacaacaacagcctgaacctgggcctggagaagctggagtacttcttcctgatcgtgttcagcatcgaggccgccatgaagatcatcgcctacggcttcctgttccaccaggacgcctacctgagaagcggctggaacgtgctggacttcaccatcgtgttcctgggcgtgttcaccgtgatcctggagcaggtgaacgtgatccagagccacaccgcccccatgagcagcaagggcgccggcctggacgtgaaggccctgagagccttcagagtgctgagacccctgagactggtgagcggcgtgcccagcctgcaggtggtgctgaacagcatcttcaaggccatgctgcccctgttccacatcgccctgctggtgctgttcatggtgatcatctacgccatcatcggcctggagctgttcaagggcaagatgcacaagacctgctacttcatcggcaccgacatcgtggccaccgtggagaacgaggagcccagcccctgcgccagaaccggcagcggcagaagatgcaccatcaacggcagcgagtgcagaggcggctggcccggccccaaccacggcatcacccacttcgacaacttcggcttcagcatgctgaccgtgtaccagtgcatcaccatggagggctggaccgacgtgctgtactgggtgaacgacgccatcggcaacgagtggccctggatctacttcgtgaccctgatcctgctgggcagcttcttcatcctgaacctggtgctgggcgtgctgagcggcgagttcaccaaggagagagagaaggccaagagcagaggcaccttccagaagctgagagagaagcagcagctggacgaggacctgagaggctacatgagctggatcacccagggcgaggtgatggacgtggaggacttcagagagggcaagctgagcctggacgagggcggcagcgacaccgagagcctgtacgagatcgccggcctgaacaagatcatccagttcatcagacactggagacagtggaacagaatcttcagatggaagtgccacgacatcgtgaagagcaaggtgttctactggctggtgatcctgatcgtggccctgaacaccctgagcatcgccagcgagcaccacaaccagcccctgtggctgaccagactgcaggacatcgccaacagagtgctgctgagcctgttcaccaccgagatgctgatgaagatgtacggcctgggcctgagacagtacttcatgagcatcttcaacagattcgactgcttcgtggtgtgcagcggcatcctggagatcctgctggtggagagcggcgccatgacccccctgggcatcagcgtgctgagatgcatcagactgctgagaatcttcaagatcaccaagtactggaccagcctgagcaacctggtggccagcctgctgaacagcatcagaagcatcgccagcctgctgctgctgctgttcctgttcatcgtgatcttcgccctgctgggcatgcagctgttcggcggcagatacgacttcgaggacaccgaggtgagaagaagcaacttcgacaacttcccccaggccctgatcagcgtgttccaggtgctgaccggcgaggactggaccagcatgatgtacaacggcatcatggcctacggcggccccagctaccccggcatgctggtgtgcatctacttcatcatcctgttcgtgtgcggcaactacatcctgctgaacgtgttcctggccatcgccgtggacaacctggccgaggccgagagcctgaccagcgcccagaaggccaaggccgaggagaagaagagaagaaagatgagcaagggcctgcccgacaagagcgaggaggagaagagcaccatggccaagaagctggagcagaagcccaagggcgagggcatccccaccaccgccaagctgaagatcgacgagttcgagagcaacgtgaacgaggtgaaggacccctaccccagcgccgacttccccggcgacgacgaggaggacgagcccgagatccccctgagccccagacccagacccctggccgagctgcagctgaaggagaaggccgtgcccatccccgaggccagcagcttcttcatcttcagccccaccaacaagatcagagtgctgtgccacagaatcgtgaacgccacctggttcaccaacttcatcctgctgttcatcctgctgagcagcgccgccctggccgccgaggaccccatcagagccgacagcatgagaaaccagatcctgaagcacttcgacatcggcttcaccagcgtgttcaccgtggagatcgtgctgaagatgaccacctacggcgccttcctgcacaagggcagcttctgcagaaactacttcaacatgctggacctgctggtggtggccgtgagcctgatcagcatgggcctggagagcagcgccatcagcgtggtgaagatcctgagagtgctgagagtgctgagacccctgagagccatcaacagagccaagggcctgaagcacgtggtgcagtgcatgttcgtggccatcagcaccatcggcaacatcgtgctggtgaccaccctgctgcagttcatgttcgcctgcatcggcgtgcagctgttcaagggcaagttcttcagatgcaccgacctgagcaagatgaccgaggaggagtgcagaggctactactacgtgtacaaggacggcgaccccatgcagatcgagctgagacacagagagtgggtgcacagcgacttccacttcgacaacgtgctgagcgccatgatgagcctgttcaccgtgagcaccttcgagggctggccccagctgctgtacaaggccatcgacagcaacgccgaggacgtgggccccatctacaacaacagagtggagatggccatcttcttcatcatctacatcatcctgatcgccttcttcatgatgaacatcttcgtgggcttcgtgatcgtgaccttccaggagcagggcgagaccgagtacaagaactgcgagctggacaagaaccagagacagtgcgtgcagtacgccctgaaggccagacccctgagatgctacatccccaagaacccctaccagtaccaggtgtggtacatcgtgaccagcagctacttcgagtacctgatgttcgccctgatcatgctgaacaccatctgcctgggcatgcagcactacaaccagagcgagcagatgaaccacatcagcgacatcctgaacgtggccttcaccatcatcttcaccctggagatgatcctgaagctgatggccttcaaggccagaggctacttcggcgacccctggaacgtgttcgacttcctgatcgtgatcggcagcatcatcgacgtgatcctgagcgagatcgacgaccccgacgagagcgccagaatcagcagcgccttcttcagactgttcagagtgatgagactgatcaagctgctgagcagagccgagggcgtgagaaccctgctgtggaccttcatcaagagcttccaggccctgccctacgtggccctgctgatcgtgatgctgttcttcatctacgccgtgatcggcatgcagatgttcggcaagatcgccctggtggacggcacccagatcaacagaaacaacaacttccagaccttcccccaggccgtgctgctgctgttcagatgcgccaccggcgaggcctggcaggagatcctgctggcctgcagctacggcaagctgtgcgaccccgagagcgactacgcccccggcgaggagtacacctgcggcaccaacttcgcctactactacttcatcagcttctacatgctgtgcgccttcctggtgatcaacctgttcgtggccgtgatcatggacaacttcgactacctgaccagagactggagcatcctgggcccccaccacctggacgagttcaaggccatctgggccgagtacgaccccgaggccaagggcagaatcaagcacctggacgtggtgaccctgctgagaagaatccagccccccctgggcttcggcaagttctgcccccacagagtggcctgcaagagactggtgggcatgaacatgcccctgaacagcgacggcaccgtgaccttcaacgccaccctgttcgccctggtgagaaccgccctgaagatcaagaccgagggcaacttcgagcaggccaacgaggagctgagagccatcatcaagaagatctggaagagaaccagcatgaagctgctggaccaggtgatcccccccatcggcgacgacgaggtgaccgtgggcaagttctacgccaccttcctgatccaggagcacttcagaaagttcatgaagagacaggaggagtactacggctacagacccaagaaggacatcgtgcagatccaggccggcctgagaaccatcgaggaggaggccgcccccgagatctgcagaaccgtgagcggcgacctggccgccgaggaggagctggagagagccatggtggaggccgccatggaggagggcatcttcagaagaaccggcggcctgttcggccaggtggacaacttcctggagagaaccaacagcctgccccccgtgatggccaaccagagacccctgcagttcgccgagatcgagatggaggagatggagagccccgtgttcctggaggacttcccccaggaccccagaaccaaccccctggccagagccaacaccaacaacgccaacgccaacgtggcctacggcaacagcaaccacagcaacagccacgtgttcagcagcgtgcactacgagagagagttccccgaggagaccgagacccccgccaccagaggcagagccctgggccagccctgcagagtgctgggcccccacagcaagccctgcgtggagatgctgaagggcctgctgacccagagagccatgcccagaggccaggccccccccgccccctgccagtgccccagagtggagagcagcatgcccgaggacagaaagagcagcacccccggcagcctgcacgaggagaccccccacagcagaagcaccagagagaacaccagcagatgcagcgcccccgccaccgccctgctgatccagaaggccctggtgagaggcggcctgggcaccctggccgccgacgccaacttcatcatggccaccggccaggccctggccgacgcctgccagatggagcccgaggaggtggagatcatggccaccgagctgctgaagggcagagaggcccccgagggcatggccagcagcctgggctgcctgaacctgggcagcagcctgggcagcctggaccagcaccagggcagccaggagaccctgatcccccccagactgtag

SEQ ID NO: 75049 - DNA, 4602 bp, synthetic construct
  misc_feature 1..4602: note = Description of Artificial Sequence: Synthetic coding sequence
  source 1..4602: mol_type = other DNA
atgaagacccacctggacagacccctggtggtggagctgggcagagacggcgccagaggccccgtgggcggcaaggccagacccgaggccgccgaggcccccgagggcgtggacccccccagaagacaccacagacacagagacaaggacaagacccccgccgccggcgaccaggacagagccgaggcccccaaggccgagagcggcgagcccggcgccagagaggagagacccagaccccacagaagccacagcaaggaggccgccggcccccccgaggccagaagcgagagaggcagaggccccggccccgagggcggcagaagacaccacagaagaggcagccccgaggaggccgccgagagagagcccagaagacacagagcccacagacaccaggaccccagcaaggagtgcgccggcgccaagggcgagagaagagccagacacagaggcggccccagagccggccccagagaggccgagagcggcgaggagcccgccagaagacacagagccagacacaaggcccagcccgcccacgaggccgtggagaaggagaccaccgagaaggaggccaccgagaaggaggccgagatcgtggaggccgacaaggagaaggagctgagaaaccaccagcccagagagccccactgcgacctggagaccagcggcaccgtgaccgtgggccccatgcacaccctgcccagcacctgcctgcagaaggtggaggagcagcccgaggacgccgacaaccagagaaacgtgaccagaatgggcagccagccccccgaccccaacaccatcgtgcacatccccgtgatgctgaccggccccctgggcgaggccaccgtggtgcccagcggcaacgtggacctggagagccaggccgagggcaagaaggaggtggaggccgacgacgtgatgagaagcggccccagacccatcgtgccctacagcagcatgttctgcctgagccccaccaacctgctgagaagattctgccactacatcgtgaccatgagatacttcgaggtggtgatcctggtggtgatcgccctgagcagcatcgccctggccgccgaggaccccgtgagaaccgacagccccagaaacaacgccctgaagtacctggactacatcttcaccggcgtgttcaccttcgagatggtgatcaagatgatcgacctgggcctgctgctgcaccccggcgcctacttcagagacctgtggaacatcctggacttcatcgtggtgagcggcgccctggtggccttcgccttcagcagcttcgtgggcggcagcaagggcaaggacatcaacaccatcaagagcctgagagtgctgagagtgctgagacccctgaagaccatcaagagactgcccaagctgaaggccgtgttcgactgcgtggtgaacagcctgaagaacgtgctgaacatcctgatcgtgtacatgctgttcatgttcatcttcgccgtgatcgccgtgcagctgttcaagggcaagttcttctactgcaccgacgagagcaaggagctggagagagactgcagaggccagtacctggactacgagaaggaggaggtggaggcccagcccagacagtggaagaagtacgacttccactacgacaacgtgctgtgggccctgctgaccctgttcaccgtgagcaccggcgagggctggcccatggtgctgaagcacagcgtggacgccacctacgaggagcagggccccagccccggctacagaatggagctgagcatcttctacgtggtgtacttcgtggtgttccccttcttcttcgtgaacatcttcgtggccctgatcatcatcaccttccaggagcagggcgacaaggtgatgagcgagtgcagcctggagaagaacgagagagcctgcatcgacttcgccatcagcgccaagcccctgaccagatacatgccccagaacagacagagcttccagtacaagacctggaccttcgtggtgagcccccccttcgagtacttcatcatggccatgatcgccctgaacaccgtggtgctgatgatgaagttctacgacgccccctacgagtacgagctgatgctgaagtgcctgaacatcgtgttcaccagcatgttcagcatggagtgcgtgctgaagatcatcgccttcggcgtgctgaactacttcagagacgcctggaacgtgttcgacttcgtgaccgtgctgggcagcatcaccgacatcctggtgaccgagatcgccaacaacttcatcaacctgagcttcctgagactgttcagagccgccagactgatcaagctgctgagacagggctacaccatcagaatcctgctgtggaccttcgtgcagagcttcaaggccctgccctacgtgtgcctgctgatcgccatgctgttcttcatctacgccatcatcggcatgcaggtgttcggcaacatcgccctggacgacgacaccagcatcaacagacacaacaacttcagaaccttcctgcaggccctgatgctgctgttcagaagcgccaccggcgaggcctggcacgagatcatgctgagctgcctgagcaaccaggcctgcgacgagcaggccaacgccaccgagtgcggcagcgacttcgcctacttctacttcgtgagcttcatcttcctgtgcagcttcctgatgctgaacctgttcgtggccgtgatcatggacaacttcgagtacctgaccagagacagcagcatcctgggcccccaccacctggacgagttcatcagagtgtgggccgagtacgaccccgccgcctgcggcagaatcagctacaacgacatgttcgagatgctgaagcacatgagcccccccctgggcctgggcaagaagtgccccgccagagtggcctacaagagactggtgagaatgaacatgcccatcagcaacgaggacatgaccgtgcacttcaccagcaccctgatggccctgatcagaaccgccctggagatcaagctggcccccgccggcaccaagcagcaccagtgcgacgccgagctgagaaaggagatcagcgtggtgtgggccaacctgccccagaagaccctggacctgctggtgcccccccacaagcccgacgagatgaccgtgggcaaggtgtacgccgccctgatgatcttcgacttctacaagcagaacaagaccaccagagaccagatgcagcaggcccccggcggcctgagccagatgggccccgtgagcctgttccaccccctgaaggccaccctggagcagacccagcccgccgtgctgagaggcgccagagtgttcctgagacagaagagcagcaccagcctgagcaacggcggcgccatccagaaccaggagagcggcatcaaggagagcgtgagctggggcacccagagaacccaggacgccccccacgaggccagaccccccctggagagaggccacagcaccgagatccccgtgggcagaagcggcgccctggccgtggacgtgcagatgcagagcatcaccagaagaggccccgacggcgagccccagcccggcctggagagccagggcagagccgccagcatgcccagactggccgccgagacccagcccgtgaccgacgccagccccatgaagagaagcatcagcaccctggcccagagacccagaggcacccacctgtgcagcaccacccccgacagacccccccccagccaggccagcagccaccaccaccaccacagatgccacagaagaagagacagaaagcagagaagcctggagaagggccccagcctgagcgccgacatggacggcgcccccagcagcgccgtgggccccggcctgccccccggcgagggccccaccggctgcagaagagagagagagagaagacaggagagaggcagaagccaggagagaagacagcccagcagcagcagcagcgagaagcagagattctacagctgcgacagattcggcggcagagagccccccaagcccaagcccagcctgagcagccaccccaccagccccaccgccggccaggagcccggcccccacccccagggcagcggcagcgtgaacggcagccccctgctgagcaccagcggcgccagcacccccggcagaggcggcagaagacagctgccccagacccccctgacccccagacccagcatcacctacaagaccgccaacagcagccccatccacttcgccggcgcccagaccagcctgcccgccttcagccccggcagactgagcagaggcctgagcgagcacaacgccctgctgcagagagaccccctgagccagcccctggcccccggcagcagaatcggcagcgacccctacctgggccagagactggacagcgaggccagcgtgcacgccctgcccgaggacaccctgaccttcgaggaggccgtggccaccaacagcggcagaagcagcagaaccagctacgtgagcagcctgaccagccagagccaccccctgagaagagtgcccaacggctaccactgcaccctgggcctgagcagcggcggcagagccagacacagctaccaccaccccgaccaggaccactggtgctag

SEQ ID NO: 75050 - DNA, 306 bp, synthetic construct
  misc_feature 1..306: note = Description of Artificial Sequence: Synthetic coding sequence
  source 1..306: mol_type = other DNA
gacaacctggccaacgcccaggagctgaccaaggacgaggaggagatggaggaggccgccaaccagaagctggccctgcagaaggccaaggaggtggccgaggtgagccccatgagcgccgccaacatcagcatcgccgccttcgtgaagcaggccagaggcaccgtgagcagaagcagcagcgtgagcagcgtgaacagccccagacagcagaacagcgccaaggccagaagcgtgtgggagcagagagccagccagctgagactgcagaacctgagagccagctgcgaggccctgtacagctag

SEQ ID NO: 75051 - DNA, 6714 bp, synthetic construct
  misc_feature 1..6714: note = Description of Artificial Sequence: Synthetic coding sequence
  source 1..6714: mol_type = other DNA
atggtgagattcggcgacgagctgggcggcagatacggcggccccggcggcggcgagagagccagaggcggcggcgccggcggcgccggcggccccggccccggcggcctgcagcccggccagagagtgctgtacaagcagagcatcgcccagagagccagaaccatggccctgtacaaccccatccccgtgaagcagaactgcttcaccgtgaacagaagcctgttcgtgttcagcgaggacaacgtggtgagaaagtacgccaagagaatcaccgagtggccccccttcgagtacatgatcctggccaccatcatcgccaactgcatcgtgctggccctggagcagcacctgcccgacggcgacaagacccccatgagcgagagactggacgacaccgagccctacttcatcggcatcttctgcttcgaggccggcatcaagatcatcgccctgggcttcgtgttccacaagggcagctacctgagaaacggctggaacgtgatggacttcgtggtggtgctgaccggcatcctggccaccgccggcaccgacttcgacctgagaaccctgagagccgtgagagtgctgagacccctgaagctggtgagcggcatccccagcctgcaggtggtgctgaagagcatcatgaaggccatggtgcccctgctgcagatcggcctgctgctgttcttcgccatcctgatgttcgccatcatcggcctggagttctacatgggcaagttccacaaggcctgcttccccaacagcaccgacgccgagcccgtgggcgacttcccctgcggcaaggaggcccccgccagactgtgcgagggcgacaccgagtgcagagagtactggcccggccccaacttcggcatcaccaacttcgacaacatcctgttcgccatcctgaccgtgttccagtgcatcaccatggagggctggaccgacatcctgtacaacaccaacgacgccgccggcaacacctggaactggctgtacttcatccccctgatcatcatcggcagcttcttcatgctgaacctggtgctgggcgtgctgagcggcgagttcgccaaggagagagagagagtggagaacagaagagccttcctgaagctgagaagacagcagcagatcgagagagagctgaacggctacctggagtggatcttcaaggccgaggaggtgatgctggccgaggaggacagaaacgccgaggagaagagccccctggacgtgctgaagagagccgccaccaagaagagcagaaacgacctgatccacgccgaggagggcgaggacagattcgccgacctgtgcgccgtgggcagccccttcgccagagccagcctgaagagcggcaagaccgagagcagcagctacttcagaagaaaggagaagatgttcagattcttcatcagaagaatggtgaaggcccagagcttctactgggtggtgctgtgcgtggtggccctgaacaccctgtgcgtggccatggtgcactacaaccagcccagaagactgaccaccaccctgtacttcgccgagttcgtgttcctgggcctgttcctgaccgagatgagcctgaagatgtacggcctgggccccagaagctacttcagaagcagcttcaactgcttcgacttcggcgtgatcgtgggcagcgtgttcgaggtggtgtgggccgccatcaagcccggcagcagcttcggcatcagcgtgctgagagccctgagactgctgagaatcttcaaggtgaccaagtactggagcagcctgagaaacctggtggtgagcctgctgaacagcatgaagagcatcatcagcctgctgttcctgctgttcctgttcatcgtggtgttcgccctgctgggcatgcagctgttcggcggccagttcaacttccaggacgagacccccaccaccaacttcgacaccttccccgccgccatcctgaccgtgttccagatcctgaccggcgaggactggaacgccgtgatgtaccacggcatcgagagccagggcggcgtgagcaagggcatgttcagcagcttctacttcatcgtgctgaccctgttcggcaactacaccctgctgaacgtgttcctggccatcgccgtggacaacctggccaacgcccaggagctgaccaaggacgaggaggagatggaggaggccgccaaccagaagctggccctgcagaaggccaaggaggtggccgaggtgagccccatgagcgccgccaacatcagcatcgccgccagacagcagaacagcgccaaggccagaagcgtgtgggagcagagagccagccagctgagactgcagaacctgagagccagctgcgaggccctgtacagcgagatggaccccgaggagagactgagattcgccaccaccagacacctgagacccgacatgaagacccacctggacagacccctggtggtggagctgggcagagacggcgccagaggccccgtgggcggcaaggccagacccgaggccgccgaggcccccgagggcgtggacccccccagaagacaccacagacacagagacaaggacaagacccccgccgccggcgaccaggacagagccgaggcccccaaggccgagagcggcgagcccggcgccagagaggagagacccagaccccacagaagccacagcaaggaggccgccggcccccccgaggccagaagcgagagaggcagaggccccggccccgagggcggcagaagacaccacagaagaggcagccccgaggaggccgccgagagagagcccagaagacacagagcccacagacaccaggaccccagcaaggagtgcgccggcgccaagggcgagagaagagccagacacagaggcggccccagagccggccccagagaggccgagagcggcgaggagcccgccagaagacacagagccagacacaaggcccagcccgcccacgaggccgtggagaaggagaccaccgagaaggaggccaccgagaaggaggccgagatcgtggaggccgacaaggagaaggagctgagaaaccaccagcccagagagccccactgcgacctggagaccagcggcaccgtgaccgtgggccccatgcacaccctgcccagcacctgcctgcagaaggtggaggagcagcccgaggacgccgacaaccagagaaacgtgaccagaatgggcagccagccccccgaccccaacaccatcgtgcacatccccgtgatgctgaccggccccctgggcgaggccaccgtggtgcccagcggcaacgtggacctggagagccaggccgagggcaagaaggaggtggaggccgacgacgtgatgagaagcggccccagacccatcgtgccctacagcagcatgttctgcctgagccccaccaacctgctgagaagattctgccactacatcgtgaccatgagatacttcgaggtggtgatcctggtggtgatcgccctgagcagcatcgccctggccgccgaggaccccgtgagaaccgacagccccagaaacaacgccctgaagtacctggactacatcttcaccggcgtgttcaccttcgagatggtgatcaagatgatcgacctgggcctgctgctgcaccccggcgcctacttcagagacctgtggaacatcctggacttcatcgtggtgagcggcgccctggtggccttcgccttcagcggcagcaagggcaaggacatcaacaccatcaagagcctgagagtgctgagagtgctgagacccctgaagaccatcaagagactgcccaagctgaaggccgtgttcgactgcgtggtgaacagcctgaagaacgtgctgaacatcctgatcgtgtacatgctgttcatgttcatcttcgccgtgatcgccgtgcagctgttcaagggcaagttcttctactgcaccgacgagagcaaggagctggagagagactgcagaggccagtacctggactacgagaaggaggaggtggaggcccagcccagacagtggaagaagtacgacttccactacgacaacgtgctgtgggccctgctgaccctgttcaccgtgagcaccggcgagggctggcccatggtgctgaagcacagcgtggacgccacctacgaggagcagggccccagccccggctacagaatggagctgagcatcttctacgtggtgtacttcgtggtgttccccttcttcttcgtgaacatcttcgtggccctgatcatcatcaccttccaggagcagggcgacaaggtgatgagcgagtgcagcctggagaagaacgagagagcctgcatcgacttcgccatcagcgccaagcccctgaccagatacatgccccagaacagacagagcttccagtacaagacctggaccttcgtggtgagcccccccttcgagtacttcatcatggccatgatcgccctgaacaccgtggtgctgatgatgaagttctacgacgccccctacgagtacgagctgatgctgaagtgcctgaacatcgtgttcaccagcatgttcagcatggagtgcgtgctgaagatcatcgccttcggcgtgctgaactacttcagagacgcctggaacgtgttcgacttcgtgaccgtgctgggcagcatcaccgacatcctggtgaccgagatcgccgagaccaacaacttcatcaacctgagcttcctgagactgttcagagccgccagactgatcaagctgctgagacagggctacaccatcagaatcctgctgtggaccttcgtgcagagcttcaaggccctgccctacgtgtgcctgctgatcgccatgctgttcttcatctacgccatcatcggcatgcaggtgttcggcaacatcgccctggacgacgacaccagcatcaacagacacaacaacttcagaaccttcctgcaggccctgatgctgctgttcagaagcgccaccggcgaggcctggcacgagatcatgctgagctgcctgagcaaccaggcctgcgacgagcaggccaacgccaccgagtgcggcagcgacttcgcctacttctacttcgtgagcttcatcttcctgtgcagcttcctgatgctgaacctgttcgtggccgtgatcatggacaacttcgagtacctgaccagagacagcagcatcctgggcccccaccacctggacgagttcatcagagtgtgggccgagtacgaccccgccgcctgcggcagaatcagctacaacgacatgttcgagatgctgaagcacatgagcccccccctgggcctgggcaagaagtgccccgccagagtggcctacaagagactggtgagaatgaacatgcccatcagcaacgaggacatgaccgtgcacttcaccagcaccctgatggccctgatcagaaccgccctggagatcaagctggcccccgccggcaccaagcagcaccagtgcgacgccgagctgagaaaggagatcagcgtggtgtgggccaacctgccccagaagaccctggacctgctggtgcccccccacaagcccgacgagatgaccgtgggcaaggtgtacgccgccctgatgatcttcgacttctacaagcagaacaagaccaccagagaccagatgcagcaggcccccggcggcctgagccagatgggccccgtgagcctgttccaccccctgaaggccaccctggagcagacccagcccgccgtgctgagaggcgccagagtgttcctgagacagaagagcagcaccagcctgagcaacggcggcgccatccagaaccaggagagcggcatcaaggagagcgtgagctggggcacccagagaacccaggacgccccccacgaggccagaccccccctggagagaggccacagcaccgagatccccgtgggcagaagcggcgccctggccgtggacgtgcagatgcagagcatcaccagaagaggccccgacggcgagccccagcccggcctggagagccagggcagagccgccagcatgcccagactggccgccgagacccagcccgtgaccgacgccagccccatgaagagaagcatcagcaccctggcccagagacccagaggcacccacctgtgcagcaccacccccgacagacccccccccagccaggccagcagccaccaccaccaccacagatgccacagaagaagagacagaaagcagagaagcctggagaagggccccagcctgagcgccgacatggacggcgcccccagcagcgccgtgggccccggcctgccccccggcgagggccccaccggctgcagaagagagagagagagaagacaggagagaggcagaagccaggagagaagacagcccagcagcagcagcagcgagaagcagagattctacagctgcgacagattcggcggcagagagccccccaagcccaagcccagcctgagcagccaccccaccagccccaccgccggccaggagcccggcccccacccccaggccggcagcgccgtgggcttccccaacaccaccccctgctgcagagagacccccagcgccagcccctggcccctggccctggagctggccctgaccctgacctggggcagcgtgtggaccgtgagacccctgagcaccccctgcctgagaaccctgagcctgagcagaagactgtggccccccaccagagccgccccccccggcctgcccacctgccccccctag

SEQ ID NO: 75052 - DNA, 7023 bp, synthetic construct
  misc_feature 1..7023: note = Description of Artificial Sequence: Synthetic coding sequence
  source 1..7023: mol_type = other DNA
atggtgagattcggcgacgagctgggcggcagatacggcggccccggcggcggcgagagagccagaggcggcggcgccggcggcgccggcggccccggccccggcggcctgcagcccggccagagagtgctgtacaagcagagcatcgcccagagagccagaaccatggccctgtacaaccccatccccgtgaagcagaactgcttcaccgtgaacagaagcctgttcgtgttcagcgaggacaacgtggtgagaaagtacgccaagagaatcaccgagtggccccccttcgagtacatgatcctggccaccatcatcgccaactgcatcgtgctggccctggagcagcacctgcccgacggcgacaagacccccatgagcgagagactggacgacaccgagccctacttcatcggcatcttctgcttcgaggccggcatcaagatcatcgccctgggcttcgtgttccacaagggcagctacctgagaaacggctggaacgtgatggacttcgtggtggtgctgaccggcatcctggccaccgccggcaccgacttcgacctgagaaccctgagagccgtgagagtgctgagacccctgaagctggtgagcggcatccccagcctgcaggtggtgctgaagagcatcatgaaggccatggtgcccctgctgcagatcggcctgctgctgttcttcgccatcctgatgttcgccatcatcggcctggagttctacatgggcaagttccacaaggcctgcttccccaacagcaccgacgccgagcccgtgggcgacttcccctgcggcaaggaggcccccgccagactgtgcgagggcgacaccgagtgcagagagtactggcccggccccaacttcggcatcaccaacttcgacaacatcctgttcgccatcctgaccgtgttccagtgcatcaccatggagggctggaccgacatcctgtacaacaccaacgacgccgccggcaacacctggaactggctgtacttcatccccctgatcatcatcggcagcttcttcatgctgaacctggtgctgggcgtgctgagcggcgagttcgccaaggagagagagagagtggagaacagaagagccttcctgaagctgagaagacagcagcagatcgagagagagctgaacggctacctggagtggatcttcaaggccgaggaggtgatgctggccgaggaggacagaaacgccgaggagaagagccccctggacgccgtgctgaagagagccgccaccaagaagagcagaaacgacctgatccacgccgaggagggcgaggacagattcgccgacctgtgcgccgtgggcagccccttcgccagagccagcctgaagagcggcaagaccgagagcagcagctacttcagaagaaaggagaagatgttcagattcttcatcagaagaatggtgaaggcccagagcttctactgggtggtgctgtgcgtggtggccctgaacaccctgtgcgtggccatggtgcactacaaccagcccagaagactgaccaccaccctgtacttcgccgagttcgtgttcctgggcctgttcctgaccgagatgagcctgaagatgtacggcctgggccccagaagctacttcagaagcagcttcaactgcttcgacttcggcgtgatcgtgggcagcgtgttcgaggtggtgtgggccgccatcaagcccggcagcagcttcggcatcagcgtgctgagagccctgagactgctgagaatcttcaaggtgaccaagtactggagcagcctgagaaacctggtggtgagcctgctgaacagcatgaagagcatcatcagcctgctgttcctgctgttcctgttcatcgtggtgttcgccctgctgggcatgcagctgttcggcggccagttcaacttccaggacgagacccccaccaccaacttcgacaccttccccgccgccatcctgaccgtgttccagatcctgaccggcgaggactggaacgccgtgatgtaccacggcatcgagagccagggcggcgtgagcaagggcatgttcagcagcttctacttcatcgtgctgaccctgttcggcaactacaccctgctgaacgtgttcctggccatcgccgtggacaacctggccaacgcccaggagctgaccaaggacgaggaggagatggaggaggccgccaaccagaagctggccctgcagaaggccaaggaggtggccgaggtgagccccatgagcgccgccaacatcagcatcgccgccagacagcagaacagcgccaaggccagaagcgtgtgggagcagagagccagccagctgagactgcagaacctgagagccagctgcgaggccctgtacagcgagatggaccccgaggagagactgagattcgccaccaccagacacctgagacccgacatgaagacccacctggacagacccctggtggtggagctgggcagagacggcgccagaggccccgtgggcggcaaggccagacccgaggccgccgaggcccccgagggcgtggacccccccagaagacaccacagacacagagacaaggacaagacccccgccgccggcgaccaggacagagccgaggcccccaaggccgagagcggcgagcccggcgccagagaggagagacccagaccccacagaagccacagcaaggaggccgccggcccccccgaggccagaagcgagagaggcagaggccccggccccgagggcggcagaagacaccacagaagaggcagccccgaggaggccgccgagagagagcccagaagacacagagcccacagacaccaggaccccagcaaggagtgcgccggcgccaagggcgagagaagagccagacacagaggcggccccagagccggccccagagaggccgagagcggcgaggagcccgccagaagacacagagccagacacaaggcccagcccgcccacgaggccgtggagaaggagaccaccgagaaggaggccaccgagaaggaggccgagatcgtggaggccgacaaggagaaggagctgagaaaccaccagcccagagagccccactgcgacctggagaccagcggcaccgtgaccgtgggccccatgcacaccctgcccagcacctgcctgcagaaggtggaggagcagcccgaggacgccgacaaccagagaaacgtgaccagaatgggcagccagccccccgaccccaacaccatcgtgcacatccccgtgatgctgaccggccccctgggcgaggccaccgtggtgcccagcggcaacgtggacctggagagccaggccgagggcaagaaggaggtggaggccgacgacgtgatgagaagcggccccagacccatcgtgccctacagcagcatgttctgcctgagccccaccaacctgctgagaagattctgccactacatcgtgaccatgagatacttcgaggtggtgatcctggtggtgatcgccctgagcagcatcgccctggccgccgaggaccccgtgagaaccgacagccccagaaacaacgccctgaagtacctggactacatcttcaccggcgtgttcaccttcgagatggtgatcaagatgatcgacctgggcctgctgctgcaccccggcgcctacttcagagacctgtggaacatcctggacttcatcgtggtgagcggcgccctggtggccttcgccttcagcggcagcaagggcaaggacatcaacaccatcaagagcctgagagtgctgagagtgctgagacccctgaagaccatcaagagactgcccaagctgaaggccgtgttcgactgcgtggtgaacagcctgaagaacgtgctgaacatcctgatcgtgtacatgctgttcatgttcatcttcgccgtgatcgccgtgcagctgttcaagggcaagttcttctactgcaccgacgagagcaaggagctggagagagactgcagaggccagtacctggactacgagaaggaggaggtggaggcccagcccagacagtggaagaagtacgacttccactacgacaacgtgctgtgggccctgctgaccctgttcaccgtgagcaccggcgagggctggcccatggtgctgaagcacagcgtggacgccacctacgaggagcagggccccagccccggctacagaatggagctgagcatcttctacgtggtgtacttcgtggtgttccccttcttcttcgtgaacatcttcgtggccctgatcatcatcaccttccaggagcagggcgacaaggtgatgagcgagtgcagcctggagaagaacgagagagcctgcatcgacttcgccatcagcgccaagcccctgaccagatacatgccccagaacagacagagcttccagtacaagacctggaccttcgtggtgagcccccccttcgagtacttcatcatggccatgatcgccctgaacaccgtggtgctgatgatgaagttctacgacgccccctacgagtacgagctgatgctgaagtgcctgaacatcgtgttcaccagcatgttcagcatggagtgcgtgctgaagatcatcgccttcggcgtgctgaactacttcagagacgcctggaacgtgttcgacttcgtgaccgtgctgggcagcatcaccgacatcctggtgaccgagatcgccgagaccaacaacttcatcaacctgagcttcctgagactgttcagagccgccagactgatcaagctgctgagacagggctacaccatcagaatcctgctgtggaccttcgtgcagagcttcaaggccctgccctacgtgtgcctgctgatcgccatgctgttcttcatctacgccatcatcggcatgcaggtgttcggcaacatcgccctggacgacgacaccagcatcaacagacacaacaacttcagaaccttcctgcaggccctgatgctgctgttcagaagcgccaccggcgaggcctggcacgagatcatgctgagctgcctgagcaaccaggcctgcgacgagcaggccaacgccaccgagtgcggcagcgacttcgcctacttctacttcgtgagcttcatcttcctgtgcagcttcctgatgctgaacctgttcgtggccgtgatcatggacaacttcgagtacctgaccagagacagcagcatcctgggcccccaccacctggacgagttcatcagagtgtgggccgagtacgaccccgccgcctgcggcagaatcagctacaacgacatgttcgagatgctgaagcacatgagcccccccctgggcctgggcaagaagtgccccgccagagtggcctacaagagactggtgagaatgaacatgcccatcagcaacgaggacatgaccgtgcacttcaccagcaccctgatggccctgatcagaaccgccctggagatcaagctggcccccgccggcaccaagcagcaccagtgcgacgccgagctgagaaaggagatcagcgtggtgtgggccaacctgccccagaagaccctggacctgctggtgcccccccacaagcccgacgagatgaccgtgggcaaggtgtacgccgccctgatgatcttcgacttctacaagcagaacaagaccaccagagaccagatgcagcaggcccccggcggcctgagccagatgggccccgtgagcctgttccaccccctgaaggccaccctggagcagacccagcccgccgtgctgagaggcgccagagtgttcctgagacagaagagcagcaccagcctgagcaacggcggcgccatccagaaccaggagagcggcatcaaggagagcgtgagctggggcacccagagaacccaggacgccccccacgaggccagaccccccctggagagaggccacagcaccgagatccccgtgggcagaagcggcgccctggccgtggacgtgcagatgcagagcatcaccagaagaggccccgacggcgagccccagcccggcctggagagccagggcagagccgccagcatgcccagactggccgccgagacccagcccgtgaccgacgccagccccatgaagagaagcatcagcaccctggcccagagacccagaggcacccacctgtgcagcaccacccccgacagacccccccccagccaggccagcagccaccaccaccaccacagatgccacagaagaagagacagaaagcagagaagcctggagaagggccccagcctgagcgccgacatggacggcgcccccagcagcgccgtgggccccggcctgccccccggcgagggccccaccggctgcagaagagagagagagagaagacaggagagaggcagaagccaggagagaagacagcccagcagcagcagcagcgagaagcagagattctacagctgcgacagattcggcggcagagagccccccaagcccaagcccagcctgagcagccaccccaccagccccaccgccggccaggagcccggcccccacccccagggcagcggcagcgtgaacggcagccccctgctgagcaccagcggcgccagcacccccggcagaggcggcagaagacagctgccccagacccccctgacccccagacccagcatcacctacaagaccgccaacagcagccccatccacttcgccggcgcccagaccagcctgcccgccttcagccccggcagactgagcagaggcctgagcgagcacaacgccctgctgcagagagaccccctgagccagcccctggcccccggcagcagaatcggcagcgacccctacctgggccagagactggacagcgaggccagcgtgcacgccctgcccgaggacaccctgaccttcgaggaggccgtggccaccaacagcggcagaagcagcagaaccagctacgtgagcagcctgaccagccagagccaccccctgagaagagtgcccaacggctaccactgcaccctgggcctgagcagcggcggcagagccagacacagctaccaccaccccgaccaggaccactggtgctag

SEQ ID NO: 75053 - DNA, 7017 bp, synthetic construct
  misc_feature 1..7017: note = Description of Artificial Sequence: Synthetic coding sequence
  source 1..7017: mol_type = other DNA
atggtgagattcggcgacgagctgggcggcagatacggcggccccggcggcggcgagagagccagaggcggcggcgccggcggcgccggcggccccggccccggcggcctgcagcccggccagagagtgctgtacaagcagagcatcgcccagagagccagaaccatggccctgtacaaccccatccccgtgaagcagaactgcttcaccgtgaacagaagcctgttcgtgttcagcgaggacaacgtggtgagaaagtacgccaagagaatcaccgagtggccccccttcgagtacatgatcctggccaccatcatcgccaactgcatcgtgctggccctggagcagcacctgcccgacggcgacaagacccccatgagcgagagactggacgacaccgagccctacttcatcggcatcttctgcttcgaggccggcatcaagatcatcgccctgggcttcgtgttccacaagggcagctacctgagaaacggctggaacgtgatggacttcgtggtggtgctgaccggcatcctggccaccgccggcaccgacttcgacctgagaaccctgagagccgtgagagtgctgagacccctgaagctggtgagcggcatccccagcctgcaggtggtgctgaagagcatcatgaaggccatggtgcccctgctgcagatcggcctgctgctgttcttcgccatcctgatgttcgccatcatcggcctggagttctacatgggcaagttccacaaggcctgcttccccaacagcaccgacgccgagcccgtgggcgacttcccctgcggcaaggaggcccccgccagactgtgcgagggcgacaccgagtgcagagagtactggcccggccccaacttcggcatcaccaacttcgacaacatcctgttcgccatcctgaccgtgttccagtgcatcaccatggagggctggaccgacatcctgtacaacaccaacgacgccgccggcaacacctggaactggctgtacttcatccccctgatcatcatcggcagcttcttcatgctgaacctggtgctgggcgtgctgagcggcgagttcgccaaggagagagagagagtggagaacagaagagccttcctgaagctgagaagacagcagcagatcgagagagagctgaacggctacctggagtggatcttcaaggccgaggaggtgatgctggccgaggaggacagaaacgccgaggagaagagccccctggacgccgtgctgaagagagccgccaccaagaagagcagaaacgacctgatccacgccgaggagggcgaggacagattcgccgacctgtgcgccgtgggcagccccttcgccagagccagcctgaagagcggcaagaccgagagcagcagctacttcagaagaaaggagaagatgttcagattcttcatcagaagaatggtgaaggcccagagcttctactgggtggtgctgtgcgtggtggccctgaacaccctgtgcgtggccatggtgcactacaaccagcccagaagactgaccaccaccctgtacttcgccgagttcgtgttcctgggcctgttcctgaccgagatgagcctgaagatgtacggcctgggccccagaagctacttcagaagcagcttcaactgcttcgacttcggcgtgatcgtgggcagcgtgttcgaggtggtgtgggccgccatcaagcccggcagcagcttcggcatcagcgtgctgagagccctgagactgctgagaatcttcaaggtgaccaagtactggagcagcctgagaaacctggtggtgagcctgctgaacagcatgaagagcatcatcagcctgctgttcctgctgttcctgttcatcgtggtgttcgccctgctgggcatgcagctgttcggcggccagttcaacttccaggacgagacccccaccaccaacttcgacaccttccccgccgccatcctgaccgtgttccagatcctgaccggcgaggactggaacgccgtgatgtaccacggcatcgagagccagggcggcgtgagcaagggcatgttcagcagcttctacttcatcgtgctgaccctgttcggcaactacaccctgctgaacgtgttcctggccatcgccgtggacaacctggccaacgcccaggagctgaccaaggacgaggaggagatggaggaggccgccaaccagaagctggccctgcagaaggccaaggaggtggccgaggtgagccccatgagcgccgccaacatcagcatcgccgccagacagcagaacagcgccaaggccagaagcgtgtgggagcagagagccagccagctgagactgcagaacctgagagccagctgcgaggccctgtacagcgagatggaccccgaggagagactgagattcgccaccaccagacacctgagacccgacatgaagacccacctggacagacccctggtggtggagctgggcagagacggcgccagaggccccgtgggcggcaaggccagacccgaggccgccgaggcccccgagggcgtggacccccccagaagacaccacagacacagagacaaggacaagacccccgccgccggcgaccaggacagagccgaggcccccaaggccgagagcggcgagcccggcgccagagaggagagacccagaccccacagaagccacagcaaggaggccgccggcccccccgaggccagaagcgagagaggcagaggccccggccccgagggcggcagaagacaccacagaagaggcagccccgaggaggccgccgagagagagcccagaagacacagagcccacagacaccaggaccccagcaaggagtgcgccggcgccaagggcgagagaagagccagacacagaggcggccccagagccggccccagagaggccgagagcggcgaggagcccgccagaagacacagagccagacacaaggcccagcccgcccacgaggccgtggagaaggagaccaccgagaaggaggccaccgagaaggaggccgagatcgtggaggccgacaaggagaaggagctgagaaaccaccagcccagagagccccactgcgacctggagaccagcggcaccgtgaccgtgggccccatgcacaccctgcccagcacctgcctgcagaaggtggaggagcagcccgaggacgccgacaaccagagaaacgtgaccagaatgggcagccagccccccgaccccaacaccatcgtgcacatccccgtgatgctgaccggccccctgggcgaggccaccgtggtgcccagcggcaacgtggacctggagagccaggccgagggcaagaaggaggtggaggccgacgacgtgatgagaagcggccccagacccatcgtgccctacagcagcatgttctgcctgagccccaccaacctgctgagaagattctgccactacatcgtgaccatgagatacttcgaggtggtgatcctggtggtgatcgccctgagcagcatcgccctggccgccgaggaccccgtgagaaccgacagccccagaaacaacgccctgaagtacctggactacatcttcaccggcgtgttcaccttcgagatggtgatcaagatgatcgacctgggcctgctgctgcaccccggcgcctacttcagagacctgtggaacatcctggacttcatcgtggtgagcggcgccctggtggccttcgccttcagcggcagcaagggcaaggacatcaacaccatcaagagcctgagagtgctgagagtgctgagacccctgaagaccatcaagagactgcccaagctgaaggccgtgttcgactgcgtggtgaacagcctgaagaacgtgctgaacatcctgatcgtgtacatgctgttcatgttcatcttcgccgtgatcgccgtgcagctgttcaagggcaagttcttctactgcaccgacgagagcaaggagctggagagagactgcagaggccagtacctggactacgagaaggaggaggtggaggcccagcccagacagtggaagaagtacgacttccactacgacaacgtgctgtgggccctgctgaccctgttcaccgtgagcaccggcgagggctggcccatggtgctgaagcacagcgtggacgccacctacgaggagcagggccccagccccggctacagaatggagctgagcatcttctacgtggtgtacttcgtggtgttccccttcttcttcgtgaacatcttcgtggccctgatcatcatcaccttccaggagcagggcgacaaggtgatgagcgagtgcagcctggagaagaacgagagagcctgcatcgacttcgccatcagcgccaagcccctgaccagatacatgccccagaacagacagagcttccagtacaagacctggaccttcgtggtgagcccccccttcgagtacttcatcatggccatgatcgccctgaacaccgtggtgctgatgatgaagttctacgacgccccctacgagtacgagctgatgctgaagtgcctgaacatcgtgttcaccagcatgttcagcatggagtgcgtgctgaagatcatcgccttcggcgtgctgaactacttcagagacgcctggaacgtgttcgacttcgtgaccgtgctgggcagcatcaccgacatcctggtgaccgagatcgccaacaacttcatcaacctgagcttcctgagactgttcagagccgccagactgatcaagctgctgagacagggctacaccatcagaatcctgctgtggaccttcgtgcagagcttcaaggccctgccctacgtgtgcctgctgatcgccatgctgttcttcatctacgccatcatcggcatgcaggtgttcggcaacatcgccctggacgacgacaccagcatcaacagacacaacaacttcagaaccttcctgcaggccctgatgctgctgttcagaagcgccaccggcgaggcctggcacgagatcatgctgagctgcctgagcaaccaggcctgcgacgagcaggccaacgccaccgagtgcggcagcgacttcgcctacttctacttcgtgagcttcatcttcctgtgcagcttcctgatgctgaacctgttcgtggccgtgatcatggacaacttcgagtacctgaccagagacagcagcatcctgggcccccaccacctggacgagttcatcagagtgtgggccgagtacgaccccgccgcctgcggcagaatcagctacaacgacatgttcgagatgctgaagcacatgagcccccccctgggcctgggcaagaagtgccccgccagagtggcctacaagagactggtgagaatgaacatgcccatcagcaacgaggacatgaccgtgcacttcaccagcaccctgatggccctgatcagaaccgccctggagatcaagctggcccccgccggcaccaagcagcaccagtgcgacgccgagctgagaaaggagatcagcgtggtgtgggccaacctgccccagaagaccctggacctgctggtgcccccccacaagcccgacgagatgaccgtgggcaaggtgtacgccgccctgatgatcttcgacttctacaagcagaacaagaccaccagagaccagatgcagcaggcccccggcggcctgagccagatgggccccgtgagcctgttccaccccctgaaggccaccctggagcagacccagcccgccgtgctgagaggcgccagagtgttcctgagacagaagagcagcaccagcctgagcaacggcggcgccatccagaaccaggagagcggcatcaaggagagcgtgagctggggcacccagagaacccaggacgccccccacgaggccagaccccccctggagagaggccacagcaccgagatccccgtgggcagaagcggcgccctggccgtggacgtgcagatgcagagcatcaccagaagaggccccgacggcgagccccagcccggcctggagagccagggcagagccgccagcatgcccagactggccgccgagacccagcccgtgaccgacgccagccccatgaagagaagcatcagcaccctggcccagagacccagaggcacccacctgtgcagcaccacccccgacagacccccccccagccaggccagcagccaccaccaccaccacagatgccacagaagaagagacagaaagcagagaagcctggagaagggccccagcctgagcgccgacatggacggcgcccccagcagcgccgtgggccccggcctgccccccggcgagggccccaccggctgcagaagagagagagagagaagacaggagagaggcagaagccaggagagaagacagcccagcagcagcagcagcgagaagcagagattctacagctgcgacagattcggcggcagagagccccccaagcccaagcccagcctgagcagccaccccaccagccccaccgccggccaggagcccggcccccacccccagggcagcggcagcgtgaacggcagccccctgctgagcaccagcggcgccagcacccccggcagaggcggcagaagacagctgccccagacccccctgacccccagacccagcatcacctacaagaccgccaacagcagccccatccacttcgccggcgcccagaccagcctgcccgccttcagccccggcagactgagcagaggcctgagcgagcacaacgccctgctgcagagagaccccctgagccagcccctggcccccggcagcagaatcggcagcgacccctacctgggccagagactggacagcgaggccagcgtgcacgccctgcccgaggacaccctgaccttcgaggaggccgtggccaccaacagcggcagaagcagcagaaccagctacgtgagcagcctgaccagccagagccaccccctgagaagagtgcccaacggctaccactgcaccctgggcctgagcagcggcggcagagccagacacagctaccaccaccccgaccaggaccactggtgctag

SEQ ID NO: 75054 - DNA, 7014 bp, synthetic construct
  misc_feature 1..7014: note = Description of Artificial Sequence: Synthetic coding sequence
  source 1..7014: mol_type = other DNA
atggtgagattcggcgacgagctgggcggcagatacggcggccccggcggcggcgagagagccagaggcggcggcgccggcggcgccggcggccccggccccggcggcctgcagcccggccagagagtgctgtacaagcagagcatcgcccagagagccagaaccatggccctgtacaaccccatccccgtgaagcagaactgcttcaccgtgaacagaagcctgttcgtgttcagcgaggacaacgtggtgagaaagtacgccaagagaatcaccgagtggccccccttcgagtacatgatcctggccaccatcatcgccaactgcatcgtgctggccctggagcagcacctgcccgacggcgacaagacccccatgagcgagagactggacgacaccgagccctacttcatcggcatcttctgcttcgaggccggcatcaagatcatcgccctgggcttcgtgttccacaagggcagctacctgagaaacggctggaacgtgatggacttcgtggtggtgctgaccggcatcctggccaccgccggcaccgacttcgacctgagaaccctgagagccgtgagagtgctgagacccctgaagctggtgagcggcatccccagcctgcaggtggtgctgaagagcatcatgaaggccatggtgcccctgctgcagatcggcctgctgctgttcttcgccatcctgatgttcgccatcatcggcctggagttctacatgggcaagttccacaaggcctgcttccccaacagcaccgacgccgagcccgtgggcgacttcccctgcggcaaggaggcccccgccagactgtgcgagggcgacaccgagtgcagagagtactggcccggccccaacttcggcatcaccaacttcgacaacatcctgttcgccatcctgaccgtgttccagtgcatcaccatggagggctggaccgacatcctgtacaacaccaacgacgccgccggcaacacctggaactggctgtacttcatccccctgatcatcatcggcagcttcttcatgctgaacctggtgctgggcgtgctgagcggcgagttcgccaaggagagagagagagtggagaacagaagagccttcctgaagctgagaagacagcagcagatcgagagagagctgaacggctacctggagtggatcttcaaggccgaggaggtgatgctggccgaggaggacagaaacgccgaggagaagagccccctggacgtgctgaagagagccgccaccaagaagagcagaaacgacctgatccacgccgaggagggcgaggacagattcgccgacctgtgcgccgtgggcagccccttcgccagagccagcctgaagagcggcaagaccgagagcagcagctacttcagaagaaaggagaagatgttcagattcttcatcagaagaatggtgaaggcccagagcttctactgggtggtgctgtgcgtggtggccctgaacaccctgtgcgtggccatggtgcactacaaccagcccagaagactgaccaccaccctgtacttcgccgagttcgtgttcctgggcctgttcctgaccgagatgagcctgaagatgtacggcctgggccccagaagctacttcagaagcagcttcaactgcttcgacttcggcgtgatcgtgggcagcgtgttcgaggtggtgtgggccgccatcaagcccggcagcagcttcggcatcagcgtgctgagagccctgagactgctgagaatcttcaaggtgaccaagtactggagcagcctgagaaacctggtggtgagcctgctgaacagcatgaagagcatcatcagcctgctgttcctgctgttcctgttcatcgtggtgttcgccctgctgggcatgcagctgttcggcggccagttcaacttccaggacgagacccccaccaccaacttcgacaccttccccgccgccatcctgaccgtgttccagatcctgaccggcgaggactggaacgccgtgatgtaccacggcatcgagagccagggcggcgtgagcaagggcatgttcagcagcttctacttcatcgtgctgaccctgttcggcaactacaccctgctgaacgtgttcctggccatcgccgtggacaacctggccaacgcccaggagctgaccaaggacgaggaggagatggaggaggccgccaaccagaagctggccctgcagaaggccaaggaggtggccgaggtgagccccatgagcgccgccaacatcagcatcgccgccagacagcagaacagcgccaaggccagaagcgtgtgggagcagagagccagccagctgagactgcagaacctgagagccagctgcgaggccctgtacagcgagatggaccccgaggagagactgagattcgccaccaccagacacctgagacccgacatgaagacccacctggacagacccctggtggtggagctgggcagagacggcgccagaggccccgtgggcggcaaggccagacccgaggccgccgaggcccccgagggcgtggacccccccagaagacaccacagacacagagacaaggacaagacccccgccgccggcgaccaggacagagccgaggcccccaaggccgagagcggcgagcccggcgccagagaggagagacccagaccccacagaagccacagcaaggaggccgccggcccccccgaggccagaagcgagagaggcagaggccccggccccgagggcggcagaagacaccacagaagaggcagccccgaggaggccgccgagagagagcccagaagacacagagcccacagacaccaggaccccagcaaggagtgcgccggcgccaagggcgagagaagagccagacacagaggcggccccagagccggccccagagaggccgagagcggcgaggagcccgccagaagacacagagccagacacaaggcccagcccgcccacgaggccgtggagaaggagaccaccgagaaggaggccaccgagaaggaggccgagatcgtggaggccgacaaggagaaggagctgagaaaccaccagcccagagagccccactgcgacctggagaccagcggcaccgtgaccgtgggccccatgcacaccctgcccagcacctgcctgcagaaggtggaggagcagcccgaggacgccgacaaccagagaaacgtgaccagaatgggcagccagccccccgaccccaacaccatcgtgcacatccccgtgatgctgaccggccccctgggcgaggccaccgtggtgcccagcggcaacgtggacctggagagccaggccgagggcaagaaggaggtggaggccgacgacgtgatgagaagcggccccagacccatcgtgccctacagcagcatgttctgcctgagccccaccaacctgctgagaagattctgccactacatcgtgaccatgagatacttcgaggtggtgatcctggtggtgatcgccctgagcagcatcgccctggccgccgaggaccccgtgagaaccgacagccccagaaacaacgccctgaagtacctggactacatcttcaccggcgtgttcaccttcgagatggtgatcaagatgatcgacctgggcctgctgctgcaccccggcgcctacttcagagacctgtggaacatcctggacttcatcgtggtgagcggcgccctggtggccttcgccttcagcggcagcaagggcaaggacatcaacaccatcaagagcctgagagtgctgagagtgctgagacccctgaagaccatcaagagactgcccaagctgaaggccgtgttcgactgcgtggtgaacagcctgaagaacgtgctgaacatcctgatcgtgtacatgctgttcatgttcatcttcgccgtgatcgccgtgcagctgttcaagggcaagttcttctactgcaccgacgagagcaaggagctggagagagactgcagaggccagtacctggactacgagaaggaggaggtggaggcccagcccagacagtggaagaagtacgacttccactacgacaacgtgctgtgggccctgctgaccctgttcaccgtgagcaccggcgagggctggcccatggtgctgaagcacagcgtggacgccacctacgaggagcagggccccagccccggctacagaatggagctgagcatcttctacgtggtgtacttcgtggtgttccccttcttcttcgtgaacatcttcgtggccctgatcatcatcaccttccaggagcagggcgacaaggtgatgagcgagtgcagcctggagaagaacgagagagcctgcatcgacttcgccatcagcgccaagcccctgaccagatacatgccccagaacagacagagcttccagtacaagacctggaccttcgtggtgagcccccccttcgagtacttcatcatggccatgatcgccctgaacaccgtggtgctgatgatgaagttctacgacgccccctacgagtacgagctgatgctgaagtgcctgaacatcgtgttcaccagcatgttcagcatggagtgcgtgctgaagatcatcgccttcggcgtgctgaactacttcagagacgcctggaacgtgttcgacttcgtgaccgtgctgggcagcatcaccgacatcctggtgaccgagatcgccaacaacttcatcaacctgagcttcctgagactgttcagagccgccagactgatcaagctgctgagacagggctacaccatcagaatcctgctgtggaccttcgtgcagagcttcaaggccctgccctacgtgtgcctgctgatcgccatgctgttcttcatctacgccatcatcggcatgcaggtgttcggcaacatcgccctggacgacgacaccagcatcaacagacacaacaacttcagaaccttcctgcaggccctgatgctgctgttcagaagcgccaccggcgaggcctggcacgagatcatgctgagctgcctgagcaaccaggcctgcgacgagcaggccaacgccaccgagtgcggcagcgacttcgcctacttctacttcgtgagcttcatcttcctgtgcagcttcctgatgctgaacctgttcgtggccgtgatcatggacaacttcgagtacctgaccagagacagcagcatcctgggcccccaccacctggacgagttcatcagagtgtgggccgagtacgaccccgccgcctgcggcagaatcagctacaacgacatgttcgagatgctgaagcacatgagcccccccctgggcctgggcaagaagtgccccgccagagtggcctacaagagactggtgagaatgaacatgcccatcagcaacgaggacatgaccgtgcacttcaccagcaccctgatggccctgatcagaaccgccctggagatcaagctggcccccgccggcaccaagcagcaccagtgcgacgccgagctgagaaaggagatcagcgtggtgtgggccaacctgccccagaagaccctggacctgctggtgcccccccacaagcccgacgagatgaccgtgggcaaggtgtacgccgccctgatgatcttcgacttctacaagcagaacaagaccaccagagaccagatgcagcaggcccccggcggcctgagccagatgggccccgtgagcctgttccaccccctgaaggccaccctggagcagacccagcccgccgtgctgagaggcgccagagtgttcctgagacagaagagcagcaccagcctgagcaacggcggcgccatccagaaccaggagagcggcatcaaggagagcgtgagctggggcacccagagaacccaggacgccccccacgaggccagaccccccctggagagaggccacagcaccgagatccccgtgggcagaagcggcgccctggccgtggacgtgcagatgcagagcatcaccagaagaggccccgacggcgagccccagcccggcctggagagccagggcagagccgccagcatgcccagactggccgccgagacccagcccgtgaccgacgccagccccatgaagagaagcatcagcaccctggcccagagacccagaggcacccacctgtgcagcaccacccccgacagacccccccccagccaggccagcagccaccaccaccaccacagatgccacagaagaagagacagaaagcagagaagcctggagaagggccccagcctgagcgccgacatggacggcgcccccagcagcgccgtgggccccggcctgccccccggcgagggccccaccggctgcagaagagagagagagagaagacaggagagaggcagaagccaggagagaagacagcccagcagcagcagcagcgagaagcagagattctacagctgcgacagattcggcggcagagagccccccaagcccaagcccagcctgagcagccaccccaccagccccaccgccggccaggagcccggcccccacccccagggcagcggcagcgtgaacggcagccccctgctgagcaccagcggcgccagcacccccggcagaggcggcagaagacagctgccccagacccccctgacccccagacccagcatcacctacaagaccgccaacagcagccccatccacttcgccggcgcccagaccagcctgcccgccttcagccccggcagactgagcagaggcctgagcgagcacaacgccctgctgcagagagaccccctgagccagcccctggcccccggcagcagaatcggcagcgacccctacctgggccagagactggacagcgaggccagcgtgcacgccctgcccgaggacaccctgaccttcgaggaggccgtggccaccaacagcggcagaagcagcagaaccagctacgtgagcagcctgaccagccagagccaccccctgagaagagtgcccaacggctaccactgcaccctgggcctgagcagcggcggcagagccagacacagctaccaccaccccgaccaggaccactggtgctag

SEQ ID NO: 75055 - DNA, 495 bp, synthetic construct
  misc_feature 1..495: note = Description of Artificial Sequence: Synthetic coding sequence
  source 1..495: mol_type = other DNA
aacttcagaaccttcctgcaggccctgatgctgctgttcagaagcgccaccggcgaggcctggcacgagatcatgctgagctgcctgagcaaccaggcctgcgacgagcaggccaacgccaccgagtgcggcagcgacttcgcctacttctacttcgtgagcttcatcttcctgtgcagcttcctgatgctgaacctgttcgtggccgtgatcatggacaacttcgagtacctgaccagagacagcagcatcctgggcccccaccacctggacgagttcatcagagtgtgggccgagtacgaccccgccgcctgctgcagaatccactacaaggacatgtacagcctgctgagatgcatcgccccccccgtgggcctgggcaagaactgccccagaagactggcctacaagagactggtgagaatgaacatgcccatcagcaacgaggacatgaccgtgcacttcaccagcaccctgatggccctgatcagatag

SEQ ID NO: 75056 - DNA, 327 bp, synthetic construct
  misc_feature 1..327: note = Description of Artificial Sequence: Synthetic coding sequence
  source 1..327: mol_type = other DNA
ctgagaaaccaccagcccagagagccccactgcgacctggagaccagcggcaccgtgaccgtgggccccatgcacaccctgcccagcacctgcctgcagaaggtggaggagcagcccgaggacgccgacaaccagagaaacgtgaccagaatgggcagccagccccccgaccccaacaccatcgtgcacatccccgtgatgctgaccggccccctgggcgaggccaccgtggtgcccaccctggagaagaacgtgtgcctgttcctgctgaccagcatggtgagcgacgagaagagcaccgtgatcagaatcgtgttcttcctgtag

SEQ ID NO: 75057 - DNA, 7020 bp, synthetic construct
  misc_feature 1..7020: note = Description of Artificial Sequence: Synthetic coding sequence
  source 1..7020: mol_type = other DNA
atggtgagattcggcgacgagctgggcggcagatacggcggccccggcggcggcgagagagccagaggcggcggcgccggcggcgccggcggccccggccccggcggcctgcagcccggccagagagtgctgtacaagcagagcatcgcccagagagccagaaccatggccctgtacaaccccatccccgtgaagcagaactgcttcaccgtgaacagaagcctgttcgtgttcagcgaggacaacgtggtgagaaagtacgccaagagaatcaccgagtggccccccttcgagtacatgatcctggccaccatcatcgccaactgcatcgtgctggccctggagcagcacctgcccgacggcgacaagacccccatgagcgagagactggacgacaccgagccctacttcatcggcatcttctgcttcgaggccggcatcaagatcatcgccctgggcttcgtgttccacaagggcagctacctgagaaacggctggaacgtgatggacttcgtggtggtgctgaccggcatcctggccaccgccggcaccgacttcgacctgagaaccctgagagccgtgagagtgctgagacccctgaagctggtgagcggcatccccagcctgcaggtggtgctgaagagcatcatgaaggccatggtgcccctgctgcagatcggcctgctgctgttcttcgccatcctgatgttcgccatcatcggcctggagttctacatgggcaagttccacaaggcctgcttccccaacagcaccgacgccgagcccgtgggcgacttcccctgcggcaaggaggcccccgccagactgtgcgagggcgacaccgagtgcagagagtactggcccggccccaacttcggcatcaccaacttcgacaacatcctgttcgccatcctgaccgtgttccagtgcatcaccatggagggctggaccgacatcctgtacaacaccaacgacgccgccggcaacacctggaactggctgtacttcatccccctgatcatcatcggcagcttcttcatgctgaacctggtgctgggcgtgctgagcggcgagttcgccaaggagagagagagagtggagaacagaagagccttcctgaagctgagaagacagcagcagatcgagagagagctgaacggctacctggagtggatcttcaaggccgaggaggtgatgctggccgaggaggacagaaacgccgaggagaagagccccctggacgtgctgaagagagccgccaccaagaagagcagaaacgacctgatccacgccgaggagggcgaggacagattcgccgacctgtgcgccgtgggcagccccttcgccagagccagcctgaagagcggcaagaccgagagcagcagctacttcagaagaaaggagaagatgttcagattcttcatcagaagaatggtgaaggcccagagcttctactgggtggtgctgtgcgtggtggccctgaacaccctgtgcgtggccatggtgcactacaaccagcccagaagactgaccaccaccctgtacttcgccgagttcgtgttcctgggcctgttcctgaccgagatgagcctgaagatgtacggcctgggccccagaagctacttcagaagcagcttcaactgcttcgacttcggcgtgatcgtgggcagcgtgttcgaggtggtgtgggccgccatcaagcccggcagcagcttcggcatcagcgtgctgagagccctgagactgctgagaatcttcaaggtgaccaagtactggagcagcctgagaaacctggtggtgagcctgctgaacagcatgaagagcatcatcagcctgctgttcctgctgttcctgttcatcgtggtgttcgccctgctgggcatgcagctgttcggcggccagttcaacttccaggacgagacccccaccaccaacttcgacaccttccccgccgccatcctgaccgtgttccagatcctgaccggcgaggactggaacgccgtgatgtaccacggcatcgagagccagggcggcgtgagcaagggcatgttcagcagcttctacttcatcgtgctgaccctgttcggcaactacaccctgctgaacgtgttcctggccatcgccgtggacaacctggccaacgcccaggagctgaccaaggacgaggaggagatggaggaggccgccaaccagaagctggccctgcagaaggccaaggaggtggccgaggtgagccccatgagcgccgccaacatcagcatcgccgccagacagcagaacagcgccaaggccagaagcgtgtgggagcagagagccagccagctgagactgcagaacctgagagccagctgcgaggccctgtacagcgagatggaccccgaggagagactgagattcgccaccaccagacacctgagacccgacatgaagacccacctggacagacccctggtggtggagctgggcagagacggcgccagaggccccgtgggcggcaaggccagacccgaggccgccgaggcccccgagggcgtggacccccccagaagacaccacagacacagagacaaggacaagacccccgccgccggcgaccaggacagagccgaggcccccaaggccgagagcggcgagcccggcgccagagaggagagacccagaccccacagaagccacagcaaggaggccgccggcccccccgaggccagaagcgagagaggcagaggccccggccccgagggcggcagaagacaccacagaagaggcagccccgaggaggccgccgagagagagcccagaagacacagagcccacagacaccaggaccccagcaaggagtgcgccggcgccaagggcgagagaagagccagacacagaggcggccccagagccggccccagagaggccgagagcggcgaggagcccgccagaagacacagagccagacacaaggcccagcccgcccacgaggccgtggagaaggagaccaccgagaaggaggccaccgagaaggaggccgagatcgtggaggccgacaaggagaaggagctgagaaaccaccagcccagagagccccactgcgacctggagaccagcggcaccgtgaccgtgggccccatgcacaccctgcccagcacctgcctgcagaaggtggaggagcagcccgaggacgccgacaaccagagaaacgtgaccagaatgggcagccagccccccgaccccaacaccatcgtgcacatccccgtgatgctgaccggccccctgggcgaggccaccgtggtgcccagcggcaacgtggacctggagagccaggccgagggcaagaaggaggtggaggccgacgacgtgatgagaagcggccccagacccatcgtgccctacagcagcatgttctgcctgagccccaccaacctgctgagaagattctgccactacatcgtgaccatgagatacttcgaggtggtgatcctggtggtgatcgccctgagcagcatcgccctggccgccgaggaccccgtgagaaccgacagccccagaaacaacgccctgaagtacctggactacatcttcaccggcgtgttcaccttcgagatggtgatcaagatgatcgacctgggcctgctgctgcaccccggcgcctacttcagagacctgtggaacatcctggacttcatcgtggtgagcggcgccctggtggccttcgccttcagcggcagcaagggcaaggacatcaacaccatcaagagcctgagagtgctgagagtgctgagacccctgaagaccatcaagagactgcccaagctgaaggccgtgttcgactgcgtggtgaacagcctgaagaacgtgctgaacatcctgatcgtgtacatgctgttcatgttcatcttcgccgtgatcgccgtgcagctgttcaagggcaagttcttctactgcaccgacgagagcaaggagctggagagagactgcagaggccagtacctggactacgagaaggaggaggtggaggcccagcccagacagtggaagaagtacgacttccactacgacaacgtgctgtgggccctgctgaccctgttcaccgtgagcaccggcgagggctggcccatggtgctgaagcacagcgtggacgccacctacgaggagcagggccccagccccggctacagaatggagctgagcatcttctacgtggtgtacttcgtggtgttccccttcttcttcgtgaacatcttcgtggccctgatcatcatcaccttccaggagcagggcgacaaggtgatgagcgagtgcagcctggagaagaacgagagagcctgcatcgacttcgccatcagcgccaagcccctgaccagatacatgccccagaacagacagagcttccagtacaagacctggaccttcgtggtgagcccccccttcgagtacttcatcatggccatgatcgccctgaacaccgtggtgctgatgatgaagttctacgacgccccctacgagtacgagctgatgctgaagtgcctgaacatcgtgttcaccagcatgttcagcatggagtgcgtgctgaagatcatcgccttcggcgtgctgaactacttcagagacgcctggaacgtgttcgacttcgtgaccgtgctgggcagcatcaccgacatcctggtgaccgagatcgccgagaccaacaacttcatcaacctgagcttcctgagactgttcagagccgccagactgatcaagctgctgagacagggctacaccatcagaatcctgctgtggaccttcgtgcagagcttcaaggccctgccctacgtgtgcctgctgatcgccatgctgttcttcatctacgccatcatcggcatgcaggtgttcggcaacatcgccctggacgacgacaccagcatcaacagacacaacaacttcagaaccttcctgcaggccctgatgctgctgttcagaagcgccaccggcgaggcctggcacgagatcatgctgagctgcctgagcaaccaggcctgcgacgagcaggccaacgccaccgagtgcggcagcgacttcgcctacttctacttcgtgagcttcatcttcctgtgcagcttcctgatgctgaacctgttcgtggccgtgatcatggacaacttcgagtacctgaccagagacagcagcatcctgggcccccaccacctggacgagttcatcagagtgtgggccgagtacgaccccgccgcctgcggcagaatcagctacaacgacatgttcgagatgctgaagcacatgagcccccccctgggcctgggcaagaagtgccccgccagagtggcctacaagagactggtgagaatgaacatgcccatcagcaacgaggacatgaccgtgcacttcaccagcaccctgatggccctgatcagaaccgccctggagatcaagctggcccccgccggcaccaagcagcaccagtgcgacgccgagctgagaaaggagatcagcgtggtgtgggccaacctgccccagaagaccctggacctgctggtgcccccccacaagcccgacgagatgaccgtgggcaaggtgtacgccgccctgatgatcttcgacttctacaagcagaacaagaccaccagagaccagatgcagcaggcccccggcggcctgagccagatgggccccgtgagcctgttccaccccctgaaggccaccctggagcagacccagcccgccgtgctgagaggcgccagagtgttcctgagacagaagagcagcaccagcctgagcaacggcggcgccatccagaaccaggagagcggcatcaaggagagcgtgagctggggcacccagagaacccaggacgccccccacgaggccagaccccccctggagagaggccacagcaccgagatccccgtgggcagaagcggcgccctggccgtggacgtgcagatgcagagcatcaccagaagaggccccgacggcgagccccagcccggcctggagagccagggcagagccgccagcatgcccagactggccgccgagacccagcccgtgaccgacgccagccccatgaagagaagcatcagcaccctggcccagagacccagaggcacccacctgtgcagcaccacccccgacagacccccccccagccaggccagcagccaccaccaccaccacagatgccacagaagaagagacagaaagcagagaagcctggagaagggccccagcctgagcgccgacatggacggcgcccccagcagcgccgtgggccccggcctgccccccggcgagggccccaccggctgcagaagagagagagagagaagacaggagagaggcagaagccaggagagaagacagcccagcagcagcagcagcgagaagcagagattctacagctgcgacagattcggcggcagagagccccccaagcccaagcccagcctgagcagccaccccaccagccccaccgccggccaggagcccggcccccacccccagggcagcggcagcgtgaacggcagccccctgctgagcaccagcggcgccagcacccccggcagaggcggcagaagacagctgccccagacccccctgacccccagacccagcatcacctacaagaccgccaacagcagccccatccacttcgccggcgcccagaccagcctgcccgccttcagccccggcagactgagcagaggcctgagcgagcacaacgccctgctgcagagagaccccctgagccagcccctggcccccggcagcagaatcggcagcgacccctacctgggccagagactggacagcgaggccagcgtgcacgccctgcccgaggacaccctgaccttcgaggaggccgtggccaccaacagcggcagaagcagcagaaccagctacgtgagcagcctgaccagccagagccaccccctgagaagagtgcccaacggctaccactgcaccctgggcctgagcagcggcggcagagccagacacagctaccaccaccccgaccaggaccactggtgctag

SEQ ID NO: 75058 - DNA, 498 bp, synthetic construct
  misc_feature 1..498: note = Description of Artificial Sequence: Synthetic coding sequence
  source 1..498: mol_type = other DNA
tgaaacttcagaaccttcctgcaggccctgatgctgctgttcagaagcgccaccggcgaggcctggcacgagatcatgctgagctgcctgagcaaccaggcctgcgacgagcaggccaacgccaccgagtgcggcagcgacttcgcctacttctacttcgtgagcttcatcttcctgtgcagcttcctgatgctgaacctgttcgtggccgtgatcatggacaacttcgagtacctgaccagagacagcagcatcctgggcccccaccacctggacgagttcatcagagtgtgggccgagtacgaccccgccgcctgctgcagaatccactacaaggacatgtacagcctgctgagatgcatcgccccccccgtgggcctgggcaagaactgccccagaagactggcctacaagagactggtgagaatgaacatgcccatcagcaacgaggacatgaccgtgcacttcaccagcaccctgatggccctgatcagatag

SEQ ID NO: 75059 - DNA, 564 bp, synthetic construct
  misc_feature 1..564: note = Description of Artificial Sequence: Synthetic coding sequence
  source 1..564: mol_type = other DNA
ctgagaaaccaccagcccagagagccccactgcgacctggagaccagcggcaccgtgaccgtgggccccatgcacaccctgcccagcacctgcctgcagaaggtggaggagcagcccgaggacgccgacaaccagagaaacgtgaccagaatgggcagccagccccccgaccccaacaccatcgtgcacatccccgtgatgctgaccggccccctgggcgaggccaccgtggtgcccagccccaccatcggcagactgcaggccgaggagcagggcgagcccgccagagtgagcaagctgaacctggagagcgacgtgagaggccaggaggccagcagcaccggcgagagatacagactgggcggcggcaacgtggacctggagagccaggccgagggcaagaaggaggtggaggccgacgacgtgatgagaagcggccccagacccatcgtgccctacagcagcatgttctgcctgagccccaccaacctgctgagaagattctgccactacatcgtgaccatgagatacttcgaggtggtgatcctggtggtgatcgcctag

SEQ ID NO: 75060 - DNA, 6786 bp, synthetic construct
  misc_feature 1..6786: note = Description of Artificial Sequence: Synthetic coding sequence
  source 1..6786: mol_type = other DNA
atggccagattcggcgacgagatgcccgccagatacggcggcggcggcagcggcgccgccgccggcgtggtggtgggcagcggcggcggcagaggcgccggcggcagcagacagggcggccagcccggcgcccagagaatgtacaagcagagcatggcccagagagccagaaccatggccctgtacaaccccatccccgtgagacagaactgcctgaccgtgaacagaagcctgttcctgttcagcgaggacaacgtggtgagaaagtacgccaagaagatcaccgagtggccccccttcgagtacatgatcctggccaccatcatcgccaactgcatcgtgctggccctggagcagcacctgcccgacgacgacaagacccccatgagcgagagactggacgacaccgagccctacttcatcggcatcttctgcttcgaggccggcatcaagatcatcgccctgggcttcgccttccacaagggcagctacctgagaaacggctggaacgtgatggacttcgtggtggtgctgaccggcatcctggccaccgtgggcaccgagttcgacctgagaaccctgagagccgtgagagtgctgagacccctgaagctggtgagcggcatccccagcctgcaggtggtgctgaagagcatcatgaaggccatgatccccctgctgcagatcggcctgctgctgttcttcgccatcctgatcttcgccatcatcggcctggagttctacatgggcaagttccacaccacctgcttcgaggagggcaccgacgacatccagggcgagagccccgccccctgcggcaccgaggagcccgccagaacctgccccaacggcaccaagtgccagccctactgggagggccccaacaacggcatcacccagttcgacaacatcctgttcgccgtgctgaccgtgttccagtgcatcaccatggagggctggaccgacctgctgtacaacagcaacgacgccagcggcaacacctggaactggctgtacttcatccccctgatcatcatcggcagcttcttcatgctgaacctggtgctgggcgtgctgagcggcgagttcgccaaggagagagagagagtggagaacagaagagccttcctgaagctgagaagacagcagcagatcgagagagagctgaacggctacatggagtggatcagcaaggccgaggaggtgatcctggccgaggacgagaccgacggcgagcagagacaccccttcgacggcgccctgagaagaaccaccatcaagaagagcaagaccgacctgctgaaccccgaggaggccgaggaccagctggccgacatcgccagcgtgggcagccccttcgccagagccagcatcaagagcgccaagctggagaacagcaccttcttccacaagaaggagagaagaatgagattctacatcagaagaatggtgaagacccaggccttctactggaccgtgctgagcctggtggccctgaacaccctgtgcgtggccatcgtgcactacaaccagcccgagtggctgagcgacttcctgtactacgccgagttcatcttcctgggcctgttcatgagcgagatgttcatcaagatgtacggcctgggcaccagaccctacttccacagcagcttcaactgcttcgactgcggcgtgatcatcggcagcatcttcgaggtgatctgggccgtgatcaagcccggcaccagcttcggcatcagcgtgctgagagccctgagactgctgagaatcttcaaggtgaccaagtactgggccagcctgagaaacctggtggtgagcctgctgaacagcatgaagagcatcatcagcctgctgttcctgctgttcctgttcatcgtggtgttcgccctgctgggcatgcagctgttcggcggccagttcaacttcgacgagggcaccccccccaccaacttcgacaccttccccgccgccatcatgaccgtgttccagatcctgaccggcgaggactggaacgaggtgatgtacgacggcatcaagagccagggcggcgtgcagggcggcatggtgttcagcatctacttcatcgtgctgaccctgttcggcaactacaccctgctgaacgtgttcctggccatcgccgtggacaacctggccaacgcccaggagctgaccaaggacgagcaggaggaggaggaggccgccaaccagaagctggccctgcagaaggccaaggaggtggccgaggtgagccccctgagcgccgccaacatgagcatcgccgtgaaggagcagcagaagaaccagaagcccgccaagagcgtgtgggagcagagaaccagcgagatgagaaagcagaacctgctggccagcagagaggccctgtacaacgagatggaccccgacgagagatggaaggccgcctacaccagacacctgagacccgacatgaagacccacctggacagacccctggtggtggacccccaggagaacagaaacaacaacaccaacaagagcagagccgccgagcccaccgtggaccagagactgggccagcagagagccgaggacttcctgagaaagcaggccagataccacgacagagccagagaccccagcggcagcgccggcctggacgccagaagaccctgggccggcagccaggaggccgagctgagcagagagggcccctacggcagagagagcgaccaccacgccagagagggcagcctggagcagcccggcttctgggagggcgaggccgagagaggcaaggccggcgacccccacagaagacacgtgcacagacagggcggcagcagagagagcagaagcggcagccccagaaccggcgccgacggcgagcacagaagacacagagcccacagaagacccggcgaggagggccccgaggacaaggccgagagaagagccagacacagagagggcagcagacccgccagaggcggcgagggcgagggcgagggccccgacggcggcgagagaagaagaagacacagacacggcgcccccgccacctacgagggcgacgccagaagagaggacaaggagagaagacacagaagaagaaaggagaaccagggcagcggcgtgcccgtgagcggccccaacctgagcaccaccagacccatccagcaggacctgggcagacaggacccccccctggccgaggacatcgacaacatgaagaacaacaagctggccaccgccgagagcgccgccccccacggcagcctgggccacgccggcctgccccagagccccgccaagatgggcaacagcaccgaccccggccccatgctggccatccccgccatggccaccaacccccagaacgccgccagcagaagaacccccaacaaccccggcaaccccagcaaccccggcccccccaagacccccgagaacagcctgatcgtgaccaaccccagcggcacccagaccaacagcgccaagaccgccagaaagcccgaccacaccaccgtggacatcccccccgcctgccccccccccctgaaccacaccgtggtgcaggtgaacaagaacgccaaccccgaccccctgcccaagaaggaggaggagaagaaggaggaggaggaggacgacagaggcgaggacggccccaagcccatgcccccctacagcagcatgttcatcctgagcaccaccaaccccctgagaagactgtgccactacatcctgaacctgagatacttcgagatgtgcatcctgatggtgatcgccatgagcagcatcgccctggccgccgaggaccccgtgcagcccaacgcccccagaaacaacgtgctgagatacttcgactacgtgttcaccggcgtgttcaccttcgagatggtgatcaagatgatcgacctgggcctggtgctgcaccagggcgcctacttcagagacctgtggaacatcctggacttcatcgtggtgagcggcgccctggtggccttcgccttcaccggcaacagcaagggcaaggacatcaacaccatcaagagcctgagagtgctgagagtgctgagacccctgaagaccatcaagagactgcccaagctgaaggccgtgttcgactgcgtggtgaacagcctgaagaacgtgttcaacatcctgatcgtgtacatgctgttcatgttcatcttcgccgtggtggccgtgcagctgttcaagggcaagttcttccactgcaccgacgagagcaaggagttcgagaaggactgcagaggcaagtacctgctgtacgagaagaacgaggtgaaggccagagacagagagtggaagaagtacgagttccactacgacaacgtgctgtgggccctgctgaccctgttcaccgtgagcaccggcgagggctggccccaggtgctgaagcacagcgtggacgccaccttcgagaaccagggccccagccccggctacagaatggagatgagcatcttctacgtggtgtacttcgtggtgttccccttcttcttcgtgaacatcttcgtggccctgatcatcatcaccttccaggagcagggcgacaagatgatggaggagtacagcctggagaagaacgagagagcctgcatcgacttcgccatcagcgccaagcccctgaccagacacatgccccagaacaagcagagcttccagtacagaatgtggcagttcgtggtgagcccccccttcgagtacaccatcatggccatgatcgccctgaacaccatcgtgctgatgatgaagttctacggcgccagcgtggcctacgagaacgccctgagagtgttcaacatcgtgttcaccagcctgttcagcctggagtgcgtgctgaaggtgatggccttcggcatcctgaactacttcagagacgcctggaacatcttcgacttcgtgaccgtgctgggcagcatcaccgacatcctggtgaccgagttcggcaacaacttcatcaacctgagcttcctgagactgttcagagccgccagactgatcaagctgctgagacagggctacaccatcagaatcctgctgtggaccttcgtgcagagcttcaaggccctgccctacgtgtgcctgctgatcgccatgctgttcttcatctacgccatcatcggcatgcaggtgttcggcaacatcggcatcgacgtggaggacgaggacagcgacgaggacgagttccagatcaccgagcacaacaacttcagaaccttcttccaggccctgatgctgctgttcagaagcgccaccggcgaggcctggcacaacatcatgctgagctgcctgagcggcaagccctgcgacaagaacagcggcatcctgaccagagagtgcggcaacgagttcgcctacttctacttcgtgagcttcatcttcctgtgcagcttcctgatgctgaacctgttcgtggccgtgatcatggacaacttcgagtacctgaccagagacagcagcatcctgggcccccaccacctggacgagtacgtgagagtgtgggccgagtacgaccccgccgcctgcggcagaatccactacaaggacatgtacagcctgctgagagtgatcagcccccccctgggcctgggcaagaagtgcccccacagagtggcctgcaagagactgctgagaatggacctgcccgtggccgacgacaacaccgtgcacttcaacagcaccctgatggccctgatcagaaccgccctggacatcaagatcgccaagggcggcgccgacaagcagcagatggacgccgagctgagaaaggagatgatggccatctggcccaacctgagccagaagaccctggacctgctggtgaccccccacaagagcaccgacctgaccgtgggcaagatctacgccgccatgatgatcatggagtactacagacagagcaaggccaagaagctgcaggccatgagagaggagcaggacagaacccccctgatgttccagagaatggagccccccagccccacccaggagggcggccccggccagaacgccctgcccagcacccagctggaccccggcggcgccctgatggcccacgagagcggcctgaaggagagccccagctgggtgacccagagagcccaggagatgttccagaagaccggcacctggagccccgagcagggcccccccaccgacatgcccaacagccagcccaacagccagagcgtggagatgagagagatgggcagagacggctacagcgacagcgagcactacctgcccatggagggccagggcagagccgccagcatgcccagactgcccgccgagaaccagagaagaagaggcagacccagaggcaacaacctgagcaccatcagcgacaccagccccatgaagagaagcgccagcgtgctgggccccaaggccagaagactggacgactacagcctggagagagtgccccccgaggagaaccagagacaccaccagagaagaagagacagaagccacagagccagcgagagaagcctgggcagatacaccgacgtggacaccggcctgggcaccgacctgagcatgaccacccagagcggcgacctgcccagcaaggagagagaccaggagagaggcagacccaaggacagaaagcacagacagcaccaccaccaccaccaccaccaccaccacccccccccccccgacaaggacagatacgcccaggagagacccgaccacggcagagccagagccagagaccagagatggagcagaagccccagcgagggcagagagcacatggcccacagacagtag

SEQ ID NO: 75061 - DNA, 7488 bp, synthetic construct
  misc_feature 1..7488: note = Description of Artificial Sequence: Synthetic coding sequence
  source 1..7488: mol_type = other DNA
atggccagattcggcgacgagatgcccgccagatacggcggcggcggcagcggcgccgccgccggcgtggtggtgggcagcggcggcggcagaggcgccggcggcagcagacagggcggccagcccggcgcccagagaatgtacaagcagagcatggcccagagagccagaaccatggccctgtacaaccccatccccgtgagacagaactgcctgaccgtgaacagaagcctgttcctgttcagcgaggacaacgtggtgagaaagtacgccaagaagatcaccgagtggccccccttcgagtacatgatcctggccaccatcatcgccaactgcatcgtgctggccctggagcagcacctgcccgacgacgacaagacccccatgagcgagagactggacgacaccgagccctacttcatcggcatcttctgcttcgaggccggcatcaagatcatcgccctgggcttcgccttccacaagggcagctacctgagaaacggctggaacgtgatggacttcgtggtggtgctgaccggcatcctggccaccgtgggcaccgagttcgacctgagaaccctgagagccgtgagagtgctgagacccctgaagctggtgagcggcatccccagcctgcaggtggtgctgaagagcatcatgaaggccatgatccccctgctgcagatcggcctgctgctgttcttcgccatcctgatcttcgccatcatcggcctggagttctacatgggcaagttccacaccacctgcttcgaggagggcaccgacgacatccagggcgagagccccgccccctgcggcaccgaggagcccgccagaacctgccccaacggcaccaagtgccagccctactgggagggccccaacaacggcatcacccagttcgacaacatcctgttcgccgtgctgaccgtgttccagtgcatcaccatggagggctggaccgacctgctgtacaacagcaacgacgccagcggcaacacctggaactggctgtacttcatccccctgatcatcatcggcagcttcttcatgctgaacctggtgctgggcgtgctgagcggcgagttcgccaaggagagagagagagtggagaacagaagagccttcctgaagctgagaagacagcagcagatcgagagagagctgaacggctacatggagtggatcagcaaggccgaggaggtgatcctggccgaggacgagaccgacggcgagcagagacaccccttcgacggcgccctgagaagaaccaccatcaagaagagcaagaccgacctgctgaaccccgaggaggccgaggaccagctggccgacatcgccagcgtgggcagccccttcgccagagccagcatcaagagcgccaagctggagaacagcaccttcttccacaagaaggagagaagaatgagattctacatcagaagaatggtgaagacccaggccttctactggaccgtgctgagcctggtggccctgaacaccctgtgcgtggccatcgtgcactacaaccagcccgagtggctgagcgacttcctgtactacgccgagttcatcttcctgggcctgttcatgagcgagatgttcatcaagatgtacggcctgggcaccagaccctacttccacagcagcttcaactgcttcgactgcggcgtgatcatcggcagcatcttcgaggtgatctgggccgtgatcaagcccggcaccagcttcggcatcagcgtgctgagagccctgagactgctgagaatcttcaaggtgaccaagtactgggccagcctgagaaacctggtggtgagcctgctgaacagcatgaagagcatcatcagcctgctgttcctgctgttcctgttcatcgtggtgttcgccctgctgggcatgcagctgttcggcggccagttcaacttcgacgagggcaccccccccaccaacttcgacaccttccccgccgccatcatgaccgtgttccagatcctgaccggcgaggactggaacgaggtgatgtacgacggcatcaagagccagggcggcgtgcagggcggcatggtgttcagcatctacttcatcgtgctgaccctgttcggcaactacaccctgctgaacgtgttcctggccatcgccgtggacaacctggccaacgcccaggagctgaccaaggacgagcaggaggaggaggaggccgccaaccagaagctggccctgcagaaggccaaggaggtggccgaggtgagccccctgagcgccgccaacatgagcatcgccgtgaaggagcagcagaagaaccagaagcccgccaagagcgtgtgggagcagagaaccagcgagatgagaaagcagaacctgctggccagcagagaggccctgtacaacgagatggaccccgacgagagatggaaggccgcctacaccagacacctgagacccgacatgaagacccacctggacagacccctggtggtggacccccaggagaacagaaacaacaacaccaacaagagcagagccgccgagcccaccgtggaccagagactgggccagcagagagccgaggacttcctgagaaagcaggccagataccacgacagagccagagaccccagcggcagcgccggcctggacgccagaagaccctgggccggcagccaggaggccgagctgagcagagagggcccctacggcagagagagcgaccaccacgccagagagggcagcctggagcagcccggcttctgggagggcgaggccgagagaggcaaggccggcgacccccacagaagacacgtgcacagacagggcggcagcagagagagcagaagcggcagccccagaaccggcgccgacggcgagcacagaagacacagagcccacagaagacccggcgaggagggccccgaggacaaggccgagagaagagccagacacagagagggcagcagacccgccagaggcggcgagggcgagggcgagggccccgacggcggcgagagaagaagaagacacagacacggcgcccccgccacctacgagggcgacgccagaagagaggacaaggagagaagacacagaagaagaaaggagaaccagggcagcggcgtgcccgtgagcggccccaacctgagcaccaccagacccatccagcaggacctgggcagacaggacccccccctggccgaggacatcgacaacatgaagaacaacaagctggccaccgccgagagcgccgccccccacggcagcctgggccacgccggcctgccccagagccccgccaagatgggcaacagcaccgaccccggccccatgctggccatccccgccatggccaccaacccccagaacgccgccagcagaagaacccccaacaaccccggcaaccccagcaaccccggcccccccaagacccccgagaacagcctgatcgtgaccaaccccagcggcacccagaccaacagcgccaagaccgccagaaagcccgaccacaccaccgtggacatcccccccgcctgccccccccccctgaaccacaccgtggtgcaggtgaacaagaacgccaaccccgaccccctgcccaagaaggaggaggagaagaaggaggaggaggaggacgacagaggcgaggacggccccaagcccatgcccccctacagcagcatgttcatcctgagcaccaccaaccccctgagaagactgtgccactacatcctgaacctgagatacttcgagatgtgcatcctgatggtgatcgccatgagcagcatcgccctggccgccgaggaccccgtgcagcccaacgcccccagaaacaacgtgctgagatacttcgactacgtgttcaccggcgtgttcaccttcgagatggtgatcaagatgatcgacctgggcctggtgctgcaccagggcgcctacttcagagacctgtggaacatcctggacttcatcgtggtgagcggcgccctggtggccttcgccttcaccggcaacagcaagggcaaggacatcaacaccatcaagagcctgagagtgctgagagtgctgagacccctgaagaccatcaagagactgcccaagctgaaggccgtgttcgactgcgtggtgaacagcctgaagaacgtgttcaacatcctgatcgtgtacatgctgttcatgttcatcttcgccgtggtggccgtgcagctgttcaagggcaagttcttccactgcaccgacgagagcaaggagttcgagaaggactgcagaggcaagtacctgctgtacgagaagaacgaggtgaaggccagagacagagagtggaagaagtacgagttccactacgacaacgtgctgtgggccctgctgaccctgttcaccgtgagcaccggcgagggctggccccaggtgctgaagcacagcgtggacgccaccttcgagaaccagggccccagccccggctacagaatggagatgagcatcttctacgtggtgtacttcgtggtgttccccttcttcttcgtgaacatcttcgtggccctgatcatcatcaccttccaggagcagggcgacaagatgatggaggagtacagcctggagaagaacgagagagcctgcatcgacttcgccatcagcgccaagcccctgaccagacacatgccccagaacaagcagagcttccagtacagaatgtggcagttcgtggtgagcccccccttcgagtacaccatcatggccatgatcgccctgaacaccatcgtgctgatgatgaagttctacggcgccagcgtggcctacgagaacgccctgagagtgttcaacatcgtgttcaccagcctgttcagcctggagtgcgtgctgaaggtgatggccttcggcatcctgaactacttcagagacgcctggaacatcttcgacttcgtgaccgtgctgggcagcatcaccgacatcctggtgaccgagttcggcaacaacttcatcaacctgagcttcctgagactgttcagagccgccagactgatcaagctgctgagacagggctacaccatcagaatcctgctgtggaccttcgtgcagagcttcaaggccctgccctacgtgtgcctgctgatcgccatgctgttcttcatctacgccatcatcggcatgcaggtgttcggcaacatcggcatcgacgtggaggacgaggacagcgacgaggacgagttccagatcaccgagcacaacaacttcagaaccttcttccaggccctgatgctgctgttcagaagcgccaccggcgaggcctggcacaacatcatgctgagctgcctgagcggcaagccctgcgacaagaacagcggcatcctgaccagagagtgcggcaacgagttcgcctacttctacttcgtgagcttcatcttcctgtgcagcttcctgatgctgaacctgttcgtggccgtgatcatggacaacttcgagtacctgaccagagacagcagcatcctgggcccccaccacctggacgagtacgtgagagtgtgggccgagtacgaccccgccgcctggggcagaatgccctacctggacatgtaccagatgctgagacacatgagcccccccctgggcctgggcaagaagtgccccgccagagtggcctacaagagactgctgagaatggacctgcccgtggccgacgacaacaccgtgcacttcaacagcaccctgatggccctgatcagaaccgccctggacatcaagatcgccaagggcggcgccgacaagcagcagatggacgccgagctgagaaaggagatgatggccatctggcccaacctgagccagaagaccctggacctgctggtgaccccccacaagagcaccgacctgaccgtgggcaagatctacgccgccatgatgatcatggagtactacagacagagcaaggccaagaagctgcaggccatgagagaggagcaggacagaacccccctgatgttccagagaatggagccccccagccccacccaggagggcggccccggccagaacgccctgcccagcacccagctggaccccggcggcgccctgatggcccacgagagcggcctgaaggagagccccagctgggtgacccagagagcccaggagatgttccagaagaccggcacctggagccccgagcagggcccccccaccgacatgcccaacagccagcccaacagccagagcgtggagatgagagagatgggcagagacggctacagcgacagcgagcactacctgcccatggagggccagggcagagccgccagcatgcccagactgcccgccgagaaccagaccatcagcgacaccagccccatgaagagaagcgccagcgtgctgggccccaaggccagaagactggacgactacagcctggagagagtgccccccgaggagaaccagagacaccaccagagaagaagagacagaagccacagagccagcgagagaagcctgggcagatacaccgacgtggacaccggcctgggcaccgacctgagcatgaccacccagagcggcgacctgcccagcaaggagagagaccaggagagaggcagacccaaggacagaaagcacagacagcaccaccaccaccaccaccaccaccaccacccccccccccccgacaaggacagatacgcccaggagagacccgaccacggcagagccagagccagagaccagagatggagcagaagccccagcgagggcagagagcacatggcccacagacagggcagcagcagcgtgagcggcagccccgcccccagcaccagcggcaccagcacccccagaagaggcagaagacagctgccccagacccccagcacccccagaccccacgtgagctacagccccgtgatcagaaaggccggcggcagcggccccccccagcagcagcagcagcagcagcagcagcagcagcagcaggccgtggccagacccggcagagccgccaccagcggccccagaagataccccggccccaccgccgagcccctggccggcgacagaccccccaccggcggccacagcagcggcagaagccccagaatggagagaagagtgcccggccccgccagaagcgagagccccagagcctgcagacacggcggcgccagatggcccgccagcggcccccacgtgagcgagggcccccccggccccagacaccacggctactacagaggcagcgactacgacgaggccgacggccccggcagcggcggcggcgaggaggccatggccggcgcctacgacgcccccccccccgtgagacacgccagcagcggcgccaccggcagaagccccagaacccccagagccagcggccccgcctgcgccagccccagcagacacggcagaagactgcccaacggctactaccccgcccacggcctggccagacccagaggccccggcagcagaaagggcctgcacgagccctacagcgagagcgacgacgactggtgctag

SEQ ID NO: 75062 - DNA, 7521 bp, synthetic construct
  misc_feature 1..7521: note = Description of Artificial Sequence: Synthetic coding sequence
  source 1..7521: mol_type = other DNA
atggccagattcggcgacgagatgcccgccagatacggcggcggcggcagcggcgccgccgccggcgtggtggtgggcagcggcggcggcagaggcgccggcggcagcagacagggcggccagcccggcgcccagagaatgtacaagcagagcatggcccagagagccagaaccatggccctgtacaaccccatccccgtgagacagaactgcctgaccgtgaacagaagcctgttcctgttcagcgaggacaacgtggtgagaaagtacgccaagaagatcaccgagtggccccccttcgagtacatgatcctggccaccatcatcgccaactgcatcgtgctggccctggagcagcacctgcccgacgacgacaagacccccatgagcgagagactggacgacaccgagccctacttcatcggcatcttctgcttcgaggccggcatcaagatcatcgccctgggcttcgccttccacaagggcagctacctgagaaacggctggaacgtgatggacttcgtggtggtgctgaccggcatcctggccaccgtgggcaccgagttcgacctgagaaccctgagagccgtgagagtgctgagacccctgaagctggtgagcggcatccccagcctgcaggtggtgctgaagagcatcatgaaggccatgatccccctgctgcagatcggcctgctgctgttcttcgccatcctgatcttcgccatcatcggcctggagttctacatgggcaagttccacaccacctgcttcgaggagggcaccgacgacatccagggcgagagccccgccccctgcggcaccgaggagcccgccagaacctgccccaacggcaccaagtgccagccctactgggagggccccaacaacggcatcacccagttcgacaacatcctgttcgccgtgctgaccgtgttccagtgcatcaccatggagggctggaccgacctgctgtacaacagcaacgacgccagcggcaacacctggaactggctgtacttcatccccctgatcatcatcggcagcttcttcatgctgaacctggtgctgggcgtgctgagcggcgagttcgccaaggagagagagagagtggagaacagaagagccttcctgaagctgagaagacagcagcagatcgagagagagctgaacggctacatggagtggatcagcaaggccgaggaggtgatcctggccgaggacgagaccgacggcgagcagagacaccccttcgacgccctgagaagaaccaccatcaagaagagcaagaccgacctgctgaaccccgaggaggccgaggaccagctggccgacatcgccagcgtgggcagccccttcgccagagccagcatcaagagcgccaagctggagaacagcaccttcttccacaagaaggagagaagaatgagattctacatcagaagaatggtgaagacccaggccttctactggaccgtgctgagcctggtggccctgaacaccctgtgcgtggccatcgtgcactacaaccagcccgagtggctgagcgacttcctgtactacgccgagttcatcttcctgggcctgttcatgagcgagatgttcatcaagatgtacggcctgggcaccagaccctacttccacagcagcttcaactgcttcgactgcggcgtgatcatcggcagcatcttcgaggtgatctgggccgtgatcaagcccggcaccagcttcggcatcagcgtgctgagagccctgagactgctgagaatcttcaaggtgaccaagtactgggccagcctgagaaacctggtggtgagcctgctgaacagcatgaagagcatcatcagcctgctgttcctgctgttcctgttcatcgtggtgttcgccctgctgggcatgcagctgttcggcggccagttcaacttcgacgagggcaccccccccaccaacttcgacaccttccccgccgccatcatgaccgtgttccagatcctgaccggcgaggactggaacgaggtgatgtacgacggcatcaagagccagggcggcgtgcagggcggcatggtgttcagcatctacttcatcgtgctgaccctgttcggcaactacaccctgctgaacgtgttcctggccatcgccgtggacaacctggccaacgcccaggagctgaccaaggacgagcaggaggaggaggaggccgccaaccagaagctggccctgcagaaggccaaggaggtggccgaggtgagccccctgagcgccgccaacatgagcatcgccgtgaaggagcagcagaagaaccagaagcccgccaagagcgtgtgggagcagagaaccagcgagatgagaaagcagaacctgctggccagcagagaggccctgtacaacgagatggaccccgacgagagatggaaggccgcctacaccagacacctgagacccgacatgaagacccacctggacagacccctggtggtggacccccaggagaacagaaacaacaacaccaacaagagcagagccgccgagcccaccgtggaccagagactgggccagcagagagccgaggacttcctgagaaagcaggccagataccacgacagagccagagaccccagcggcagcgccggcctggacgccagaagaccctgggccggcagccaggaggccgagctgagcagagagggcccctacggcagagagagcgaccaccacgccagagagggcagcctggagcagcccggcttctgggagggcgaggccgagagaggcaaggccggcgacccccacagaagacacgtgcacagacagggcggcagcagagagagcagaagcggcagccccagaaccggcgccgacggcgagcacagaagacacagagcccacagaagacccggcgaggagggccccgaggacaaggccgagagaagagccagacacagagagggcagcagacccgccagaggcggcgagggcgagggcgagggccccgacggcggcgagagaagaagaagacacagacacggcgcccccgccacctacgagggcgacgccagaagagaggacaaggagagaagacacagaagaagaaaggagaaccagggcagcggcgtgcccgtgagcggccccaacctgagcaccaccagacccatccagcaggacctgggcagacaggacccccccctggccgaggacatcgacaacatgaagaacaacaagctggccaccgccgagagcgccgccccccacggcagcctgggccacgccggcctgccccagagccccgccaagatgggcaacagcaccgaccccggccccatgctggccatccccgccatggccaccaacccccagaacgccgccagcagaagaacccccaacaaccccggcaaccccagcaaccccggcccccccaagacccccgagaacagcctgatcgtgaccaaccccagcggcacccagaccaacagcgccaagaccgccagaaagcccgaccacaccaccgtggacatcccccccgcctgccccccccccctgaaccacaccgtggtgcaggtgaacaagaacgccaaccccgaccccctgcccaagaaggaggaggagaagaaggaggaggaggaggacgacagaggcgaggacggccccaagcccatgcccccctacagcagcatgttcatcctgagcaccaccaaccccctgagaagactgtgccactacatcctgaacctgagatacttcgagatgtgcatcctgatggtgatcgccatgagcagcatcgccctggccgccgaggaccccgtgcagcccaacgcccccagaaacaacgtgctgagatacttcgactacgtgttcaccggcgtgttcaccttcgagatggtgatcaagatgatcgacctgggcctggtgctgcaccagggcgcctacttcagagacctgtggaacatcctggacttcatcgtggtgagcggcgccctggtggccttcgccttcaccggcaacagcaagggcaaggacatcaacaccatcaagagcctgagagtgctgagagtgctgagacccctgaagaccatcaagagactgcccaagctgaaggccgtgttcgactgcgtggtgaacagcctgaagaacgtgttcaacatcctgatcgtgtacatgctgttcatgttcatcttcgccgtggtggccgtgcagctgttcaagggcaagttcttccactgcaccgacgagagcaaggagttcgagaaggactgcagaggcaagtacctgctgtacgagaagaacgaggtgaaggccagagacagagagtggaagaagtacgagttccactacgacaacgtgctgtgggccctgctgaccctgttcaccgtgagcaccggcgagggctggccccaggtgctgaagcacagcgtggacgccaccttcgagaaccagggccccagccccggctacagaatggagatgagcatcttctacgtggtgtacttcgtggtgttccccttcttcttcgtgaacatcttcgtggccctgatcatcatcaccttccaggagcagggcgacaagatgatggaggagtacagcctggagaagaacgagagagcctgcatcgacttcgccatcagcgccaagcccctgaccagacacatgccccagaacaagcagagcttccagtacagaatgtggcagttcgtggtgagcccccccttcgagtacaccatcatggccatgatcgccctgaacaccatcgtgctgatgatgaagttctacggcgccagcgtggcctacgagaacgccctgagagtgttcaacatcgtgttcaccagcctgttcagcctggagtgcgtgctgaaggtgatggccttcggcatcctgaactacttcagagacgcctggaacatcttcgacttcgtgaccgtgctgggcagcatcaccgacatcctggtgaccgagttcggcaacaacttcatcaacctgagcttcctgagactgttcagagccgccagactgatcaagctgctgagacagggctacaccatcagaatcctgctgtggaccttcgtgcagagcttcaaggccctgccctacgtgtgcctgctgatcgccatgctgttcttcatctacgccatcatcggcatgcaggtgttcggcaacatcggcatcgacgtggaggacgaggacagcgacgaggacgagttccagatcaccgagcacaacaacttcagaaccttcttccaggccctgatgctgctgttcagaagcgccaccggcgaggcctggcacaacatcatgctgagctgcctgagcggcaagccctgcgacaagaacagcggcatcctgaccagagagtgcggcaacgagttcgcctacttctacttcgtgagcttcatcttcctgtgcagcttcctgatgctgaacctgttcgtggccgtgatcatggacaacttcgagtacctgaccagagacagcagcatcctgggcccccaccacctggacgagtacgtgagagtgtgggccgagtacgaccccgccgcctggggcagaatgccctacctggacatgtaccagatgctgagacacatgagcccccccctgggcctgggcaagaagtgccccgccagagtggcctacaagagactgctgagaatggacctgcccgtggccgacgacaacaccgtgcacttcaacagcaccctgatggccctgatcagaaccgccctggacatcaagatcgccaagggcggcgccgacaagcagcagatggacgccgagctgagaaaggagatgatggccatctggcccaacctgagccagaagaccctggacctgctggtgaccccccacaagagcaccgacctgaccgtgggcaagatctacgccgccatgatgatcatggagtactacagacagagcaaggccaagaagctgcaggccatgagagaggagcaggacagaacccccctgatgttccagagaatggagccccccagccccacccaggagggcggccccggccagaacgccctgcccagcacccagctggaccccggcggcgccctgatggcccacgagagcggcctgaaggagagccccagctgggtgacccagagagcccaggagatgttccagaagaccggcacctggagccccgagcagggcccccccaccgacatgcccaacagccagcccaacagccagagcgtggagatgagagagatgggcagagacggctacagcgacagcgagcactacctgcccatggagggccagggcagagccgccagcatgcccagactgcccgccgagaaccagagaagaagaggcagacccagaggcaacaacctgagcaccatcagcgacaccagccccatgaagagaagcgccagcgtgctgggccccaaggccagaagactggacgactacagcctggagagagtgccccccgaggagaaccagagacaccaccagagaagaagagacagaagccacagagccagcgagagaagcctgggcagatacaccgacgtggacaccggcctgggcaccgacctgagcatgaccacccagagcggcgacctgcccagcaaggagagagaccaggagagaggcagacccaaggacagaaagcacagacagcaccaccaccaccaccaccaccaccaccacccccccccccccgacaaggacagatacgcccaggagagacccgaccacggcagagccagagccagagaccagagatggagcagaagccccagcgagggcagagagcacatggcccacagacagggcagcagcagcgtgagcggcagccccgcccccagcaccagcggcaccagcacccccagaagaggcagaagacagctgccccagacccccagcacccccagaccccacgtgagctacagccccgtgatcagaaaggccggcggcagcggccccccccagcagcagcagcagcagcagcagcagcagcagcagcaggccgtggccagacccggcagagccgccaccagcggccccagaagataccccggccccaccgccgagcccctggccggcgacagaccccccaccggcggccacagcagcggcagaagccccagaatggagagaagagtgcccggccccgccagaagcgagagccccagagcctgcagacacggcggcgccagatggcccgccagcggcccccacgtgagcgagggcccccccggccccagacaccacggctactacagaggcagcgactacgacgaggccgacggccccggcagcggcggcggcgaggaggccatggccggcgcctacgacgcccccccccccgtgagacacgccagcagcggcgccaccggcagaagccccagaacccccagagccagcggccccgcctgcgccagccccagcagacacggcagaagactgcccaacggctactaccccgcccacggcctggccagacccagaggccccggcagcagaaagggcctgcacgagccctacagcgagagcgacgacgactggtgctag

SEQ ID NO: 75063 - DNA, 7539 bp, synthetic construct
  misc_feature 1..7539: note = Description of Artificial Sequence: Synthetic coding sequence
  source 1..7539: mol_type = other DNA
atggccagattcggcgacgagatgcccgccagatacggcggcggcggcagcggcgccgccgccggcgtggtggtgggcagcggcggcggcagaggcgccggcggcagcagacagggcggccagcccggcgcccagagaatgtacaagcagagcatggcccagagagccagaaccatggccctgtacaaccccatccccgtgagacagaactgcctgaccgtgaacagaagcctgttcctgttcagcgaggacaacgtggtgagaaagtacgccaagaagatcaccgagtggccccccttcgagtacatgatcctggccaccatcatcgccaactgcatcgtgctggccctggagcagcacctgcccgacgacgacaagacccccatgagcgagagactggacgacaccgagccctacttcatcggcatcttctgcttcgaggccggcatcaagatcatcgccctgggcttcgccttccacaagggcagctacctgagaaacggctggaacgtgatggacttcgtggtggtgctgaccggcatcctggccaccgtgggcaccgagttcgacctgagaaccctgagagccgtgagagtgctgagacccctgaagctggtgagcggcatccccagcctgcaggtggtgctgaagagcatcatgaaggccatgatccccctgctgcagatcggcctgctgctgttcttcgccatcctgatcttcgccatcatcggcctggagttctacatgggcaagttccacaccacctgcttcgaggagggcaccgacgacatccagggcgagagccccgccccctgcggcaccgaggagcccgccagaacctgccccaacggcaccaagtgccagccctactgggagggccccaacaacggcatcacccagttcgacaacatcctgttcgccgtgctgaccgtgttccagtgcatcaccatggagggctggaccgacctgctgtacaacagcaacgacgccagcggcaacacctggaactggctgtacttcatccccctgatcatcatcggcagcttcttcatgctgaacctggtgctgggcgtgctgagcggcgagttcgccaaggagagagagagagtggagaacagaagagccttcctgaagctgagaagacagcagcagatcgagagagagctgaacggctacatggagtggatcagcaaggccgaggaggtgatcctggccgaggacgagaccgacggcgagcagagacaccccttcgacggcgccctgagaagaaccaccatcaagaagagcaagaccgacctgctgaaccccgaggaggccgaggaccagctggccgacatcgccagcgtgggcagccccttcgccagagccagcatcaagagcgccaagctggagaacagcaccttcttccacaagaaggagagaagaatgagattctacatcagaagaatggtgaagacccaggccttctactggaccgtgctgagcctggtggccctgaacaccctgtgcgtggccatcgtgcactacaaccagcccgagtggctgagcgacttcctgtactacgccgagttcatcttcctgggcctgttcatgagcgagatgttcatcaagatgtacggcctgggcaccagaccctacttccacagcagcttcaactgcttcgactgcggcgtgatcatcggcagcatcttcgaggtgatctgggccgtgatcaagcccggcaccagcttcggcatcagcgtgctgagagccctgagactgctgagaatcttcaaggtgaccaagtactgggccagcctgagaaacctggtggtgagcctgctgaacagcatgaagagcatcatcagcctgctgttcctgctgttcctgttcatcgtggtgttcgccctgctgggcatgcagctgttcggcggccagttcaacttcgacgagggcaccccccccaccaacttcgacaccttccccgccgccatcatgaccgtgttccagatcctgaccggcgaggactggaacgaggtgatgtacgacggcatcaagagccagggcggcgtgcagggcggcatggtgttcagcatctacttcatcgtgctgaccctgttcggcaactacaccctgctgaacgtgttcctggccatcgccgtggacaacctggccaacgcccaggagctgaccaaggtggaggccgacgagcaggaggaggaggaggccgccaaccagaagctggccctgcagaaggccaaggaggtggccgaggtgagccccctgagcgccgccaacatgagcatcgccgtgaaggagcagcagaagaaccagaagcccgccaagagcgtgtgggagcagagaaccagcgagatgagaaagcagaacctgctggccagcagagaggccctgtacaacgagatggaccccgacgagagatggaaggccgcctacaccagacacctgagacccgacatgaagacccacctggacagacccctggtggtggacccccaggagaacagaaacaacaacaccaacaagagcagagccgccgagcccaccgtggaccagagactgggccagcagagagccgaggacttcctgagaaagcaggccagataccacgacagagccagagaccccagcggcagcgccggcctggacgccagaagaccctgggccggcagccaggaggccgagctgagcagagagggcccctacggcagagagagcgaccaccacgccagagagggcagcctggagcagcccggcttctgggagggcgaggccgagagaggcaaggccggcgacccccacagaagacacgtgcacagacagggcggcagcagagagagcagaagcggcagccccagaaccggcgccgacggcgagcacagaagacacagagcccacagaagacccggcgaggagggccccgaggacaaggccgagagaagagccagacacagagagggcagcagacccgccagaggcggcgagggcgagggcgagggccccgacggcggcgagagaagaagaagacacagacacggcgcccccgccacctacgagggcgacgccagaagagaggacaaggagagaagacacagaagaagaaaggagaaccagggcagcggcgtgcccgtgagcggccccaacctgagcaccaccagacccatccagcaggacctgggcagacaggacccccccctggccgaggacatcgacaacatgaagaacaacaagctggccaccgccgagagcgccgccccccacggcagcctgggccacgccggcctgccccagagccccgccaagatgggcaacagcaccgaccccggccccatgctggccatccccgccatggccaccaacccccagaacgccgccagcagaagaacccccaacaaccccggcaaccccagcaaccccggcccccccaagacccccgagaacagcctgatcgtgaccaaccccagcggcacccagaccaacagcgccaagaccgccagaaagcccgaccacaccaccgtggacatcccccccgcctgccccccccccctgaaccacaccgtggtgcaggtgaacaagaacgccaaccccgaccccctgcccaagaaggaggaggagaagaaggaggaggaggaggacgacagaggcgaggacggccccaagcccatgcccccctacagcagcatgttcatcctgagcaccaccaaccccctgagaagactgtgccactacatcctgaacctgagatacttcgagatgtgcatcctgatggtgatcgccatgagcagcatcgccctggccgccgaggaccccgtgcagcccaacgcccccagaaacaacgtgctgagatacttcgactacgtgttcaccggcgtgttcaccttcgagatggtgatcaagatgatcgacctgggcctggtgctgcaccagggcgcctacttcagagacctgtggaacatcctggacttcatcgtggtgagcggcgccctggtggccttcgccttcaccggcaacagcaagggcaaggacatcaacaccatcaagagcctgagagtgctgagagtgctgagacccctgaagaccatcaagagactgcccaagctgaaggccgtgttcgactgcgtggtgaacagcctgaagaacgtgttcaacatcctgatcgtgtacatgctgttcatgttcatcttcgccgtggtggccgtgcagctgttcaagggcaagttcttccactgcaccgacgagagcaaggagttcgagaaggactgcagaggcaagtacctgctgtacgagaagaacgaggtgaaggccagagacagagagtggaagaagtacgagttccactacgacaacgtgctgtgggccctgctgaccctgttcaccgtgagcaccggcgagggctggccccaggtgctgaagcacagcgtggacgccaccttcgagaaccagggccccagccccggctacagaatggagatgagcatcttctacgtggtgtacttcgtggtgttccccttcttcttcgtgaacatcttcgtggccctgatcatcatcaccttccaggagcagggcgacaagatgatggaggagtacagcctggagaagaacgagagagcctgcatcgacttcgccatcagcgccaagcccctgaccagacacatgccccagaacaagcagagcttccagtacagaatgtggcagttcgtggtgagcccccccttcgagtacaccatcatggccatgatcgccctgaacaccatcgtgctgatgatgaagttctacggcgccagcgtggcctacgagaacgccctgagagtgttcaacatcgtgttcaccagcctgttcagcctggagtgcgtgctgaaggtgatggccttcggcatcctgaactacttcagagacgcctggaacatcttcgacttcgtgaccgtgctgggcagcatcaccgacatcctggtgaccgagttcggcaaccccaacaacttcatcaacctgagcttcctgagactgttcagagccgccagactgatcaagctgctgagacagggctacaccatcagaatcctgctgtggaccttcgtgcagagcttcaaggccctgccctacgtgtgcctgctgatcgccatgctgttcttcatctacgccatcatcggcatgcaggtgttcggcaacatcggcatcgacgtggaggacgaggacagcgacgaggacgagttccagatcaccgagcacaacaacttcagaaccttcttccaggccctgatgctgctgttcagaagcgccaccggcgaggcctggcacaacatcatgctgagctgcctgagcggcaagccctgcgacaagaacagcggcatcctgaccagagagtgcggcaacgagttcgcctacttctacttcgtgagcttcatcttcctgtgcagcttcctgatgctgaacctgttcgtggccgtgatcatggacaacttcgagtacctgaccagagacagcagcatcctgggcccccaccacctggacgagtacgtgagagtgtgggccgagtacgaccccgccgcctggggcagaatgccctacctggacatgtaccagatgctgagacacatgagcccccccctgggcctgggcaagaagtgccccgccagagtggcctacaagagactgctgagaatggacctgcccgtggccgacgacaacaccgtgcacttcaacagcaccctgatggccctgatcagaaccgccctggacatcaagatcgccaagggcggcgccgacaagcagcagatggacgccgagctgagaaaggagatgatggccatctggcccaacctgagccagaagaccctggacctgctggtgaccccccacaagagcaccgacctgaccgtgggcaagatctacgccgccatgatgatcatggagtactacagacagagcaaggccaagaagctgcaggccatgagagaggagcaggacagaacccccctgatgttccagagaatggagccccccagccccacccaggagggcggccccggccagaacgccctgcccagcacccagctggaccccggcggcgccctgatggcccacgagagcggcctgaaggagagccccagctgggtgacccagagagcccaggagatgttccagaagaccggcacctggagccccgagcagggcccccccaccgacatgcccaacagccagcccaacagccagagcgtggagatgagagagatgggcagagacggctacagcgacagcgagcactacctgcccatggagggccagggcagagccgccagcatgcccagactgcccgccgagaaccagagaagaagaggcagacccagaggcaacaacctgagcaccatcagcgacaccagccccatgaagagaagcgccagcgtgctgggccccaaggccagaagactggacgactacagcctggagagagtgccccccgaggagaaccagagacaccaccagagaagaagagacagaagccacagagccagcgagagaagcctgggcagatacaccgacgtggacaccggcctgggcaccgacctgagcatgaccacccagagcggcgacctgcccagcaaggagagagaccaggagagaggcagacccaaggacagaaagcacagacagcaccaccaccaccaccaccaccaccaccacccccccccccccgacaaggacagatacgcccaggagagacccgaccacggcagagccagagccagagaccagagatggagcagaagccccagcgagggcagagagcacatggcccacagacagggcagcagcagcgtgagcggcagccccgcccccagcaccagcggcaccagcacccccagaagaggcagaagacagctgccccagacccccagcacccccagaccccacgtgagctacagccccgtgatcagaaaggccggcggcagcggccccccccagcagcagcagcagcagcagcagcagcagcagcagcaggccgtggccagacccggcagagccgccaccagcggccccagaagataccccggccccaccgccgagcccctggccggcgacagaccccccaccggcggccacagcagcggcagaagccccagaatggagagaagagtgcccggccccgccagaagcgagagccccagagcctgcagacacggcggcgccagatggcccgccagcggcccccacgtgagcgagggcccccccggccccagacaccacggctactacagaggcagcgactacgacgaggccgacggccccggcagcggcggcggcgaggaggccatggccggcgcctacgacgcccccccccccgtgagacacgccagcagcggcgccaccggcagaagccccagaacccccagagccagcggccccgcctgcgccagccccagcagacacggcagaagactgcccaacggctactaccccgcccacggcctggccagacccagaggccccggcagcagaaagggcctgcacgagccctacagcgagagcgacgacgactggtgctag

SEQ ID NO: 75064 - DNA, 804 bp, synthetic construct
  misc_feature 1..804: note = Description of Artificial Sequence: Synthetic coding sequence
  source 1..804: mol_type = other DNA
atgctgttcatgttcatcttcgccgtggtggccgtgcagctgttcaagggcaagttcttccactgcaccgacgagagcaaggagttcgagaaggactgcagaggcaagtacctgctgtacgagaagaacgaggtgaaggccagagacagagagtggaagaagtacgagttccactacgacaacgtgctgtgggccctgctgaccctgttcaccgtgagcaccggcgagggctggccccaggtgctgaagcacagcgtggacgccaccttcgagaaccagggccccagccccggctacagaatggagatgagcatcttctacgtggtgtacttcgtggtgttccccttcttcttcgtgaacatcttcgtggccctgatcatcatcaccttccaggagcagggcgacaagatgatggaggagtacagcctggagaagaacgagagagcctgcatcgacttcgccatcagcgccaagcccctgaccagacacatgccccagaacaagcagagcttccagtacagaatgtggcagttcgtggtgagcccccccttcgagtacaccatcatggccatgatcgccctgaacaccatcgtgctgatgatgaagttctacggcgccagcgtggcctacgagaacgccctgagagtgttcaacatcgtgttcaccagcctgttcagcctggagtgcgtgctgaaggtgatggccttcggcatcctgaactacttcagagacgcctggaacatcttcgacttcgtgaccgtgctgggcagcatcaccgacatcctggtgaccgagttcggctag

SEQ ID NO: 75065 - DNA, 6795 bp, synthetic construct
  misc_feature 1..6795: note = Description of Artificial Sequence: Synthetic coding sequence
  source 1..6795: mol_type = other DNA
atggccctgtacaaccccatccccgtgagacagaactgcttcaccgtgaacagaagcctgttcatcttcggcgaggacaacatcgtgagaaagtacgccaagaagctgatcgactggccccccttcgagtacatgatcctggccaccatcatcgccaactgcatcgtgctggccctggagcagcacctgcccgaggacgacaagacccccatgagcagaagactggagaagaccgagccctacttcatcggcatcttctgcttcgaggccggcatcaagatcgtggccctgggcttcatcttccacaagggcagctacctgagaaacggctggaacgtgatggacttcatcgtggtgctgagcggcatcctggccaccgccggcacccacttcaacacccacgtggacctgagaaccctgagagccgtgagagtgctgagacccctgaagctggtgagcggcatccccagcctgcagatcgtgctgaagagcatcatgaaggccatggtgcccctgctgcagatcggcctgctgctgttcttcgccatcctgatgttcgccatcatcggcctggagttctacagcggcaagctgcacagagcctgcttcatgaacaacagcggcatcctggagggcttcgaccccccccacccctgcggcgtgcagggctgccccgccggctacgagtgcaaggactggatcggccccaacgacggcatcacccagttcgacaacatcctgttcgccgtgctgaccgtgttccagtgcatcaccatggagggctggaccaccgtgctgtacaacaccaacgacgccctgggcgccacctggaactggctgtacttcatccccctgatcatcatcggcagcttcttcgtgctgaacctggtgctgggcgtgctgagcggcgagttcgccaaggagagagagagagtggagaacagaagagccttcatgaagctgagaagacagcagcagatcgagagagagctgaacggctacagagcctggatcgacaaggccgaggaggtgatgctggccgaggagaacaagaacgccggcaccagcgccctggaggtgctgagaagagccaccatcaagagaagcagaaccgaggccatgaccagagacagcagcgacgagcactgcgtggacatcagcagcgtgggcacccccctggccagagccagcatcaagagcgccaaggtggacggcgtgagctacttcagacacaaggagagactgctgagaatcagcatcagacacatggtgaagagccaggtgttctactggatcgtgctgagcctggtggccctgaacaccgcctgcgtggccatcgtgcaccacaaccagccccagtggctgacccacctgctgtactacgccgagttcctgttcctgggcctgttcctgctggagatgagcctgaagatgtacggcatgggccccagactgtacttccacagcagcttcaactgcttcgacttcggcgtgaccgtgggcagcatcttcgaggtggtgtgggccatcttcagacccggcaccagcttcggcatcagcgtgctgagagccctgagactgctgagaatcttcaagatcaccaagtactgggccagcctgagaaacctggtggtgagcctgatgagcagcatgaagagcatcatcagcctgctgttcctgctgttcctgttcatcgtggtgttcgccctgctgggcatgcagctgttcggcggcagattcaacttcaacgacggcacccccagcgccaacttcgacaccttccccgccgccatcatgaccgtgttccagatcctgaccggcgaggactggaacgaggtgatgtacaacggcatcagaagccagggcggcgtgagcagcggcatgtggagcgccatctacttcatcgtgctgaccctgttcggcaactacaccctgctgaacgtgttcctggccatcgccgtggacaacctggccaacgcccaggagctgaccaaggacgagcaggaggaggaggaggccttcaaccagaagcacgccctgcagaaggccaaggaggtgagccccatgagcgcccccaacatgcccagcatcgagagagacagaagaagaagacaccacatgagcatgtgggagcccagaagcagccacctgagagagagaagaagaagacaccacatgagcgtgtgggagcagagaaccagccagctgagaaagcacatgcagatgagcagccaggaggccctgaacagagaggaggcccccaccatgaaccccctgaaccccctgaaccccctgagcagcctgaaccccctgaacgcccaccccagcctgtacagaagacccagagccatcgagggcctggccctgggcctggccctggagaagttcgaggaggagagaatcagcagaggcggcagcctgaagggcgacggcggcgacagaagcagcgccctggacaaccagagaacccccctgagcctgggccagagagagcccccctggctggccagaccctgccacggcaactgcgaccccacccagcaggaggccggcggcggcgaggccgtggtgaccttcgaggacagagccagacacagacagagccagagaagaagcagacacagaagagtgagaaccgagggcaaggagagcagcagcgccagcagaagcagaagcgccagccaggagagaagcctggacgaggccatgcccaccgagggcgagaaggaccacgagctgagaggcaaccacggcgccaaggagcccaccatccaggaggagagagcccaggacctgagaagaaccaacagcctgatggtgagcagaggcagcggcctggccggcggcctggacgaggccgacacccccctggtgctgccccaccccgagctggaggtgggcaagcacgtggtgctgaccgagcaggagcccgagggcagcagcgagcaggccctgctgggcaacgtgcagctggacatgggcagagtgatcagccagagcgagcccgacctgagctgcatcaccgccaacaccgacaaggccaccaccgagagcaccagcgtgaccgtggccatccccgacgtggaccccctggtggacagcaccgtggtgcacatcagcaacaagaccgacggcgaggccagccccctgaaggaggccgagatcagagaggacgaggaggaggtggagaagaagaagcagaagaaggagaagagagagaccggcaaggccatggtgccccacagcagcatgttcatcttcagcaccaccaaccccatcagaagagcctgccactacatcgtgaacctgagatacttcgagatgtgcatcctgctggtgatcgccgccagcagcatcgccctggccgccgaggaccccgtgctgaccaacagcgagagaaacaaggtgctgagatacttcgactacgtgttcaccggcgtgttcaccttcgagatggtgatcaagatgatcgaccagggcctgatcctgcaggacggcagctacttcagagacctgtggaacatcctggacttcgtggtggtggtgggcgccctggtggccttcgccctggccaacagcatgaagaccaacaagggcagagacatcaagaccatcaagagcctgagagtgctgagagtgctgagacccctgaagaccatcaagagactgcccaagctgaaggccgtgttcgactgcgtggtgaccagcctgaagaacgtgttcaacatcctgatcgtgtacaagctgttcatgttcatcttcgccgtgatcgccgtgcagctgttcaagggcaagttcttctactgcaccgacagcagcaaggacaccgagaaggagtgcatcggcaactacgtggaccacgagaagaacaagatggaggtgaagggcagagagtggaagagacacgagttccactacgacaacatcatctgggccctgctgaccctgttcaccgtgagcaccggcgagggctggccccaggtgctgcagcacagcgtggacgtgaccgaggaggacagaggccccagcagaagcaacagaatggagatgagcatcttctacgtggtgtacttcgtggtgttccccttcttcttcgtgaacatcttcgtggccctgatcatcatcaccttccaggagcagggcgacaagatgatggaggagtgcagcctggagaagaacgagagagcctgcatcgacttcgccatcagcgccaagcccctgaccagatacatgccccagaacagacacaccttccagtacagagtgtggcacttcgtggtgagccccagcttcgagtacaccatcatggccatgatcgccctgaacaccgtggtgctgatgatgaagtactacagcgccccctgcacctacgagctggccctgaagtacctgaacatcgccttcaccatggtgttcagcctggagtgcgtgctgaaggtgatcgccttcggcttcctgaactacttcagagacacctggaacatcttcgacttcatcaccgtgatcggcagcatcaccgagatcatcctgaccgacagcaagctggtgaacaccagcggcttcaacatgagcttcctgaagctgttcagagccgccagactgatcaagctgctgagacagggctacaccatcagaatcctgctgtggaccttcgtgcagagcttcaaggccctgccctacgtgtgcctgctgatcgccatgctgttcttcatctacgccatcatcggcatgcaggtgttcggcaacatcaagctggacgaggagagccacatcaacagacacaacaacttcagaagcttcttcggcagcctgatgctgctgttcagaagcgccaccggcgaggcctggcaggagatcatgctgagctgcctgggcgagaagggctgcgagcccgacaccaccgcccccagcggccagaacgagaacgagagatgcggcaccgacctggcctacgtgtacttcgtgagcttcatcttcttctgcagcttcctgatgctgaacctgttcgtggccgtgatcatggacaacttcgagtacctgaccagagacagcagcatcctgggcccccaccacctggacgagttcgtgagagtgtgggccgagtacgacagagccgcctgcggcagaatccactacaccgagatgtacgagatgctgaccctgatgagcccccccctgggcctgggcaagagatgccccagcaaggtggcctacaagagactggtgctgatgaacatgcccgtggccgaggacatgaccgtgcacttcaccagcaccctgatggccctgatcagaaccgccctggacatcaagatcgccaagggcggcgccgacagacagcagctggacagcgagctgcagaaggagaccctggccatctggccccacctgagccagaagatgctggacctgctggtgcccatgcccaaggccagcgacctgaccgtgggcaagatctacgccgccatgatgatcatggactactacaagcagagcaaggtgaagaagcagagacagcagctggaggagcagaagaacgcccccatgttccagagaatggagcccagcagcctgccccaggagatcatcgccaacgccaaggccctgccctacctgcagcaggaccccgtgagcggcctgagcggcagaagcggctaccccagcatgagccccctgagcccccaggacatcttccagctggcctgcatggaccccgccgacgacggccagttccaggagagacagagcctggagcccgaggtgagcgagctgaagagcgtgcagcccagcaaccacggcatctacctgcccagcgacacccaggagcacgccggcagcggcagagccagcagcatgcccagactgaccgtggacccccaggtggtgaccgaccccagcagcatgagaagaagcttcagcaccatcagagacaagagaagcaacagcagctggctggaggagttcagcatggagagaagcagcgagaacacctacaagagcagaagaagaagctaccacagcagcctgagactgagcgcccacagactgaacagcgacagcggccacaagagcgacacccacagaagcggcggcagagagagaggcagaagcaaggagagaaagcacctgctgagccccgacgtgagcagatgcaacagcgaggagagaggcacccaggccgactgggagagccccgagagaagacagagcagaagccccagcgagggcagaagccagacccccaacagacagggcaccggcagcctgagcgagagcagcatccccagcgtgagcgacaccagcacccccagaagaagcagaagacagctgccccccgtgccccccaagcccagacccctgctgagctacagcagcctgatcagacacgccggcagcatcagcccccccgccgacggcagcgaggagggcagccccctgaccagccaggccctggagagcaacaacgcctgcctgaccgagagcagcaacagcccccacccccagcagagccagcacgccagcccccagagatacatcagcgagccctacctggccctgcacgaggacagccacgccagcgactgcggcgaggaggagaccctgaccttcgaggccgccgtggccaccagcctgggcagaagcaacaccatcggcagcgccccccccctgagacacagctggcagatgcccaacggccactacagaagaagaagaagaggcggccccggccccggcatgatgtgcggcgccgtgaacaacctgctgagcgacaccgaggaggacgacaagtgctag

SEQ ID NO: 75066 - DNA, 6609 bp, synthetic construct
  misc_feature 1..6609: note = Description of Artificial Sequence: Synthetic coding sequence
  source 1..6609: mol_type = other DNA
atggccctgtacaaccccatccccgtgagacagaactgcttcaccgtgaacagaagcctgttcatcttcggcgaggacaacatcgtgagaaagtacgccaagaagctgatcgactggccccccttcgagtacatgatcctggccaccatcatcgccaactgcatcgtgctggccctggagcagcacctgcccgaggacgacaagacccccatgagcagaagactggagaagaccgagccctacttcatcggcatcttctgcttcgaggccggcatcaagatcgtggccctgggcttcatcttccacaagggcagctacctgagaaacggctggaacgtgatggacttcatcgtggtgctgagcggcatcctggccaccgccggcacccacttcaacacccacgtggacctgagaaccctgagagccgtgagagtgctgagacccctgaagctggtgagcggcatccccagcctgcagatcgtgctgaagagcatcatgaaggccatggtgcccctgctgcagatcggcctgctgctgttcttcgccatcctgatgttcgccatcatcggcctggagttctacagcggcaagctgcacagagcctgcttcatgaacaacagcggcatcctggagggcttcgaccccccccacccctgcggcgtgcagggctgccccgccggctacgagtgcaaggactggatcggccccaacgacggcatcacccagttcgacaacatcctgttcgccgtgctgaccgtgttccagtgcatcaccatggagggctggaccaccgtgctgtacaacaccaacgacgccctgggcgccacctggaactggctgtacttcatccccctgatcatcatcggcagcttcttcgtgctgaacctggtgctgggcgtgctgagcggcgagttcgccaaggagagagagagagtggagaacagaagagccttcatgaagctgagaagacagcagcagatcgagagagagctgaacggctacagagcctggatcgacaaggccgaggaggtgatgctggccgaggagaacaagaacgccggcaccagcgccctggaggtgctgagaagagccaccatcaagagaagcagaaccgaggccatgaccagagacagcagcgacgagcactgcgtggacatcagcagcgtgggcacccccctggccagagccagcatcaagagcgccaaggtggacggcgtgagctacttcagacacaaggagagactgctgagaatcagcatcagacacatggtgaagagccaggtgttctactggatcgtgctgagcctggtggccctgaacaccgcctgcgtggccatcgtgcaccacaaccagccccagtggctgacccacctgctgtactacgccgagttcctgttcctgggcctgttcctgctggagatgagcctgaagatgtacggcatgggccccagactgtacttccacagcagcttcaactgcttcgacttcggcgtgaccgtgggcagcatcttcgaggtggtgtgggccatcttcagacccggcaccagcttcggcatcagcgtgctgagagccctgagactgctgagaatcttcaagatcaccaagtactgggccagcctgagaaacctggtggtgagcctgatgagcagcatgaagagcatcatcagcctgctgttcctgctgttcctgttcatcgtggtgttcgccctgctgggcatgcagctgttcggcggcagattcaacttcaacgacggcacccccagcgccaacttcgacaccttccccgccgccatcatgaccgtgttccagatcctgaccggcgaggactggaacgaggtgatgtacaacggcatcagaagccagggcggcgtgagcagcggcatgtggagcgccatctacttcatcgtgctgaccctgttcggcaactacaccctgctgaacgtgttcctggccatcgccgtggacaacctggccaacgcccaggagctgaccaaggacgagcaggaggaggaggaggccttcaaccagaagcacgccctgcagaaggccaaggaggtgagccccatgagcgcccccaacatgcccagcatcgagagagagagaagaagaagacaccacatgagcgtgtgggagcagagaaccagccagctgagaaagcacatgcagatgagcagccaggaggccctgaacagagaggaggcccccaccatgaaccccctgaaccccctgaaccccctgagcagcctgaaccccctgaacgcccaccccagcctgtacagaagacccagagccatcgagggcctggccctgggcctggccctggagaagttcgaggaggagagaatcagcagaggcggcagcctgaagggcgacggcggcgacagaagcagcgccctggacaaccagagaacccccctgagcctgggccagagagagcccccctggctggccagaccctgccacggcaactgcgaccccacccagcaggaggccggcggcggcgaggccgtggtgaccttcgaggacagagccagacacagacagagccagagaagaagcagacacagaagagtgagaaccgagggcaaggagagcagcagcgccagcagaagcagaagcgccagccaggagagaagcctggacgaggccatgcccaccgagggcgagaaggaccacgagctgagaggcaaccacggcgccaaggagcccaccatccaggaggagagagcccaggacctgagaagaaccaacagcctgatggtgagcagaggcagcggcctggccggcggcctggacgaggccgacacccccctggtgctgccccaccccgagctggaggtgggcaagcacgtggtgctgaccgagcaggagcccgagggcagcagcgagcaggccctgctgggcaacgtgcagctggacatgggcagagtgatcagccagagcgagcccgacctgagctgcatcaccgccaacaccgacaaggccaccaccgagagcaccagcgtgaccgtggccatccccgacgtggaccccctggtggacagcaccgtggtgcacatcagcaacaagaccgacggcgaggccagccccctgaaggaggccgagatcagagaggacgaggaggaggtggagaagaagaagcagaagaaggagaagagagagaccggcaaggccatggtgccccacagcagcatgttcatcttcagcaccaccaaccccatcagaagagcctgccactacatcgtgaacctgagatacttcgagatgtgcatcctgctggtgatcgccgccagcagcatcgccctggccgccgaggaccccgtgctgaccaacagcgagagaaacaaggtgctgagatacttcgactacgtgttcaccggcgtgttcaccttcgagatggtgatcaagatgatcgaccagggcctgatcctgcaggacggcagctacttcagagacctgtggaacatcctggacttcgtggtggtggtgggcgccctggtggccttcgccctggccaacagcatgaagaccaacaagggcagagacatcaagaccatcaagagcctgagagtgctgagagtgctgagacccctgaagaccatcaagagactgcccaagctgaaggccgtgttcgactgcgtggtgaccagcctgaagaacgtgttcaacatcctgatcgtgtacaagctgttcatgttcatcttcgccgtgatcgccgtgcagctgttcaagggcaagttcttctactgcaccgacagcagcaaggacaccgagaaggagtgcatcggcaactacgtggaccacgagaagaacaagatggaggtgaagggcagagagtggaagagacacgagttccactacgacaacatcatctgggccctgctgaccctgttcaccgtgagcaccggcgagggctggccccaggtgctgcagcacagcgtggacgtgaccgaggaggacagaggccccagcagaagcaacagaatggagatgagcatcttctacgtggtgtacttcgtggtgttccccttcttcttcgtgaacatcttcgtggccctgatcatcatcaccttccaggagcagggcgacaagatgatggaggagtgcagcctggagaagaacgagagagcctgcatcgacttcgccatcagcgccaagcccctgaccagatacatgccccagaacagacacaccttccagtacagagtgtggcacttcgtggtgagccccagcttcgagtacaccatcatggccatgatcgccctgaacaccgtggtgctgatgatgaagtactacagcgccccctgcacctacgagctggccctgaagtacctgaacatcgccttcaccatggtgttcagcctggagtgcgtgctgaaggtgatcgccttcggcttcctgaactacttcagagacacctggaacatcttcgacttcatcaccgtgatcggcagcatcaccgagatcatcctgaccgacagcaagctggtgaacaccagcggcttcaacatgagcttcctgaagctgttcagagccgccagactgatcaagctgctgagacagggctacaccatcagaatcctgctgtggaccttcgtgcagagcttcaaggccctgccctacgtgtgcctgctgatcgccatgctgttcttcatctacgccatcatcggcatgcaggtgttcggcaacatcaagctggacgaggagagccacatcaacagacacaacaacttcagaagcttcttcggcagcctgatgctgctgttcagaagcgccaccggcgaggcctggcaggagatcatgctgagctgcctgggcgagaagggctgcgagcccgacaccaccgcccccagcggccagaacgagaacgagagatgcggcaccgacctggcctacgtgtacttcgtgagcttcatcttcttctgcagcttcctgatgctgaacctgttcgtggccgtgatcatggacaacttcgagtacctgaccagagacagcagcatcctgggcccccaccacctggacgagttcgtgagagtgtgggccgagtacgacagagccgcctgcggcagaatcccctacaaggacatgtacaagctggtgagagtgatcagcccccccctgggcctgggcgagaactgcccctacagagtggcctgcaagagactggtgctgatgaacatgcccgtggccgaggacatgaccgtgcacttcaccagcaccctgatggccctgatcagaaccgccctggacatcaagatcgccaagggcggcgccgacagacagcagctggacagcgagctgcagaaggagaccctggccatctggccccacctgagccagaagatgctggacctgctggtgcccatgcccaaggccagcgacctgaccgtgggcaagatctacgccgccatgatgatcatggactactacaagcagagcaaggtgaagaagcagagacagcagctggaggagcagaagaacgcccccatgttccagagaatggagcccagcagcctgccccaggagatcatcgccaacgccaaggccctgccctacctgcagcaggaccccgtgagcggcctgagcggcagaagcggctaccccagcatgagccccctgagcccccaggacatcttccagctggcctgcatggaccccgccgacgacggccagttccaggagagacagagcctggtggtgaccgaccccagcagcatgagaagaagcttcagcaccatcagagacaagagaagcaacagcagctggctggaggagttcagcatggagagaagcagcgagaacacctacaagagcagaagaagaagctaccacagcagcctgagactgagcgcccacagactgaacagcgacagcggccacaagagcgacacccacagaagcggcggcagagagagaggcagaagcaaggagagaaagcacctgctgagccccgacgtgagcagatgcaacagcgaggagagaggcacccaggccgactgggagagccccgagagaagacagagcagaagccccagcgagggcagaagccagacccccaacagacagggcaccggcagcctgagcgagagcagcatccccagcgtgagcgacaccagcacccccagaagaagcagaagacagctgccccccgtgccccccaagcccagacccctgctgagctacagcagcctgatcagacacgccggcagcatcagcccccccgccgacggcagcgaggagggcagccccctgaccagccaggccctggagagcaacaacgcctgcctgaccgagagcagcaacagcccccacccccagcagagccagcacgccagcccccagagatacatcagcgagccctacctggccctgcacgaggacagccacgccagcgactgcggcgaggaggagaccctgaccttcgaggccgccgtggccaccagcctgggcagaagcaacaccatcggcagcgccccccccctgagacacagctggcagatgcccaacggccactacagaagaagaagaagaggcggccccggccccggcatgatgtgcggcgccgtgaacaacctgctgagcgacaccgaggaggacgacaagtgctag

SEQ ID NO: 75067 - DNA, 6885 bp, synthetic construct
  misc_feature 1..6885: note = Description of Artificial Sequence: Synthetic coding sequence
  source 1..6885: mol_type = other DNA
atggccagattcggcgaggccgtggtggccagacccggcagcggcgacggcgacagcgaccagagcagaaacagacagggcacccccgtgcccgccagcggccaggccgccgcctacaagcagaccaaggcccagagagccagaaccatggccctgtacaaccccatccccgtgagacagaactgcttcaccgtgaacagaagcctgttcatcttcggcgaggacaacatcgtgagaaagtacgccaagaagctgatcgactggccccccttcgagtacatgatcctggccaccatcatcgccaactgcatcgtgctggccctggagcagcacctgcccgaggacgacaagacccccatgagcagaagactggagaagaccgagccctacttcatcggcatcttctgcttcgaggccggcatcaagatcgtggccctgggcttcatcttccacaagggcagctacctgagaaacggctggaacgtgatggacttcatcgtggtgctgagcggcatcctggccaccgccggcacccacttcaacacccacgtggacctgagaaccctgagagccgtgagagtgctgagacccctgaagctggtgagcggcatccccagcctgcagatcgtgctgaagagcatcatgaaggccatggtgcccctgctgcagatcggcctgctgctgttcttcgccatcctgatgttcgccatcatcggcctggagttctacagcggcaagctgcacagagcctgcttcatgaacaacagcggcatcctggagggcttcgaccccccccacccctgcggcgtgcagggctgccccgccggctacgagtgcaaggactggatcggccccaacgacggcatcacccagttcgacaacatcctgttcgccgtgctgaccgtgttccagtgcatcaccatggagggctggaccaccgtgctgtacaacaccaacgacgccctgggcgccacctggaactggctgtacttcatccccctgatcatcatcggcagcttcttcgtgctgaacctggtgctgggcgtgctgagcggcgagttcgccaaggagagagagagagtggagaacagaagagccttcatgaagctgagaagacagcagcagatcgagagagagctgaacggctacagagcctggatcgacaaggccgaggaggtgatgctggccgaggagaacaagaacgccggcaccagcgccctggaggtgctgagaagagccaccatcaagagaagcagaaccgaggccatgaccagagacagcagcgacgagcactgcgtggacatcagcagcgtgggcacccccctggccagagccagcatcaagagcgccaaggtggacggcgtgagctacttcagacacaaggagagactgctgagaatcagcatcagacacatggtgaagagccaggtgttctactggatcgtgctgagcctggtggccctgaacaccgcctgcgtggccatcgtgcaccacaaccagccccagtggctgacccacctgctgtactacgccgagttcctgttcctgggcctgttcctgctggagatgagcctgaagatgtacggcatgggccccagactgtacttccacagcagcttcaactgcttcgacttcggcgtgaccgtgggcagcatcttcgaggtggtgtgggccatcttcagacccggcaccagcttcggcatcagcgtgctgagagccctgagactgctgagaatcttcaagatcaccaagtactgggccagcctgagaaacctggtggtgagcctgatgagcagcatgaagagcatcatcagcctgctgttcctgctgttcctgttcatcgtggtgttcgccctgctgggcatgcagctgttcggcggcagattcaacttcaacgacggcacccccagcgccaacttcgacaccttccccgccgccatcatgaccgtgttccagatcctgaccggcgaggactggaacgaggtgatgtacaacggcatcagaagccagggcggcgtgagcagcggcatgtggagcgccatctacttcatcgtgctgaccctgttcggcaactacaccctgctgaacgtgttcctggccatcgccgtggacaacctggccaacgcccaggagctgaccaaggacgagcaggaggaggaggaggccttcaaccagaagcacgccctgcagaaggccaaggaggtgagccccatgagcgcccccaacatgcccagcatcgagagagagagaagaagaagacaccacatgagcgtgtgggagcagagaaccagccagctgagaaagcacatgcagatgagcagccaggaggccctgaacagagaggaggcccccaccatgaaccccctgaaccccctgaaccccctgagcagcctgaaccccctgaacgcccaccccagcctgtacagaagacccagagccatcgagggcctggccctgggcctggccctggagaagttcgaggaggagagaatcagcagaggcggcagcctgaagggcgacggcggcgacagaagcagcgccctggacaaccagagaacccccctgagcctgggccagagagagcccccctggctggccagaccctgccacggcaactgcgaccccacccagcaggaggccggcggcggcgaggccgtggtgaccttcgaggacagagccagacacagacagagccagagaagaagcagacacagaagagtgagaaccgagggcaaggagagcagcagcgccagcagaagcagaagcgccagccaggagagaagcctggacgaggccatgcccaccgagggcgagaaggaccacgagctgagaggcaaccacggcgccaaggagcccaccatccaggaggagagagcccaggacctgagaagaaccaacagcctgatggtgagcagaggcagcggcctggccggcggcctggacgaggccgacacccccctggtgctgccccaccccgagctggaggtgggcaagcacgtggtgctgaccgagcaggagcccgagggcagcagcgagcaggccctgctgggcaacgtgcagctggacatgggcagagtgatcagccagagcgagcccgacctgagctgcatcaccgccaacaccgacaaggccaccaccgagagcaccagcgtgaccgtggccatccccgacgtggaccccctggtggacagcaccgtggtgcacatcagcaacaagaccgacggcgaggccagccccctgaaggaggccgagatcagagaggacgaggaggaggtggagaagaagaagcagaagaaggagaagagagagaccggcaaggccatggtgccccacagcagcatgttcatcttcagcaccaccaaccccatcagaagagcctgccactacatcgtgaacctgagatacttcgagatgtgcatcctgctggtgatcgccgccagcagcatcgccctggccgccgaggaccccgtgctgaccaacagcgagagaaacaaggtgctgagatacttcgactacgtgttcaccggcgtgttcaccttcgagatggtgatcaagatgatcgaccagggcctgatcctgcaggacggcagctacttcagagacctgtggaacatcctggacttcgtggtggtggtgggcgccctggtggccttcgccctggccaacgccctgggcaccaacaagggcagagacatcaagaccatcaagagcctgagagtgctgagagtgctgagacccctgaagaccatcaagagactgcccaagctgaaggccgtgttcgactgcgtggtgaccagcctgaagaacgtgttcaacatcctgatcgtgtacaagctgttcatgttcatcttcgccgtgatcgccgtgcagctgttcaagggcaagttcttctactgcaccgacagcagcaaggacaccgagaaggagtgcatcggcaactacgtggaccacgagaagaacaagatggaggtgaagggcagagagtggaagagacacgagttccactacgacaacatcatctgggccctgctgaccctgttcaccgtgagcaccggcgagggctggccccaggtgctgcagcacagcgtggacgtgaccgaggaggacagaggccccagcagaagcaacagaatggagatgagcatcttctacgtggtgtacttcgtggtgttccccttcttcttcgtgaacatcttcgtggccctgatcatcatcaccttccaggagcagggcgacaagatgatggaggagtgcagcctggagaagaacgagagagcctgcatcgacttcgccatcagcgccaagcccctgaccagatacatgccccagaacagacacaccttccagtacagagtgtggcacttcgtggtgagccccagcttcgagtacaccatcatggccatgatcgccctgaacaccgtggtgctgatgatgaagtactacagcgccccctgcacctacgagctggccctgaagtacctgaacatcgccttcaccatggtgttcagcctggagtgcgtgctgaaggtgatcgccttcggcttcctgaactacttcagagacacctggaacatcttcgacttcatcaccgtgatcggcagcatcaccgagatcatcctgaccgacagcaagctggtgaacaccagcggcttcaacatgagcttcctgaagctgttcagagccgccagactgatcaagctgctgagacagggctacaccatcagaatcctgctgtggaccttcgtgcagagcttcaaggccctgccctacgtgtgcctgctgatcgccatgctgttcttcatctacgccatcatcggcatgcaggtgttcggcaacatcaagctggacgaggagagccacatcaacagacacaacaacttcagaagcttcttcggcagcctgatgctgctgttcagaagcgccaccggcgaggcctggcaggagatcatgctgagctgcctgggcgagaagggctgcgagcccgacaccaccgcccccagcggccagaacgagaacgagagatgcggcaccgacctggcctacgtgtacttcgtgagcttcatcttcttctgcagcttcctgatgctgaacctgttcgtggccgtgatcatggacaacttcgagtacctgaccagagacagcagcatcctgggcccccaccacctggacgagttcgtgagagtgtgggccgagtacgacagagccgcctgcggcagaatccactacaccgagatgtacgagatgctgaccctgatgagcccccccctgggcctgggcaagagatgccccagcaaggtggcctacaagagactggtgctgatgaacatgcccgtggccgaggacatgaccgtgcacttcaccagcaccctgatggccctgatcagaaccgccctggacatcaagatcgccaagggcggcgccgacagacagcagctggacagcgagctgcagaaggagaccctggccatctggccccacctgagccagaagatgctggacctgctggtgcccatgcccaaggccagcgacctgaccgtgggcaagatctacgccgccatgatgatcatggactactacaagcagagcaaggtgaagaagcagagacagcagctggaggagcagaagaacgcccccatgttccagagaatggagcccagcagcctgccccaggagatcatcgccaacgccaaggccctgccctacctgcagcaggaccccgtgagcggcctgagcggcagaagcggctaccccagcatgagccccctgagcccccaggacatcttccagctggcctgcatggaccccgccgacgacggccagttccaggagagacagagcctggagcccgaggtgagcgagctgaagagcgtgcagcccagcaaccacggcatctacctgcccagcgacacccaggagcacgccggcagcggcagagccagcagcatgcccagactgaccgtggacccccaggtggtgaccgaccccagcagcatgagaagaagcttcagcaccatcagagacaagagaagcaacagcagctggctggaggagttcagcatggagagaagcagcgagaacacctacaagagcagaagaagaagctaccacagcagcctgagactgagcgcccacagactgaacagcgacagcggccacaagagcgacacccacagaagcggcggcagagagagaggcagaagcaaggagagaaagcacctgctgagccccgacgtgagcagatgcaacagcgaggagagaggcacccaggccgactgggagagccccgagagaagacagagcagaagccccagcgagggcagaagccagacccccaacagacagggcaccggcagcctgagcgagagcagcatccccagcgtgagcgacaccagcacccccagaagaagcagaagacagctgccccccgtgccccccaagcccagacccctgctgagctacagcagcctgatcagacacgccggcagcatcagcccccccgccgacggcagcgaggagggcagccccctgaccagccaggccctggagagcaacaacgcctgcctgaccgagagcagcaacagcccccacccccagcagagccagcacgccagcccccagagatacatcagcgagccctacctggccctgcacgaggacagccacgccagcgactgcggcgaggaggagaccctgaccttcgaggccgccgtggccaccagcctgggcagaagcaacaccatcggcagcgccccccccctgagacacagctggcagatgcccaacggccactacagaagaagaagaagaggcggccccggccccggcatgatgtgcggcgccgtgaacaacctgctgagcgacaccgaggaggacgacaagtgctag

SEQ ID NO: 75068 - DNA, 5634 bp, synthetic construct
  misc_feature 1..5634: note = Description of Artificial Sequence: Synthetic coding sequence
  source 1..5634: mol_type = other DNA
atgctggccgaggagaacaagaacgccggcaccagcgccctggaggtgctgagaagagccaccatcaagagaagcagaaccgaggccatgaccagagacagcagcgacgagcactgcgtggacatcagcagcgtgggcacccccctggccagagccagcatcaagagcgccaaggtggacggcgtgagctacttcagacacaaggagagactgctgagaatcagcatcagacacatggtgaagagccaggtgttctactggatcgtgctgagcctggtggccctgaacaccgcctgcgtggccatcgtgcaccacaaccagccccagtggctgacccacctgctgtactacgccgagttcctgttcctgggcctgttcctgctggagatgagcctgaagatgtacggcatgggccccagactgtacttccacagcagcttcaactgcttcgacttcggcgtgaccgtgggcagcatcttcgaggtggtgtgggccatcttcagacccggcaccagcttcggcatcagcgtgctgagagccctgagactgctgagaatcttcaagatcaccaagtactgggccagcctgagaaacctggtggtgagcctgatgagcagcatgaagagcatcatcagcctgctgttcctgctgttcctgttcatcgtggtgttcgccctgctgggcatgcagctgttcggcggcagattcaacttcaacgacggcacccccagcgccaacttcgacaccttccccgccgccatcatgaccgtgttccagatcctgaccggcgaggactggaacgaggtgatgtacaacggcatcagaagccagggcggcgtgagcagcggcatgtggagcgccatctacttcatcgtgctgaccctgttcggcaactacaccctgctgaacgtgttcctggccatcgccgtggacaacctggccaacgcccaggagctgaccaaggacgagcaggaggaggaggaggccttcaaccagaagcacgccctgcagaaggccaaggaggtgagccccatgagcgcccccaacatgcccagcatcgagagagacagaagaagaagacaccacatgagcatgtgggagcccagaagcagccacctgagagagagaagaagaagacaccacatgagcgtgtgggagcagagaaccagccagctgagaaagcacatgcagatgagcagccaggaggccctgaacagagaggaggcccccaccatgaaccccctgaaccccctgaaccccctgagcagcctgaaccccctgaacgcccaccccagcctgtacagaagacccagagccatcgagggcctggccctgggcctggccctggagaagttcgaggaggagagaatcagcagaggcggcagcctgaagggcgacggcggcgacagaagcagcgccctggacaaccagagaacccccctgagcctgggccagagagagcccccctggctggccagaccctgccacggcaactgcgaccccacccagcaggaggccggcggcggcgaggccgtggtgaccttcgaggacagagccagacacagacagagccagagaagaagcagacacagaagagtgagaaccgagggcaaggagagcagcagcgccagcagaagcagaagcgccagccaggagagaagcctggacgaggccatgcccaccgagggcgagaaggaccacgagctgagaggcaaccacggcgccaaggagcccaccatccaggaggagagagcccaggacctgagaagaaccaacagcctgatggtgagcagaggcagcggcctggccggcggcctggacgaggccgacacccccctggtgctgccccaccccgagctggaggtgggcaagcacgtggtgctgaccgagcaggagcccgagggcagcagcgagcaggccctgctgggcaacgtgcagctggacatgggcagagtgatcagccagagcgagcccgacctgagctgcatcaccgccaacaccgacaaggccaccaccgagagcaccagcgtgaccgtggccatccccgacgtggaccccctggtggacagcaccgtggtgcacatcagcaacaagaccgacggcgaggccagccccctgaaggaggccgagatcagagaggacgaggaggaggtggagaagaagaagcagaagaaggagaagagagagaccggcaaggccatggtgccccacagcagcatgttcatcttcagcaccaccaaccccatcagaagagcctgccactacatcgtgaacctgagatacttcgagatgtgcatcctgctggtgatcgccgccagcagcatcgccctggccgccgaggaccccgtgctgaccaacagcgagagaaacaaggtgctgagatacttcgactacgtgttcaccggcgtgttcaccttcgagatggtgatcaagatgatcgaccagggcctgatcctgcaggacggcagctacttcagagacctgtggaacatcctggacttcgtggtggtggtgggcgccctggtggccttcgccctggccatgagcctggagaccaacaagggcagagacatcaagaccatcaagagcctgagagtgctgagagtgctgagacccctgaagaccatcaagagactgcccaagctgaaggccgtgttcgactgcgtggtgaccagcctgaagaacgtgttcaacatcctgatcgtgtacaagctgttcatgttcatcttcgccgtgatcgccgtgcagctgttcaagggcaagttcttctactgcaccgacagcagcaaggacaccgagaaggagtgcatcggcaactacgtggaccacgagaagaacaagatggaggtgaagggcagagagtggaagagacacgagttccactacgacaacatcatctgggccctgctgaccctgttcaccgtgagcaccggcgagggctggccccaggtgctgcagcacagcgtggacgtgaccgaggaggacagaggccccagcagaagcaacagaatggagatgagcatcttctacgtggtgtacttcgtggtgttccccttcttcttcgtgaacatcttcgtggccctgatcatcatcaccttccaggagcagggcgacaagatgatggaggagtgcagcctggagaagaacgagagagcctgcatcgacttcgccatcagcgccaagcccctgaccagatacatgccccagaacagacacaccttccagtacagagtgtggcacttcgtggtgagccccagcttcgagtacaccatcatggccatgatcgccctgaacaccgtggtgctgatgatgaagtactacagcgccccctgcacctacgagctggccctgaagtacctgaacatcgccttcaccatggtgttcagcctggagtgcgtgctgaaggtgatcgccttcggcttcctgaactacttcagagacacctggaacatcttcgacttcatcaccgtgatcggcagcatcaccgagatcatcctgaccgacagcaagctggtgaacaccagcggcttcaacatgagcttcctgaagctgttcagagccgccagactgatcaagctgctgagacagggctacaccatcagaatcctgctgtggaccttcgtgcagagcttcaaggccctgccctacgtgtgcctgctgatcgccatgctgttcttcatctacgccatcatcggcatgcaggtgttcggcaacatcaagctggacgaggagagccacatcaacagacacaacaacttcagaagcttcttcggcagcctgatgctgctgttcagaagcgccaccggcgaggcctggcaggagatcatgctgagctgcctgggcgagaagggctgcgagcccgacaccaccgcccccagcggccagaacgagaacgagagatgcggcaccgacctggcctacgtgtacttcgtgagcttcatcttcttctgcagcttcctgatgctgaacctgttcgtggccgtgatcatggacaacttcgagtacctgaccagagacagcagcatcctgggcccccaccacctggacgagttcgtgagagtgtgggccgagtacgacagagccgcctgcggcagaatccactacaccgagatgtacgagatgctgaccctgatgagcccccccctgggcctgggcaagagatgccccagcaaggtggcctacaagagactggtgctgatgaacatgcccgtggccgaggacatgaccgtgcacttcaccagcaccctgatggccctgatcagaaccgccctggacatcaagatcgccaagggcggcgccgacagacagcagctggacagcgagctgcagaaggagaccctggccatctggccccacctgagccagaagatgctggacctgctggtgcccatgcccaaggccagcgacctgaccgtgggcaagatctacgccgccatgatgatcatggactactacaagcagagcaaggtgaagaagcagagacagcagctggaggagcagaagaacgcccccatgttccagagaatggagcccagcagcctgccccaggagatcatcgccaacgccaaggccctgccctacctgcagcaggaccccgtgagcggcctgagcggcagaagcggctaccccagcatgagccccctgagcccccaggacatcttccagctggcctgcatggaccccgccgacgacggccagttccaggagagacagagcctggtggtgaccgaccccagcagcatgagaagaagcttcagcaccatcagagacaagagaagcaacagcagctggctggaggagttcagcatggagagaagcagcgagaacacctacaagagcagaagaagaagctaccacagcagcctgagactgagcgcccacagactgaacagcgacagcggccacaagagcgacacccacagaagcggcggcagagagagaggcagaagcaaggagagaaagcacctgctgagccccgacgtgagcagatgcaacagcgaggagagaggcacccaggccgactgggagagccccgagagaagacagagcagaagccccagcgagggcagaagccagacccccaacagacagggcaccggcagcctgagcgagagcagcatccccagcgtgagcgacaccagcacccccagaagaagcagaagacagctgccccccgtgccccccaagcccagacccctgctgagctacagcagcctgatcagacacgccggcagcatcagcccccccgccgacggcagcgaggagggcagccccctgaccagccaggccctggagagcaacaacgcctgcctgaccgagagcagcaacagcccccacccccagcagagccagcacgccagcccccagagatacatcagcgagccctacctggccctgcacgaggacagccacgccagcgactgcggcgaggaggagaccctgaccttcgaggccgccgtggccaccagcctgggcagaagcaacaccatcggcagcgccccccccctgagacacagctggcagatgcccaacggccactacagaagaagaagaagaggcggccccggccccggcatgatgtgcggcgccgtgaacaacctgctgagcgacaccgaggaggacgacaagtgctag

SEQ ID NO: 75069 - DNA, 6813 bp, synthetic construct
  misc_feature 1..6813: note = Description of Artificial Sequence: Synthetic coding sequence
  source 1..6813: mol_type = other DNA
atggccagattcggcgaggccgtggtggccagacccggcagcggcgacggcgacagcgaccagagcagaaacagacagggcacccccgtgcccgccagcggccaggccgccgcctacaagcagaccaaggcccagagagccagaaccatggccctgtacaaccccatccccgtgagacagaactgcttcaccgtgaacagaagcctgttcatcttcggcgaggacaacatcgtgagaaagtacgccaagaagctgatcgactggccccccttcgagtacatgatcctggccaccatcatcgccaactgcatcgtgctggccctggagcagcacctgcccgaggacgacaagacccccatgagcagaagactggagaagaccgagccctacttcatcggcatcttctgcttcgaggccggcatcaagatcgtggccctgggcttcatcttccacaagggcagctacctgagaaacggctggaacgtgatggacttcatcgtggtgctgagcggcatcctggccaccgccggcacccacttcaacacccacgtggacctgagaaccctgagagccgtgagagtgctgagacccctgaagctggtgagcggcatccccagcctgcagatcgtgctgaagagcatcatgaaggccatggtgcccctgctgcagatcggcctgctgctgttcttcgccatcctgatgttcgccatcatcggcctggagttctacagcggcaagctgcacagagcctgcttcatgaacaacagcggcatcctggagggcttcgaccccccccacccctgcggcgtgcagggctgccccgccggctacgagtgcaaggactggatcggccccaacgacggcatcacccagttcgacaacatcctgttcgccgtgctgaccgtgttccagtgcatcaccatggagggctggaccaccgtgctgtacaacaccaacgacgccctgggcgccacctggaactggctgtacttcatccccctgatcatcatcggcagcttcttcgtgctgaacctggtgctgggcgtgctgagcggcgagttcgccaaggagagagagagagtggagaacagaagagccttcatgaagctgagaagacagcagcagatcgagagagagctgaacggctacagagcctggatcgacaaggccgaggaggtgatgctggccgaggagaacaagaacgccggcaccagcgccctggaggtgctgagaagagccaccatcaagagaagcagaaccgaggccatgaccagagacagcagcgacgagcactgcgtggacatcagcagcgtgggcacccccctggccagagccagcatcaagagcgccaaggtggacggcgtgagctacttcagacacaaggagagactgctgagaatcagcatcagacacatggtgaagagccaggtgttctactggatcgtgctgagcctggtggccctgaacaccgcctgcgtggccatcgtgcaccacaaccagccccagtggctgacccacctgctgtactacgccgagttcctgttcctgggcctgttcctgctggagatgagcctgaagatgtacggcatgggccccagactgtacttccacagcagcttcaactgcttcgacttcggcgtgaccgtgggcagcatcttcgaggtggtgtgggccatcttcagacccggcaccagcttcggcatcagcgtgctgagagccctgagactgctgagaatcttcaagatcaccaagtactgggccagcctgagaaacctggtggtgagcctgatgagcagcatgaagagcatcatcagcctgctgttcctgctgttcctgttcatcgtggtgttcgccctgctgggcatgcagctgttcggcggcagattcaacttcaacgacggcacccccagcgccaacttcgacaccttccccgccgccatcatgaccgtgttccagatcctgaccggcgaggactggaacgaggtgatgtacaacggcatcagaagccagggcggcgtgagcagcggcatgtggagcgccatctacttcatcgtgctgaccctgttcggcaactacaccctgctgaacgtgttcctggccatcgccgtggacaacctggccaacgcccaggagctgaccaaggacgagcaggaggaggaggaggccttcaaccagaagcacgccctgcagaaggccaaggaggtgagccccatgagcgcccccaacatgcccagcatcgagagagacagaagaagaagacaccacatgagcatgtgggagcccagaagcagccacctgagagagagaagaagaagacaccacatgagcgtgtgggagcagagaaccagccagctgagaaagcacatgcagatgagcagccaggaggccctgaacagagaggaggcccccaccatgaaccccctgaaccccctgaaccccctgagcagcctgaaccccctgaacgcccaccccagcctgtacagaagacccagagccatcgagggcctggccctgggcctggccctggagaagttcgaggaggagagaatcagcagaggcggcagcctgaagggcgacggcggcgacagaagcagcgccctggacaaccagagaacccccctgagcctgggccagagagagcccccctggctggccagaccctgccacggcaactgcgaccccacccagcaggaggccggcggcggcgaggccgtggtgaccttcgaggacagagccagacacagacagagccagagaagaagcagacacagaagagtgagaaccgagggcaaggagagcagcagcgccagcagaagcagaagcgccagccaggagagaagcctggacgaggccatgcccaccgagggcgagaaggaccacgagctgagaggcaaccacggcgccaaggagcccaccatccaggaggagagagcccaggacctgagaagaaccaacagcctgatggtgagcagaggcagcggcctggccggcggcctggacgaggccgacacccccctggtgctgccccaccccgagctggaggtgggcaagcacgtggtgctgaccgagcaggagcccgagggcagcagcgagcaggccctgctgggcaacgtgcagctggacatgggcagagtgatcagccagagcgagcccgacctgagctgcatcaccgccaacaccgacaaggccaccaccgagagcaccagcgtgaccgtggccatccccgacgtggaccccctggtggacagcaccgtggtgcacatcagcaacaagaccgacggcgaggccagccccctgaaggaggccgagatcagagaggacgaggaggaggtggagaagaagaagcagaagaaggagaagagagagaccggcaaggccatggtgccccacagcagcatgttcatcttcagcaccaccaaccccatcagaagagcctgccactacatcgtgaacctgagatacttcgagatgtgcatcctgctggtgatcgccgccagcagcatcgccctggccgccgaggaccccgtgctgaccaacagcgagagaaacaaggtgctgagatacttcgactacgtgttcaccggcgtgttcaccttcgagatggtgatcaagatgatcgaccagggcctgatcctgcaggacggcagctacttcagagacctgtggaacatcctggacttcgtggtggtggtgggcgccctggtggccttcgccctggccaacgccctgggcaccaacaagggcagagacatcaagaccatcaagagcctgagagtgctgagagtgctgagacccctgaagaccatcaagagactgcccaagctgaaggccgtgttcgactgcgtggtgaccagcctgaagaacgtgttcaacatcctgatcgtgtacaagctgttcatgttcatcttcgccgtgatcgccgtgcagctgttcaagggcaagttcttctactgcaccgacagcagcaaggacaccgagaaggagtgcatcggcaactacgtggaccacgagaagaacaagatggaggtgaagggcagagagtggaagagacacgagttccactacgacaacatcatctgggccctgctgaccctgttcaccgtgagcaccggcgagggctggccccaggtgctgcagcacagcgtggacgtgaccgaggaggacagaggccccagcagaagcaacagaatggagatgagcatcttctacgtggtgtacttcgtggtgttccccttcttcttcgtgaacatcttcgtggccctgatcatcatcaccttccaggagcagggcgacaagatgatggaggagtgcagcctggagaagaacgagagagcctgcatcgacttcgccatcagcgccaagcccctgaccagatacatgccccagaacagacacaccttccagtacagagtgtggcacttcgtggtgagccccagcttcgagtacaccatcatggccatgatcgccctgaacaccgtggtgctgatgatgaagtactacagcgccccctgcacctacgagctggccctgaagtacctgaacatcgccttcaccatggtgttcagcctggagtgcgtgctgaaggtgatcgccttcggcttcctgaactacttcagagacacctggaacatcttcgacttcatcaccgtgatcggcagcatcaccgagatcatcctgaccgacagcaagctggtgaacaccagcggcttcaacatgagcttcctgaagctgttcagagccgccagactgatcaagctgctgagacagggctacaccatcagaatcctgctgtggaccttcgtgcagagcttcaaggccctgccctacgtgtgcctgctgatcgccatgctgttcttcatctacgccatcatcggcatgcaggtgttcggcaacatcaagctggacgaggagagccacatcaacagacacaacaacttcagaagcttcttcggcagcctgatgctgctgttcagaagcgccaccggcgaggcctggcaggagatcatgctgagctgcctgggcgagaagggctgcgagcccgacaccaccgcccccagcggccagaacgagaacgagagatgcggcaccgacctggcctacgtgtacttcgtgagcttcatcttcttctgcagcttcctgatgctgaacctgttcgtggccgtgatcatggacaacttcgagtacctgaccagagacagcagcatcctgggcccccaccacctggacgagttcgtgagagtgtgggccgagtacgacagagccgcctgcggcagaatccactacaccgagatgtacgagatgctgaccctgatgagcccccccctgggcctgggcaagagatgccccagcaaggtggcctacaagagactggtgctgatgaacatgcccgtggccgaggacatgaccgtgcacttcaccagcaccctgatggccctgatcagaaccgccctggacatcaagatcgccaagggcggcgccgacagacagcagctggacagcgagctgcagaaggagaccctggccatctggccccacctgagccagaagatgctggacctgctggtgcccatgcccaaggccagcgacctgaccgtgggcaagatctacgccgccatgatgatcatggactactacaagcagagcaaggtgaagaagcagagacagcagctggaggagcagaagaacgcccccatgttccagagaatggagcccagcagcctgccccaggagatcatcgccaacgccaaggccctgccctacctgcagcaggaccccgtgagcggcctgagcggcagaagcggctaccccagcatgagccccctgagcccccaggacatcttccagctggcctgcatggaccccgccgacgacggccagttccaggagagacagagcctggtggtgaccgaccccagcagcatgagaagaagcttcagcaccatcagagacaagagaagcaacagcagctggctggaggagttcagcatggagagaagcagcgagaacacctacaagagcagaagaagaagctaccacagcagcctgagactgagcgcccacagactgaacagcgacagcggccacaagagcgacacccacagaagcggcggcagagagagaggcagaagcaaggagagaaagcacctgctgagccccgacgtgagcagatgcaacagcgaggagagaggcacccaggccgactgggagagccccgagagaagacagagcagaagccccagcgagggcagaagccagacccccaacagacagggcaccggcagcctgagcgagagcagcatccccagcgtgagcgacaccagcacccccagaagaagcagaagacagctgccccccgtgccccccaagcccagacccctgctgagctacagcagcctgatcagacacgccggcagcatcagcccccccgccgacggcagcgaggagggcagccccctgaccagccaggccctggagagcaacaacgcctgcctgaccgagagcagcaacagcccccacccccagcagagccagcacgccagcccccagagatacatcagcgagccctacctggccctgcacgaggacagccacgccagcgactgcggcgaggaggagaccctgaccttcgaggccgccgtggccaccagcctgggcagaagcaacaccatcggcagcgccccccccctgagacacagctggcagatgcccaacggccactacagaagaagaagaagaggcggccccggccccggcatgatgtgcggcgccgtgaacaacctgctgagcgacaccgaggaggacgacaagtgctag

SEQ ID NO: 75070 - DNA, 6942 bp, synthetic construct
  misc_feature 1..6942: note = Description of Artificial Sequence: Synthetic coding sequence
  source 1..6942: mol_type = other DNA
atggccagattcggcgaggccgtggtggccagacccggcagcggcgacggcgacagcgaccagagcagaaacagacagggcacccccgtgcccgccagcggccaggccgccgcctacaagcagaccaaggcccagagagccagaaccatggccctgtacaaccccatccccgtgagacagaactgcttcaccgtgaacagaagcctgttcatcttcggcgaggacaacatcgtgagaaagtacgccaagaagctgatcgactggccccccttcgagtacatgatcctggccaccatcatcgccaactgcatcgtgctggccctggagcagcacctgcccgaggacgacaagacccccatgagcagaagactggagaagaccgagccctacttcatcggcatcttctgcttcgaggccggcatcaagatcgtggccctgggcttcatcttccacaagggcagctacctgagaaacggctggaacgtgatggacttcatcgtggtgctgagcggcatcctggccaccgccggcacccacttcaacacccacgtggacctgagaaccctgagagccgtgagagtgctgagacccctgaagctggtgagcggcatccccagcctgcagatcgtgctgaagagcatcatgaaggccatggtgcccctgctgcagatcggcctgctgctgttcttcgccatcctgatgttcgccatcatcggcctggagttctacagcggcaagctgcacagagcctgcttcatgaacaacagcggcatcctggagggcttcgaccccccccacccctgcggcgtgcagggctgccccgccggctacgagtgcaaggactggatcggccccaacgacggcatcacccagttcgacaacatcctgttcgccgtgctgaccgtgttccagtgcatcaccatggagggctggaccaccgtgctgtacaacaccaacgacgccctgggcgccacctggaactggctgtacttcatccccctgatcatcatcggcagcttcttcgtgctgaacctggtgctgggcgtgctgagcggcgagttcgccaaggagagagagagagtggagaacagaagagccttcatgaagctgagaagacagcagcagatcgagagagagctgaacggctacagagcctggatcgacaaggccgaggaggtgatgctggccgaggagaacaagaacgccggcaccagcgccctggaggtgctgagaagagccaccatcaagagaagcagaaccgaggccatgaccagagacagcagcgacgagcactgcgtggacatcagcagcgtgggcacccccctggccagagccagcatcaagagcgccaaggtggacggcgtgagctacttcagacacaaggagagactgctgagaatcagcatcagacacatggtgaagagccaggtgttctactggatcgtgctgagcctggtggccctgaacaccgcctgcgtggccatcgtgcaccacaaccagccccagtggctgacccacctgctgtactacgccgagttcctgttcctgggcctgttcctgctggagatgagcctgaagatgtacggcatgggccccagactgtacttccacagcagcttcaactgcttcgacttcggcgtgaccgtgggcagcatcttcgaggtggtgtgggccatcttcagacccggcaccagcttcggcatcagcgtgctgagagccctgagactgctgagaatcttcaagatcaccaagtactgggccagcctgagaaacctggtggtgagcctgatgagcagcatgaagagcatcatcagcctgctgttcctgctgttcctgttcatcgtggtgttcgccctgctgggcatgcagctgttcggcggcagattcaacttcaacgacggcacccccagcgccaacttcgacaccttccccgccgccatcatgaccgtgttccagatcctgaccggcgaggactggaacgaggtgatgtacaacggcatcagaagccagggcggcgtgagcagcggcatgtggagcgccatctacttcatcgtgctgaccctgttcggcaactacaccctgctgaacgtgttcctggccatcgccgtggacaacctggccaacgcccaggagctgaccaaggacgagcaggaggaggaggaggccttcaaccagaagcacgccctgcagaaggccaaggaggtgagccccatgagcgcccccaacatgcccagcatcgagagagacagaagaagaagacaccacatgagcatgtgggagcccagaagcagccacctgagagagagaagaagaagacaccacatgagcgtgtgggagcagagaaccagccagctgagaaagcacatgcagatgagcagccaggaggccctgaacagagaggaggcccccaccatgaaccccctgaaccccctgaaccccctgagcagcctgaaccccctgaacgcccaccccagcctgtacagaagacccagagccatcgagggcctggccctgggcctggccctggagaagttcgaggaggagagaatcagcagaggcggcagcctgaagggcgacggcggcgacagaagcagcgccctggacaaccagagaacccccctgagcctgggccagagagagcccccctggctggccagaccctgccacggcaactgcgaccccacccagcaggaggccggcggcggcgaggccgtggtgaccttcgaggacagagccagacacagacagagccagagaagaagcagacacagaagagtgagaaccgagggcaaggagagcagcagcgccagcagaagcagaagcgccagccaggagagaagcctggacgaggccatgcccaccgagggcgagaaggaccacgagctgagaggcaaccacggcgccaaggagcccaccatccaggaggagagagcccaggacctgagaagaaccaacagcctgatggtgagcagaggcagcggcctggccggcggcctggacgaggccgacacccccctggtgctgccccaccccgagctggaggtgggcaagcacgtggtgctgaccgagcaggagcccgagggcagcagcgagcaggccctgctgggcaacgtgcagctggacatgggcagagtgatcagccagagcgagcccgacctgagctgcatcaccgccaacaccgacaaggccaccaccgagagcaccagcgtgaccgtggccatccccgacgtggaccccctggtggacagcaccgtggtgcacatcagcaacaagaccgacggcgaggccagccccctgaaggaggccgagatcagagaggacgaggaggaggtggagaagaagaagcagaagaaggagaagagagagaccggcaaggccatggtgccccacagcagcatgttcatcttcagcaccaccaaccccatcagaagagcctgccactacatcgtgaacctgagatacttcgagatgtgcatcctgctggtgatcgccgccagcagcatcgccctggccgccgaggaccccgtgctgaccaacagcgagagaaacaaggtgctgagatacttcgactacgtgttcaccggcgtgttcaccttcgagatggtgatcaagatgatcgaccagggcctgatcctgcaggacggcagctacttcagagacctgtggaacatcctggacttcgtggtggtggtgggcgccctggtggccttcgccctggccaacgccctgggcaccaacaagggcagagacatcaagaccatcaagagcctgagagtgctgagagtgctgagacccctgaagaccatcaagagactgcccaagctgaaggccgtgttcgactgcgtggtgaccagcctgaagaacgtgttcaacatcctgatcgtgtacaagctgttcatgttcatcttcgccgtgatcgccgtgcagctgttcaagggcaagttcttctactgcaccgacagcagcaaggacaccgagaaggagtgcatcggcaactacgtggaccacgagaagaacaagatggaggtgaagggcagagagtggaagagacacgagttccactacgacaacatcatctgggccctgctgaccctgttcaccgtgagcaccggcgagggctggccccaggtgctgcagcacagcgtggacgtgaccgaggaggacagaggccccagcagaagcaacagaatggagatgagcatcttctacgtggtgtacttcgtggtgttccccttcttcttcgtgaacatcttcgtggccctgatcatcatcaccttccaggagcagggcgacaagatgatggaggagtgcagcctggagaagaacgagagagcctgcatcgacttcgccatcagcgccaagcccctgaccagatacatgccccagaacagacacaccttccagtacagagtgtggcacttcgtggtgagccccagcttcgagtacaccatcatggccatgatcgccctgaacaccgtggtgctgatgatgaagtactacagcgccccctgcacctacgagctggccctgaagtacctgaacatcgccttcaccatggtgttcagcctggagtgcgtgctgaaggtgatcgccttcggcttcctgaactacttcagagacacctggaacatcttcgacttcatcaccgtgatcggcagcatcaccgagatcatcctgaccgacagcaagctggtgaacaccagcggcttcaacatgagcttcctgaagctgttcagagccgccagactgatcaagctgctgagacagggctacaccatcagaatcctgctgtggaccttcgtgcagagcttcaaggccctgccctacgtgtgcctgctgatcgccatgctgttcttcatctacgccatcatcggcatgcaggtgttcggcaacatcaagctggacgaggagagccacatcaacagacacaacaacttcagaagcttcttcggcagcctgatgctgctgttcagaagcgccaccggcgaggcctggcaggagatcatgctgagctgcctgggcgagaagggctgcgagcccgacaccaccgcccccagcggccagaacgagaacgagagatgcggcaccgacctggcctacgtgtacttcgtgagcttcatcttcttctgcagcttcctgatgctgaacctgttcgtggccgtgatcatggacaacttcgagtacctgaccagagacagcagcatcctgggcccccaccacctggacgagttcgtgagagtgtgggccgagtacgacagagccgcctgcggcagaatccactacaccgagatgtacgagatgctgaccctgatgagcccccccctgggcctgggcaagagatgccccagcaaggtggcctacaagagactggtgctgatgaacatgcccgtggccgaggacatgaccgtgcacttcaccagcaccctgatggccctgatcagaaccgccctggacatcaagatcgccaagggcggcgccgacagacagcagctggacagcgagctgcagaaggagaccctggccatctggccccacctgagccagaagatgctggacctgctggtgcccatgcccaaggccagcgacctgaccgtgggcaagatctacgccgccatgatgatcatggactactacaagcagagcaaggtgaagaagcagagacagcagctggaggagcagaagaacgcccccatgttccagagaatggagcccagcagcctgccccaggagatcatcgccaacgccaaggccctgccctacctgcagcaggaccccgtgagcggcctgagcggcagaagcggctaccccagcatgagccccctgagcccccaggacatcttccagctggcctgcatggaccccgccgacgacggccagttccaggagagacagagcctggagcccgaggtgagcgagctgaagagcgtgcagcccagcaaccacggcatctacctgcccagcgacacccaggagcacgccggcagcggcagagccagcagcatgcccagactgaccgtggacccccaggtggtgaccgaccccagcagcatgagaagaagcttcagcaccatcagagacaagagaagcaacagcagctggctggaggagttcagcatggagagaagcagcgagaacacctacaagagcagaagaagaagctaccacagcagcctgagactgagcgcccacagactgaacagcgacagcggccacaagagcgacacccacagaagcggcggcagagagagaggcagaagcaaggagagaaagcacctgctgagccccgacgtgagcagatgcaacagcgaggagagaggcacccaggccgactgggagagccccgagagaagacagagcagaagccccagcgagggcagaagccagacccccaacagacagggcaccggcagcctgagcgagagcagcatccccagcgtgagcgacaccagcacccccagaagaagcagaagacagctgccccccgtgccccccaagcccagacccctgctgagctacagcagcctgatcagacacgccggcagcatcagcccccccgccgacggcagcgaggagggcagccccctgaccagccaggccctggagagcaacaacgcctgcctgaccgagagcagcaacagcccccacccccagcagagccagcacgccagcccccagagatacatcagcgagccctacctggccctgcacgaggacagccacgccagcgactgcggcgaggaggagaccctgaccttcgaggccgccgtggccaccagcctgggcagaagcaacaccatcggcagcgccccccccctgagacacagctggcagatgcccaacggccactacagaagaagaagaagaggcggccccggccccggcatgatgtgcggcgccgtgaacaacctgctgagcgacaccgaggaggacgacaagtgctag

SEQ ID NO: 75071 - DNA, 1317 bp, synthetic construct
  misc_feature 1..1317: note = Description of Artificial Sequence: Synthetic coding sequence
  source 1..1317: mol_type = other DNA
atggccagattcggcgaggccgtggtggccagacccggcagcggcgacggcgacagcgaccagagcagaaacagacagggcacccccgtgcccgccagcggccaggccgccgcctacaagcagaccaaggcccagagagccagaaccatggccctgtacaaccccatccccgtgagacagaactgcttcaccgtgaacagaagcctgttcatcttcggcgaggacaacatcgtgagaaagtacgccaagaagctgatcgactggccccccttcgagtacatgatcctggccaccatcatcgccaactgcatcgtgctggccctggagcagcacctgcccgaggacgacaagacccccatgagcagaagactggagaagaccgagccctacttcatcggcatcttctgcttcgaggccggcatcaagatcgtggccctgggcttcatcttccacaagggcagctacctgagaaacggctggaacgtgatggacttcatcgtggtgctgagcggcatcctggccaccgccggcacccacttcaacacccacgtggacctgagaaccctgagagccgtgagagtgctgagacccctgaagctggtgagcggcatccccagcctgcagatcgtgctgaagagcatcatgaaggccatggtgcccctgctgcagatcggcctgctgctgttcttcgccatcctgatgttcgccatcatcggcctggagttctacagcggcaagctgcacagagcctgcttcatgaacaacagcggcatcctggagggcttcgaccccccccacccctgcggcgtgcagggctgccccgccggctacgagtgcaaggactggatcggccccaacgacggcatcacccagttcgacaacatcctgttcgccgtgctgaccgtgttccagtgcatcaccatggagggctggaccaccgtgctgtacaacaccaacgacgccctgggcgccacctggaactggctgtacttcatccccctgatcatcatcggcagcttcttcgtgctgaacctggtgctgggcgtgctgagcggcgagttcgccaaggagagagagagagtggagaacagaagagccttcatgaagctgagaagacagcagcagatcgagagagagctgaacggctacagagcctggatcgacaaggccgaggaggtgatgctggccgaggagaacaagaacgccggcaccagcgccctggaggtgctgagaagagccaccatcaagagaagcagaaccgaggccatgaccagagacagcagcgacgagcactgcgtggacatcagcagcgtgtag

SEQ ID NO: 75072 - DNA, 6756 bp, synthetic construct
  misc_feature 1..6756: note = Description of Artificial Sequence: Synthetic coding sequence
  source 1..6756: mol_type = other DNA
atggccagattcggcgaggccgtggtggccagacccggcagcggcgacggcgacagcgaccagagcagaaacagacagggcacccccgtgcccgccagcggccaggccgccgcctacaagcagaccaaggcccagagagccagaaccatggccctgtacaaccccatccccgtgagacagaactgcttcaccgtgaacagaagcctgttcatcttcggcgaggacaacatcgtgagaaagtacgccaagaagctgatcgactggccccccttcgagtacatgatcctggccaccatcatcgccaactgcatcgtgctggccctggagcagcacctgcccgaggacgacaagacccccatgagcagaagactggagaagaccgagccctacttcatcggcatcttctgcttcgaggccggcatcaagatcgtggccctgggcttcatcttccacaagggcagctacctgagaaacggctggaacgtgatggacttcatcgtggtgctgagcggcatcctggccaccgccggcacccacttcaacacccacgtggacctgagaaccctgagagccgtgagagtgctgagacccctgaagctggtgagcggcatccccagcctgcagatcgtgctgaagagcatcatgaaggccatggtgcccctgctgcagatcggcctgctgctgttcttcgccatcctgatgttcgccatcatcggcctggagttctacagcggcaagctgcacagagcctgcttcatgaacaacagcggcatcctggagggcttcgaccccccccacccctgcggcgtgcagggctgccccgccggctacgagtgcaaggactggatcggccccaacgacggcatcacccagttcgacaacatcctgttcgccgtgctgaccgtgttccagtgcatcaccatggagggctggaccaccgtgctgtacaacaccaacgacgccctgggcgccacctggaactggctgtacttcatccccctgatcatcatcggcagcttcttcgtgctgaacctggtgctgggcgtgctgagcggcgagttcgccaaggagagagagagagtggagaacagaagagccttcatgaagctgagaagacagcagcagatcgagagagagctgaacggctacagagcctggatcgacaaggccgaggaggtgatgctggccgaggagaacaagaacgccggcaccagcgccctggaggtgctgagaagagccaccatcaagagaagcagaaccgaggccatgaccagagacagcagcgacgagcactgcgtggacatcagcagcgtgggcacccccctggccagagccagcatcaagagcgccaaggtggacggcgtgagctacttcagacacaaggagagactgctgagaatcagcatcagacacatggtgaagagccaggtgttctactggatcgtgctgagcctggtggccctgaacaccgcctgcgtggccatcgtgcaccacaaccagccccagtggctgacccacctgctgtactacgccgagttcctgttcctgggcctgttcctgctggagatgagcctgaagatgtacggcatgggccccagactgtacttccacagcagcttcaactgcttcgacttcggcgtgaccgtgggcagcatcttcgaggtggtgtgggccatcttcagacccggcaccagcttcggcatcagcgtgctgagagccctgagactgctgagaatcttcaagatcaccaagtactgggccagcctgagaaacctggtggtgagcctgatgagcagcatgaagagcatcatcagcctgctgttcctgctgttcctgttcatcgtggtgttcgccctgctgggcatgcagctgttcggcggcagattcaacttcaacgacggcacccccagcgccaacttcgacaccttccccgccgccatcatgaccgtgttccagatcctgaccggcgaggactggaacgaggtgatgtacaacggcatcagaagccagggcggcgtgagcagcggcatgtggagcgccatctacttcatcgtgctgaccctgttcggcaactacaccctgctgaacgtgttcctggccatcgccgtggacaacctggccaacgcccaggagctgaccaaggacgagcaggaggaggaggaggccttcaaccagaagcacgccctgcagaaggccaaggaggtgagccccatgagcgcccccaacatgcccagcatcgagagagagagaagaagaagacaccacatgagcgtgtgggagcagagaaccagccagctgagaaagcacatgcagatgagcagccaggaggccctgaacagagaggaggcccccaccatgaaccccctgaaccccctgaaccccctgagcagcctgaaccccctgaacgcccaccccagcctgtacagaagacccagagccatcgagggcctggccctgggcctggccctggagaagttcgaggaggagagaatcagcagaggcggcagcctgaagggcgacggcggcgacagaagcagcgccctggacaaccagagaacccccctgagcctgggccagagagagcccccctggctggccagaccctgccacggcaactgcgaccccacccagcaggaggccggcggcggcgaggccgtggtgaccttcgaggacagagccagacacagacagagccagagaagaagcagacacagaagagtgagaaccgagggcaaggagagcagcagcgccagcagaagcagaagcgccagccaggagagaagcctggacgaggccatgcccaccgagggcgagaaggaccacgagctgagaggcaaccacggcgccaaggagcccaccatccaggaggagagagcccaggacctgagaagaaccaacagcctgatggtgagcagaggcagcggcctggccggcggcctggacgaggccgacacccccctggtgctgccccaccccgagctggaggtgggcaagcacgtggtgctgaccgagcaggagcccgagggcagcagcgagcaggccctgctgggcaacgtgcagctggacatgggcagagtgatcagccagagcgagcccgacctgagctgcatcaccgccaacaccgacaaggccaccaccgagagcaccagcgtgaccgtggccatccccgacgtggaccccctggtggacagcaccgtggtgcacatcagcaacaagaccgacggcgaggccagccccctgaaggaggccgagatcagagaggacgaggaggaggtggagaagaagaagcagaagaaggagaagagagagaccggcaaggccatggtgccccacagcagcatgttcatcttcagcaccaccaaccccatcagaagagcctgccactacatcgtgaacctgagatacttcgagatgtgcatcctgctggtgatcgccgccagcagcatcgccctggccgccgaggaccccgtgctgaccaacagcgagagaaacaaggtgctgagatacttcgactacgtgttcaccggcgtgttcaccttcgagatggtgatcaagatgatcgaccagggcctgatcctgcaggacggcagctacttcagagacctgtggaacatcctggacttcgtggtggtggtgggcgccctggtggccttcgccctggccaacgccctgggcaccaacaagggcagagacatcaagaccatcaagagcctgagagtgctgagagtgctgagacccctgaagaccatcaagagactgcccaagctgaaggccgtgttcgactgcgtggtgaccagcctgaagaacgtgttcaacatcctgatcgtgtacaagctgttcatgttcatcttcgccgtgatcgccgtgcagctgttcaagggcaagttcttctactgcaccgacagcagcaaggacaccgagaaggagtgcatcggcaactacgtggaccacgagaagaacaagatggaggtgaagggcagagagtggaagagacacgagttccactacgacaacatcatctgggccctgctgaccctgttcaccgtgagcaccggcgagggctggccccaggtgctgcagcacagcgtggacgtgaccgaggaggacagaggccccagcagaagcaacagaatggagatgagcatcttctacgtggtgtacttcgtggtgttccccttcttcttcgtgaacatcttcgtggccctgatcatcatcaccttccaggagcagggcgacaagatgatggaggagtgcagcctggagaagaacgagagagcctgcatcgacttcgccatcagcgccaagcccctgaccagatacatgccccagaacagacacaccttccagtacagagtgtggcacttcgtggtgagccccagcttcgagtacaccatcatggccatgatcgccctgaacaccgtggtgctgatgatgaagtactacagcgccccctgcacctacgagctggccctgaagtacctgaacatcgccttcaccatggtgttcagcctggagtgcgtgctgaaggtgatcgccttcggcttcctgaactacttcagagacacctggaacatcttcgacttcatcaccgtgatcggcagcatcaccgagatcatcctgaccgacagcaagctggtgaacaccagcggcttcaacatgagcttcctgaagctgttcagagccgccagactgatcaagctgctgagacagggctacaccatcagaatcctgctgtggaccttcgtgcagagcttcaaggccctgccctacgtgtgcctgctgatcgccatgctgttcttcatctacgccatcatcggcatgcaggtgttcggcaacatcaagctggacgaggagagccacatcaacagacacaacaacttcagaagcttcttcggcagcctgatgctgctgttcagaagcgccaccggcgaggcctggcaggagatcatgctgagctgcctgggcgagaagggctgcgagcccgacaccaccgcccccagcggccagaacgagaacgagagatgcggcaccgacctggcctacgtgtacttcgtgagcttcatcttcttctgcagcttcctgatgctgaacctgttcgtggccgtgatcatggacaacttcgagtacctgaccagagacagcagcatcctgggcccccaccacctggacgagttcgtgagagtgtgggccgagtacgacagagccgcctgcggcagaatccactacaccgagatgtacgagatgctgaccctgatgagcccccccctgggcctgggcaagagatgccccagcaaggtggcctacaagagactggtgctgatgaacatgcccgtggccgaggacatgaccgtgcacttcaccagcaccctgatggccctgatcagaaccgccctggacatcaagatcgccaagggcggcgccgacagacagcagctggacagcgagctgcagaaggagaccctggccatctggccccacctgagccagaagatgctggacctgctggtgcccatgcccaaggccagcgacctgaccgtgggcaagatctacgccgccatgatgatcatggactactacaagcagagcaaggtgaagaagcagagacagcagctggaggagcagaagaacgcccccatgttccagagaatggagcccagcagcctgccccaggagatcatcgccaacgccaaggccctgccctacctgcagcaggaccccgtgagcggcctgagcggcagaagcggctaccccagcatgagccccctgagcccccaggacatcttccagctggcctgcatggaccccgccgacgacggccagttccaggagagacagagcctggtggtgaccgaccccagcagcatgagaagaagcttcagcaccatcagagacaagagaagcaacagcagctggctggaggagttcagcatggagagaagcagcgagaacacctacaagagcagaagaagaagctaccacagcagcctgagactgagcgcccacagactgaacagcgacagcggccacaagagcgacacccacagaagcggcggcagagagagaggcagaagcaaggagagaaagcacctgctgagccccgacgtgagcagatgcaacagcgaggagagaggcacccaggccgactgggagagccccgagagaagacagagcagaagccccagcgagggcagaagccagacccccaacagacagggcaccggcagcctgagcgagagcagcatccccagcgtgagcgacaccagcacccccagaagaagcagaagacagctgccccccgtgccccccaagcccagacccctgctgagctacagcagcctgatcagacacgccggcagcatcagcccccccgccgacggcagcgaggagggcagccccctgaccagccaggccctggagagcaacaacgcctgcctgaccgagagcagcaacagcccccacccccagcagagccagcacgccagcccccagagatacatcagcgagccctacctggccctgcacgaggacagccacgccagcgactgcggcgaggaggagaccctgaccttcgaggccgccgtggccaccagcctgggcagaagcaacaccatcggcagcgccccccccctgagacacagctggcagatgcccaacggccactacagaagaagaagaagaggcggccccggccccggcatgatgtgcggcgccgtgaacaacctgctgagcgacaccgaggaggacgacaagtgctag

SEQ ID NO: 75073 - DNA, 7062 bp, synthetic construct
  misc_feature 1..7062: note = Description of Artificial Sequence: Synthetic coding sequence
  source 1..7062: mol_type = other DNA
atgaccgagggcgccagagccgccgacgaggtgagagtgcccctgggcgcccccccccccggccccgccgccctggtgggcgccagccccgagagccccggcgcccccggcagagaggccgagagaggcagcgagctgggcgtgagccccagcgagagccccgccgccgagagaggcgccgagctgggcgccgacgaggagcagagagtgccctaccccgccctggccgccaccgtgttcttctgcctgggccagaccaccagacccagaagctggtgcctgagactggtgtgcaacccctggttcgagcacgtgagcatgctggtgatcatgctgaactgcgtgaccctgggcatgttcagaccctgcgaggacgtggagtgcggcagcgagagatgcaacatcctggaggccttcgacgccttcatcttcgccttcttcgccgtggagatggtgatcaagatggtggccctgggcctgttcggccagaagtgctacctgggcgacacctggaacagactggacttcttcatcgtggtggccggcatgatggagtacagcctggacggccacaacgtgagcctgagcgccatcagaaccgtgagagtgctgagacccctgagagccatcaacagagtgcccagcatgagaatcctggtgaccctgctgctggacaccctgcccatgctgggcaacgtgctgctgctgtgcttcttcgtgttcttcatcttcggcatcgtgggcgtgcagctgtgggccggcctgctgagaaacagatgcttcctggacagcgccttcgtgagaaacaacaacctgaccttcctgagaccctactaccagaccgaggagggcgaggagaaccccttcatctgcagcagcagaagagacaacggcatgcagaagtgcagccacatccccggcagaagagagctgagaatgccctgcaccctgggctgggaggcctacacccagccccaggccgagggcgtgggcgccgccagaaacgcctgcatcaactggaaccagtactacaacgtgtgcagaagcggcgacagcaacccccacaacggcgccatcaacttcgacaacatcggctacgcctggatcgccatcttccaggtgatcaccctggagggctgggtggacatcatgtactacgtgatggacgcccacagcttctacaacttcatctacttcatcctgctgatcatcgtgggcagcttcttcatgatcaacctgtgcctggtggtgatcgccacccagttcagcgagaccaagcagagagagagccagctgatgagagagcagagagccagacacctgagcaacgacagcaccctggccagcttcagcgagcccggcagctgctacgaggagctgctgaagtacgtgggccacatcttcagaaaggtgaagagaagaagcctgagactgtacgccagatggcagagcagatggagaaagaaggtggaccccagcgccgtgcagggccagggccccggccacagacagagaagagccggcagacacaccgccagcgtgcaccacctggtgtaccaccaccaccaccaccaccaccaccactaccacttcagccacggcagccccagaagacccggccccgagcccggcgcctgcgacaccagactggtgagagccggcgccccccccagcccccccagccccggcagaggcccccccgacgccgagagcgtgcacagcatctaccacgccgactgccacatcgagggcccccaggagagagccagagtggcccacgccgccgccaccgccgccgccagcctgagactggccaccggcctgggcaccatgaactaccccaccatcctgcccagcggcgtgggcagcggcaagggcagcaccagccccggccccaagggcaagtgggccggcggcccccccggcaccggcggccacggccccctgagcctgaacagccccgacccctacgagaagatcccccacgtggtgggcgagcacggcctgggccaggcccccggccacctgagcggcctgagcgtgccctgccccctgcccagcccccccgccggcaccctgacctgcgagctgaagagctgcccctactgcaccagagccctggaggaccccgagggcgagctgagcggcagcgagagcggcgacagcgacggcagaggcgtgtacgagttcacccaggacgtgagacacggcgacagatgggaccccaccagaccccccagagccaccgacacccccggccccggccccggcagcccccagagaagagcccagcagagagccgcccccggcgagcccggctggatgggcagactgtgggtgaccttcagcggcaagctgagaagaatcgtggacagcaagtacttcagcagaggcatcatgatggccatcctggtgaacaccctgagcatgggcgtggagtaccacgagcagcccgaggagctgaccaacgccctggagatcagcaacatcgtgttcaccagcatgttcgccctggagatgctgctgaagctgctggcctgcggccccctgggctacatcagaaacccctacaacatcttcgacggcatcatcgtggtgatcagcgtgtgggagatcgtgggccaggccgacggcggcctgagcgtgctgagaaccttcagactgctgagagtgctgaagctggtgagattcctgcccgccctgagaagacagctggtggtgctggtgaagaccatggacaacgtggccaccttctgcaccctgctgatgctgttcatcttcatcttcagcatcctgggcatgcacctgttcggctgcaagttcagcctgaagaccgacaccggcgacaccgtgcccgacagaaagaacttcgacagcctgctgtgggccatcgtgaccgtgttccagatcctgacccaggaggactggaacgtggtgctgtacaacggcatggccagcaccagcagctgggccgccctgtacttcgtggccctgatgaccttcggcaactacgtgctgttcaacctgctggtggccatcctggtggagggcttccaggccgagggcgacgccaacagaagcgacaccgacgaggacaagaccagcgtgcacttcgaggaggacttccacaagctgagagagctgcagaccaccgagctgaagatgtgcagcctggccgtgacccccaacggccacctggagggcagaggcagcctgagcccccccctgatcatgtgcaccgccgccacccccatgcccacccccaagagcagccccttcctggacgccgcccccagcctgcccgacagcagaagaggcagcagcagcagcggcgacccccccctgggcgaccagaagccccccgccagcctgagaagcagcccctgcgccccctggggccccagcggcgcctggagcagcagaagaagcagctggagcagcctgggcagagcccccagcctgaagagaagaggccagtgcggcgagagagagagcctgctgagcggcgagggcaagggcagcaccgacgacgaggccgaggacggcagagccgcccccggccccagagccacccccctgagaagagccgagagcctggaccccagacccctgagacccgccgccctgccccccaccaagtgcagagacagagacggccaggtggtggccctgcccagcgacttcttcctgagaatcgacagccacagagaggacgccgccgagctggacgacgacagcgaggacagctgctgcctgagactgcacaaggtgctggagccctacaagccccagtggtgcagaagcagagaggcctgggccctgtacctgttcagcccccagaacagattcagagtgagctgccagaaggtgatcacccacaagatgttcgaccacgtggtgctggtgttcatcttcctgaactgcgtgaccatcgccctggagagacccgacatcgaccccggcagcaccgagagagtgttcctgagcgtgagcaactacatcttcaccgccatcttcgtggccgagatgatggtgaaggtggtggccctgggcctgctgagcggcgagcacgcctacctgcagagcagctggaacctgctggacggcctgctggtgctggtgagcctggtggacatcgtggtggccatggccagcgccggcggcgccaagatcctgggcgtgctgagagtgctgagactgctgagaaccctgagacccctgagagtgatcagcagagcccccggcctgaagctggtggtggagaccctgatcagcagcctgagacccatcggcaacatcgtgctgatctgctgcgccttcttcatcatcttcggcatcctgggcgtgcagctgttcaagggcaagttctactactgcgagggccccgacaccagaaacatcagcaccaaggcccagtgcagagccgcccactacagatgggtgagaagaaagtacaacttcgacaacctgggccaggccctgatgagcctgttcgtgctgagcagcaaggacggctgggtgaacatcatgtacgacggcctggacgccgtgggcgtggaccagcagcccgtgcagaaccacaacccctggatgctgctgtacttcatcagcttcctgctgatcgtgagcttcttcgtgctgaacatgttcgtgggcgtggtggtggagaacttccacaagtgcagacagcaccaggaggccgaggaggccagaagaagagaggagaagagactgagaagactggagagaagaagaagaagcaccttccccagccccgaggcccagagaagaccctactacgccgactacagccccaccagaagaagcatccacagcctgtgcaccagccactacctggacctgttcatcaccttcatcatctgcgtgaacgtgatcaccatgagcatggagcactacaaccagcccaagagcctggacgaggccctgaagtactgcaactacgtgttcaccatcgtgttcgtgttcgaggccgccctgaagctggtggccttcggcttcagaagattcttcaaggacagatggaaccagctggacctggccatcgtgctgctgagcctgatgggcatcaccctggaggagatcgagatgagcgccgccctgcccatcaaccccaccatcatcagaatcatgagagtgctgagaatcgccagagtgctgaagctgctgaagatggccaccggcatgagagccctgctggacaccgtggtgcaggccctgccccaggtgggcaacctgggcctgctgttcatgctgctgttcttcatctacgccgccctgggcgtggagctgttcggcagactggagtgcagcgaggacaacccctgcgagggcctgagcagacacgccaccttcagcaacttcggcatggccttcctgaccctgttcagagtgagcaccggcgacaactggaacggcatcatgaaggacaccctgagagagtgcagcagagaggacaagcactgcctgagctacctgcccgccctgagccccgtgtacttcgtgaccttcgtgctggtggcccagttcgtgctggtgaacgtggtggtggccgtgctgatgaagcacctggaggagagcaacaaggaggccagagaggacgccgagctggacgccgagatcgagctggagatggcccagggccccggcagcgccagaagagtggacgccgacagaccccccctgccccaggagagccccggcgccagagacgcccccaacctggtggccagaaaggtgagcgtgagcagaatgctgagcctgcccaacgacagctacatgttcagacccgtggtgcccgccagcgccccccaccccagacccctgcaggaggtggagatggagacctacggcgccggcacccccctgggcagcgtggccagcgtgcacagcccccccgccgagagctgcgccagcctgcagatccccctggccgtgagcagccccgccagaagcggcgagcccctgcacgccctgagccccagaggcaccgccagaagccccagcctgagcagactgctgtgcagacaggaggccgtgcacaccgacagcctggagggcaagatcgacagccccagagacaccctggaccccgccgagcccggcgagaagacccccgtgagacccgtgacccagggcggcagcctgcagagcccccccagaagccccagacccgccagcgtgagaaccagaaagcacaccttcggccagagatgcgtgagcagcagacccgccgcccccggcggcgaggaggccgaggccagcgaccccgccgacgaggaggtgagccacatcaccagcagcgcctgcccctggcagcccaccgccgagccccacggccccgaggccagccccgtggccggcggcgagagagacctgagaagactgtacagcgtggacgcccagggcttcctggacaagcccggcagagccgacgagcagtggagacccagcgccgagctgggcagcggcgagcccggcgaggccaaggcctggggccccgaggccgagcccgccctgggcgccagaagaaagaagaagatgagccccccctgcatcagcgtggagccccccgccgaggacgagggcagcgccagacccagcgccgccgagggcggcagcaccaccctgagaagaagaacccccagctgcgaggccaccccccacagagacagcctggagcccaccgagggcagcggcgccggcggcgaccccgccgccaagggcgagagatggggccaggccagctgcagagccgagcacctgaccgtgcccagcttcgccttcgagcccctggacctgggcgtgcccagcggcgaccccttcctggacggcagccacagcgtgacccccgagagcagagccagcagcagcggcgccatcgtgcccctggagccccccgagagcgagccccccatgcccgtgggcgacccccccgagaagagaagaggcctgtacctgaccgtgccccagtgccccctggagaagcccggcagccccagcgccacccccgcccccggcggcggcgccgacgaccccgtgtag

SEQ ID NO: 75074 - DNA, 7044 bp, synthetic construct
  misc_feature 1..7044: note = Description of Artificial Sequence: Synthetic coding sequence
  source 1..7044: mol_type = other DNA
atgaccgagggcgccagagccgccgacgaggtgagagtgcccctgggcgcccccccccccggccccgccgccctggtgggcgccagccccgagagccccggcgcccccggcagagaggccgagagaggcagcgagctgggcgtgagccccagcgagagccccgccgccgagagaggcgccgagctgggcgccgacgaggagcagagagtgccctaccccgccctggccgccaccgtgttcttctgcctgggccagaccaccagacccagaagctggtgcctgagactggtgtgcaacccctggttcgagcacgtgagcatgctggtgatcatgctgaactgcgtgaccctgggcatgttcagaccctgcgaggacgtggagtgcggcagcgagagatgcaacatcctggaggccttcgacgccttcatcttcgccttcttcgccgtggagatggtgatcaagatggtggccctgggcctgttcggccagaagtgctacctgggcgacacctggaacagactggacttcttcatcgtggtggccggcatgatggagtacagcctggacggccacaacgtgagcctgagcgccatcagaaccgtgagagtgctgagacccctgagagccatcaacagagtgcccagcatgagaatcctggtgaccctgctgctggacaccctgcccatgctgggcaacgtgctgctgctgtgcttcttcgtgttcttcatcttcggcatcgtgggcgtgcagctgtgggccggcctgctgagaaacagatgcttcctggacagcgccttcgtgagaaacaacaacctgaccttcctgagaccctactaccagaccgaggagggcgaggagaaccccttcatctgcagcagcagaagagacaacggcatgcagaagtgcagccacatccccggcagaagagagctgagaatgccctgcaccctgggctgggaggcctacacccagccccaggccgagggcgtgggcgccgccagaaacgcctgcatcaactggaaccagtactacaacgtgtgcagaagcggcgacagcaacccccacaacggcgccatcaacttcgacaacatcggctacgcctggatcgccatcttccaggtgatcaccctggagggctgggtggacatcatgtactacgtgatggacgcccacagcttctacaacttcatctacttcatcctgctgatcatcgtgggcagcttcttcatgatcaacctgtgcctggtggtgatcgccacccagttcagcgagaccaagcagagagagagccagctgatgagagagcagagagccagacacctgagcaacgacagcaccctggccagcttcagcgagcccggcagctgctacgaggagctgctgaagtacgtgggccacatcttcagaaaggtgaagagaagaagcctgagactgtacgccagatggcagagcagatggagaaagaaggtggaccccagcgccgtgcagggccagggccccggccacagacagagaagagccggcagacacaccgccagcgtgcaccacctggtgtaccaccaccaccaccaccaccaccaccactaccacttcagccacggcagccccagaagacccggccccgagcccggcgcctgcgacaccagactggtgagagccggcgccccccccagcccccccagccccggcagaggcccccccgacgccgagagcgtgcacagcatctaccacgccgactgccacatcgagggcccccaggagagagccagagtggcccacgccgccgccaccgccgccgccagcctgagactggccaccggcctgggcaccatgaactaccccaccatcctgcccagcggcgtgggcagcggcaagggcagcaccagccccggccccaagggcaagtgggccggcggcccccccggcaccggcggccacggccccctgagcctgaacagccccgacccctacgagaagatcccccacgtggtgggcgagcacggcctgggccaggcccccggccacctgagcggcctgagcgtgccctgccccctgcccagcccccccgccggcaccctgacctgcgagctgaagagctgcccctactgcaccagagccctggaggaccccgagggcgagctgagcggcagcgagagcggcgacagcgacggcagaggcgtgtacgagttcacccaggacgtgagacacggcgacagatgggaccccaccagaccccccagagccaccgacacccccggccccggccccggcagcccccagagaagagcccagcagagagccgcccccggcgagcccggctggatgggcagactgtgggtgaccttcagcggcaagctgagaagaatcgtggacagcaagtacttcagcagaggcatcatgatggccatcctggtgaacaccctgagcatgggcgtggagtaccacgagcagcccgaggagctgaccaacgccctggagatcagcaacatcgtgttcaccagcatgttcgccctggagatgctgctgaagctgctggcctgcggccccctgggctacatcagaaacccctacaacatcttcgacggcatcatcgtggtgatcagcgtgtgggagatcgtgggccaggccgacggcggcctgagcgtgctgagaaccttcagactgctgagagtgctgaagctggtgagattcctgcccgccctgagaagacagctggtggtgctggtgaagaccatggacaacgtggccaccttctgcaccctgctgatgctgttcatcttcatcttcagcatcctgggcatgcacctgttcggctgcaagttcagcctgaagaccgacaccggcgacaccgtgcccgacagaaagaacttcgacagcctgctgtgggccatcgtgaccgtgttccagatcctgacccaggaggactggaacgtggtgctgtacaacggcatggccagcaccagcagctgggccgccctgtacttcgtggccctgatgaccttcggcaactacgtgctgttcaacctgctggtggccatcctggtggagggcttccaggccgagggcgacgccaacagaagcgacaccgacgaggacaagaccagcgtgcacttcgaggaggacttccacaagctgagagagctgcagaccaccgagctgaagatgtgcagcctggccgtgacccccaacggccacctggagggcagaggcagcctgagcccccccctgatcatgtgcaccgccgccacccccatgcccacccccaagagcagccccttcctggacgccgcccccagcctgcccgacagcagaagaggcagcagcagcagcggcgacccccccctgggcgaccagaagccccccgccagcctgagaagcagcccctgcgccccctggggccccagcggcgcctggagcagcagaagaagcagctggagcagcctgggcagagcccccagcctgaagagaagaggccagtgcggcgagagagagagcctgctgagcggcgagggcaagggcagcaccgacgacgaggccgaggacggcagagccgcccccggccccagagccacccccctgagaagagccgagagcctggaccccagacccctgagacccgccgccctgccccccaccaagtgcagagacagagacggccaggtggtggccctgcccagcgacttcttcctgagaatcgacagccacagagaggacgccgccgagctggacgacgacagcgaggacagctgctgcctgagactgcacaaggtgctggagccctacaagccccagtggtgcagaagcagagaggcctgggccctgtacctgttcagcccccagaacagattcagagtgagctgccagaaggtgatcacccacaagatgttcgaccacgtggtgctggtgttcatcttcctgaactgcgtgaccatcgccctggagagacccgacatcgaccccggcagcaccgagagagtgttcctgagcgtgagcaactacatcttcaccgccatcttcgtggccgagatgatggtgaaggtggtggccctgggcctgctgagcggcgagcacgcctacctgcagagcagctggaacctgctggacggcctgctggtgctggtgagcctggtggacatcgtggtggccatggccagcgccggcggcgccaagatcctgggcgtgctgagagtgctgagactgctgagaaccctgagacccctgagagtgatcagcagagcccccggcctgaagctggtggtggagaccctgatcagcagcctgagacccatcggcaacatcgtgctgatctgctgcgccttcttcatcatcttcggcatcctgggcgtgcagctgttcaagggcaagttctactactgcgagggccccgacaccagaaacatcagcaccaaggcccagtgcagagccgcccactacagatgggtgagaagaaagtacaacttcgacaacctgggccaggccctgatgagcctgttcgtgctgagcagcaaggacggctgggtgaacatcatgtacgacggcctggacgccgtgggcgtggaccagcagcccgtgcagaaccacaacccctggatgctgctgtacttcatcagcttcctgctgatcgtgagcttcttcgtgctgaacatgttcgtgggcgtggtggtggagaacttccacaagtgcagacagcaccaggaggccgaggaggccagaagaagagaggagaagagactgagaagactggagagaagaagaagaaaggcccagagaagaccctactacgccgactacagccccaccagaagaagcatccacagcctgtgcaccagccactacctggacctgttcatcaccttcatcatctgcgtgaacgtgatcaccatgagcatggagcactacaaccagcccaagagcctggacgaggccctgaagtactgcaactacgtgttcaccatcgtgttcgtgttcgaggccgccctgaagctggtggccttcggcttcagaagattcttcaaggacagatggaaccagctggacctggccatcgtgctgctgagcctgatgggcatcaccctggaggagatcgagatgagcgccgccctgcccatcaaccccaccatcatcagaatcatgagagtgctgagaatcgccagagtgctgaagctgctgaagatggccaccggcatgagagccctgctggacaccgtggtgcaggccctgccccaggtgggcaacctgggcctgctgttcatgctgctgttcttcatctacgccgccctgggcgtggagctgttcggcagactggagtgcagcgaggacaacccctgcgagggcctgagcagacacgccaccttcagcaacttcggcatggccttcctgaccctgttcagagtgagcaccggcgacaactggaacggcatcatgaaggacaccctgagagagtgcagcagagaggacaagcactgcctgagctacctgcccgccctgagccccgtgtacttcgtgaccttcgtgctggtggcccagttcgtgctggtgaacgtggtggtggccgtgctgatgaagcacctggaggagagcaacaaggaggccagagaggacgccgagctggacgccgagatcgagctggagatggcccagggccccggcagcgccagaagagtggacgccgacagaccccccctgccccaggagagccccggcgccagagacgcccccaacctggtggccagaaaggtgagcgtgagcagaatgctgagcctgcccaacgacagctacatgttcagacccgtggtgcccgccagcgccccccaccccagacccctgcaggaggtggagatggagacctacggcgccggcacccccctgggcagcgtggccagcgtgcacagcccccccgccgagagctgcgccagcctgcagatccccctggccgtgagcagccccgccagaagcggcgagcccctgcacgccctgagccccagaggcaccgccagaagccccagcctgagcagactgctgtgcagacaggaggccgtgcacaccgacagcctggagggcaagatcgacagccccagagacaccctggaccccgccgagcccggcgagaagacccccgtgagacccgtgacccagggcggcagcctgcagagcccccccagaagccccagacccgccagcgtgagaaccagaaagcacaccttcggccagagatgcgtgagcagcagacccgccgcccccggcggcgaggaggccgaggccagcgaccccgccgacgaggaggtgagccacatcaccagcagcgcctgcccctggcagcccaccgccgagccccacggccccgaggccagccccgtggccggcggcgagagagacctgagaagactgtacagcgtggacgcccagggcttcctggacaagcccggcagagccgacgagcagtggagacccagcgccgagctgggcagcggcgagcccggcgaggccaaggcctggggccccgaggccgagcccgccctgggcgccagaagaaagaagaagatgagccccccctgcatcagcgtggagccccccgccgaggacgagggcagcgccagacccagcgccgccgagggcggcagcaccaccctgagaagaagaacccccagctgcgaggccaccccccacagagacagcctggagcccaccgagggcagcggcgccggcggcgaccccgccgccaagggcgagagatggggccaggccagctgcagagccgagcacctgaccgtgcccagcttcgccttcgagcccctggacctgggcgtgcccagcggcgaccccttcctggacggcagccacagcgtgacccccgagagcagagccagcagcagcggcgccatcgtgcccctggagccccccgagagcgagccccccatgcccgtgggcgacccccccgagaagagaagaggcctgtacctgaccgtgccccagtgccccctggagaagcccggcagccccagcgccacccccgcccccggcggcggcgccgacgaccccgtgtag

SEQ ID NO: 75075 - DNA, 6690 bp, synthetic construct
  misc_feature 1..6690: note = Description of Artificial Sequence: Synthetic coding sequence
  source 1..6690: mol_type = other DNA
atggccgagagcgccagcccccccagcagcagcgccgccgcccccgccgccgagcccggcgtgaccaccgagcagcccggccccagaagcccccccagcagcccccccggcctggaggagcccctggacggcgccgacccccacgtgccccaccccgacctggcccccatcgccttcttctgcctgagacagaccaccagccccagaaactggtgcatcaagatggccaccggcccctggtggtggtgcctgtgcatgctggtgatcctgctgaactgcgtgaccctgggcatgtaccagccctgcgacgacatggactgcctgagcgacagatgcaagatcctgcaggtgttcgacgacttcatcttcatcttcttcgccatggagatggtgctgaagatggtggccctgggcatcttcggcaagaagtgctacctgggcgacacctggaacagactggacttcttcatcgtgatggccggcatggtggagtacagcctggacctgcagaacatcaacctgagcgccatcagaaccgtgagagtgctgagacccctgaaggccatcaacagagtgcccagcatgagaatcctggtgaacctgctgctggacaccctgcccatgctgggcaacgtgctgctgctgtgcttcttcgtgttcttcatcttcggcatcatcggcgtgcagctgtgggccggcctgctgagaaacagatgcttcctggaggagaacttcaccatccagggcgacgtggccctgcccccctactaccagcccgaggaggacgacgagatgcccttcatctgcagcctgagcggcgacaacggcatcatgggctgccacgagatcccccccctgaaggagcagggcagagagtgctgcctgagcaaggacgacgtgtacgacttcggcgccggcagacaggacctgaacgccagcggcctgtgcgtgaactggaacagatactacaacgtgtgcagaaccggcagcgccaacccccacaagggcgccatcaacttcgacaacatcggctacgcctggatcgtgatcttccaggtgatcaccctggagggctgggtggagatcatgtactacgtgatggacgcccacagcttctacaacttcatctacttcatcctgctgatcatcgtgggcagcttcttcatgatcaacctgtgcctggtggtgatcgccacccagttcagcgagaccaagcagagagagcacagactgatgctggagcagagacagagatacctgagcagcagcaccgtggccagctacgccgagcccggcgactgctacgaggagatcttccagtacgtgtgccacatcctgagaaaggccaagagaagagccctgggcctgtaccaggccctgcagagcagaagacaggccctgggccccgaggcccccgcccccgccaagcccggcccccacgccaaggagcccagacactaccacggcaagaccaagggccagggcgacgagggcagacacctgggcagcagacactgccagaccctgcacggccccgccagccccggcaacgaccacagcggcagaggcaagcccggccccagagagctgtgcccccagcacagccccctggacgccaccccccacaccctggtgcagcccatccccgccaccctggccagcgaccccgccagctgcccctgctgccagcacgaggacggcagaagacccagcggcctgggcagcaccgacagcggccaggagggcagcggcagcggcagcagcgccggcggcgaggacgaggccgacggcgacggcgccagaagcagcgaggacggcgccagcagcgagctgggcaaggaggaggaggaggaggagcaggccgacggcgccgtgtggctgtgcggcgacgtgtggagagagaccagagccaagctgagaggcatcgtggacagcaagtacttcaacagaggcatcatgatggccatcctggtgaacaccgtgagcatgggcatcgagcaccacgagcaggccaacgagctgaccaacatcctggagatctgcaacgtggtgttcaccagcatgttcgccctggagatgatcctgaagctggccgccttcggcctgttcgactacctgagaaacccctacaacatcttcgacagcatcatcgtgatcatcagcatctgggagatcgtgggccaggccgacggcggcctgagcgtgctgagaaccttcagactgctgagagtgctgaagctggtgagattcatgcccgccctgagaagacagctggtggtgctgatgaagaccatggacaacgtggccaccttctgcatgctgctgatgctgttcatcttcatcttcagcatcctgggcatgcacatcttcggctgcaagttcagcctgagaaccgacaccggcgacaccgtgcccgacagaaagaacttcgacagcctgctgtgggccatcgtgaccgtgttccagatcctgacccaggaggactggaacgtggtgctgtacaacggcatggccagcaccagcccctgggccagcctgtacttcgtggccctgatgaccttcggcaactacgtgctgttcaacctgctggtggccatcctggtggagggcttccaggccgagggcgacgccaacagaagctacagcgacgaggaccagagcagcagcaacatcgaggagttcgacaagctgcaggagggcctggacagcagcggcgaccccaagctgtgccccatccccatgacccccaacggccacctggaccccagcctgcccctgggcggccacctgggccccgccggcgccgccggccccgcccccagactgagcctgcagcccgaccccatgctggtggccctgggcagcagaaagagcagcgtgatgagcctgggcagaatgagctacgaccagagaagcctgagcagcagcagaagcagctactacggcccctggggcagaagcgccgcctgggccagcagaagaagcagctggaacagcctgaagcacaagccccccagcgccgagcacgagagcctgctgagcgccgagagaggcggcggcgccagagtgtgcgaggtggccgccgacgagggcccccccagagccgcccccctgcacaccccccacgcccaccacatccaccacggcccccacctggcccacagacacagacaccacagaagaaccctgagcctggacaacagagacagcgtggacctggccgagctggtgcccgccgtgggcgcccaccccagagccgcctggagagccgccggccccgcccccggccacgaggactgcaacggcagaatgcccagcatcgccaaggacgtgttcaccaagatgggcgacagaggcgacagaggcgaggacgaggaggagatcgactacaccctgtgcttcagagtgagaaagatgatcgacgtgtacaagcccgactggtgcgaggtgagagaggactggagcgtgtacctgttcagccccgagaacagattcagagtgctgtgccagaccatcatcgcccacaagctgttcgactacgtggtgctggccttcatcttcctgaactgcatcaccatcgccctggagagaccccagatcgaggccggcagcaccgagagaatcttcctgaccgtgagcaactacatcttcaccgccatcttcgtgggcgagatgaccctgaaggtggtgagcctgggcctgtacttcggcgagcaggcctacctgagaagcagctggaacgtgctggacggcttcctggtgttcgtgagcatcatcgacatcgtggtgagcctggccagcgccggcggcgccaagatcctgggcgtgctgagagtgctgagactgctgagaaccctgagacccctgagagtgatcagcagagcccccggcctgaagctggtggtggagaccctgatcagcagcctgaagcccatcggcaacatcgtgctgatctgctgcgccttcttcatcatcttcggcatcctgggcgtgcagctgttcaagggcaagttctaccactgcctgggcgtggacaccagaaacatcaccaacagaagcgactgcatggccgccaactacagatgggtgcaccacaagtacaacttcgacaacctgggccaggccctgatgagcctgttcgtgctggccagcaaggacggctgggtgaacatcatgtacaacggcctggacgccgtggccgtggaccagcagcccgtgaccaaccacaacccctggatgctgctgtacttcatcagcttcctgctgatcgtgagcttcttcgtgctgaacatgttcgtgggcgtggtggtggagaacttccacaagtgcagacagcaccaggaggccgaggaggccagaagaagagaggagaagagactgagaagactggagaagaagagaagaaaggcccagagactgccctactacgccacctactgccacaccagactgctgatccacagcatgtgcaccagccactacctggacatcttcatcaccttcatcatctgcctgaacgtggtgaccatgagcctggagcactacaaccagcccaccagcctggagaccgccctgaagtactgcaactacatgttcaccaccgtgttcgtgctggaggccgtgctgaagctggtggccttcggcctgagaagattcttcaaggacagatggaaccagctggacctggccatcgtgctgctgagcgtgatgggcatcaccctggaggagatcgagatcaacgccgccctgcccatcaaccccaccatcatcagaatcatgagagtgctgagaatcgccagagtgctgaagctgctgaagatggccaccggcatgagagccctgctggacaccgtggtgcaggccctgccccaggtgggcaacctgggcctgctgttcatgctgctgttcttcatctacgccgccctgggcgtggagctgttcggcaagctggtgtgcaacgacgagaacccctgcgagggcatgagcagacacgccaccttcgagaacttcggcatggccttcctgaccctgttccaggtgagcaccggcgacaactggaacggcatcatgaaggacaccctgagagactgcacccacgacgagagaagctgcctgagcagcctgcagttcgtgagccccctgtacttcgtgagcttcgtgctgaccgcccagttcgtgctgatcaacgtggtggtggccgtgctgatgaagcacctggacgacagcaacaaggaggcccaggaggacgccgagatggacgccgagctggagctggagatggcccacggcctgggccccggccccagactgcccaccggcagccccggcgcccccggcagaggccccggcggcgccggcggcggcggcgacaccgagggcggcctgtgcagaagatgctacagccccgcccaggagaacctgtggctggacagcgtgagcctgatcatcaaggacagcctggagggcgagctgaccatcatcgacaacctgagcggcagcatcttccaccactacagcagccccgccggctgcaagaagtgccaccacgacaagcaggaggtgcagctggccgagaccgaggccttcagcctgaacagcgacagaagcagcagcatcctgctgggcgacgacctgagcctggaggaccccaccgcctgcccccccggcagaaaggacagcaagggcgagctggacccccccgagcccatgagagtgggcgacctgggcgagtgcttcttccccctgagcagcaccgccgtgagccccgaccccgagaacttcctgtgcgagatggaggagatccccttcaaccccgtgagaagctggctgaagcacgacagcagccaggccccccccagccccttcagccccgacgccagcagccccctgctgcccatgcccgccgagttcttccaccccgccgtgagcgccagccagaagggccccgagaagggcaccggcaccggcaccctgcccaagatcgccctgcagggcagctgggccagcctgagaagccccagagtgaactgcaccctgctgagacaggccaccggcagcgacaccagcctggacgccagccccagcagcagcgccggcagcctgcagaccaccctggaggacagcctgaccctgagcgacagccccagaagagccctgggcccccccgcccccgcccccggccccagagccggcctgagccccgccgccagaagaagactgagcctgagaggcagaggcctgttcagcctgagaggcctgagagcccaccagagaagccacagcagcggcggcagcaccagccccggctgcacccaccacgacagcatggaccccagcgacgaggagggcagaggcggcgccggcggcggcggcgccggcagcgagcacagcgagaccctgagcagcctgagcctgaccagcctgttctgcccccccccccccccccccgcccccggcctgacccccgccagaaagttcagcagcaccagcagcctggccgcccccggcagaccccacgccgccgccctggcccacggcctggccagaagccccagctgggccgccgacagaagcaaggacccccccggcagagcccccctgcccatgggcctgggccccctggccccccccccccagcccctgcccggcgagctggagcccggcgacgccgccagcaagagaaagagatag

SEQ ID NO: 75076 - DNA, 6567 bp, synthetic construct
  misc_feature 1..6567: note = Description of Artificial Sequence: Synthetic coding sequence
  source 1..6567: mol_type = other DNA
atggccgagagcgccagcccccccagcagcagcgccgccgcccccgccgccgagcccggcgtgaccaccgagcagcccggccccagaagcccccccagcagcccccccggcctggaggagcccctggacggcgccgacccccacgtgccccaccccgacctggcccccatcgccttcttctgcctgagacagaccaccagccccagaaactggtgcatcaagatggccaccggcccctggtggtggtgcctgtgcatgctggtgatcctgctgaactgcgtgaccctgggcatgtaccagccctgcgacgacatggactgcctgagcgacagatgcaagatcctgcaggtgttcgacgacttcatcttcatcttcttcgccatggagatggtgctgaagatggtggccctgggcatcttcggcaagaagtgctacctgggcgacacctggaacagactggacttcttcatcgtgatggccggcatggtggagtacagcctggacctgcagaacatcaacctgagcgccatcagaaccgtgagagtgctgagacccctgaaggccatcaacagagtgcccagcatgagaatcctggtgaacctgctgctggacaccctgcccatgctgggcaacgtgctgctgctgtgcttcttcgtgttcttcatcttcggcatcatcggcgtgcagctgtgggccggcctgctgagaaacagatgcttcctggaggagaacttcaccatccagggcgacgtggccctgcccccctactaccagcccgaggaggacgacgagatgcccttcatctgcagcctgagcggcgacaacggcatcatgggctgccacgagatcccccccctgaaggagcagggcagagagtgctgcctgagcaaggacgacgtgtacgacttcggcgccggcagacaggacctgaacgccagcggcctgtgcgtgaactggaacagatactacaacgtgtgcagaaccggcagcgccaacccccacaagggcgccatcaacttcgacaacatcggctacgcctggatcgtgatcttccaggtgatcaccctggagggctgggtggagatcatgtactacgtgatggacgcccacagcttctacaacttcatctacttcatcctgctgatcatcgtgggcagcttcttcatgatcaacctgtgcctggtggtgatcgccacccagttcagcgagaccaagcagagagagcacagactgatgctggagcagagacagagatacctgagcagcagcaccgtggccagctacgccgagcccggcgactgctacgaggagatcttccagtacgtgtgccacatcctgagaaaggccaagagaagagccctgggcctgtaccaggccctgcagagcagaagacaggccctgggccccgaggcccccgcccccgccaagcccggcccccacgccaaggagcccagacactaccagctgtgcccccagcacagccccctggacgccaccccccacaccctggtgcagcccatccccgccaccctggccagcgaccccgccagctgcccctgctgccagcacgaggacggcagaagacccagcggcctgggcagcaccgacagcggccaggagggcagcggcagcggcagcagcgccggcggcgaggacgaggccgacggcgacggcgccagaagcagcgaggacggcgccagcagcgagctgggcaaggaggaggaggaggaggagcaggccgacggcgccgtgtggctgtgcggcgacgtgtggagagagaccagagccaagctgagaggcatcgtggacagcaagtacttcaacagaggcatcatgatggccatcctggtgaacaccgtgagcatgggcatcgagcaccacgagcaggccaccgagctgaccaacatcctggagatctgcaacgtggtgttcaccagcatgttcgccctggagatgatcctgaagctggccgccttcggcctgttcgactacctgagaaacccctacaacatcttcgacagcatcatcgtgatcatcagcatctgggagatcgtgggccaggccgacggcggcctgagcgtgctgagaaccttcagactgctgagagtgctgaagctggtgagattcatgcccgccctgagaagacagctggtggtgctgatgaagaccatggacaacgtggccaccttctgcatgctgctgatgctgttcatcttcatcttcagcatcctgggcatgcacatcttcggctgcaagttcagcctgagaaccgacaccggcgacaccgtgcccgacagaaagaacttcgacagcctgctgtgggccatcgtgaccgtgttccagatcctgacccaggaggactggaacgtggtgctgtacaacggcatggccagcaccagcccctgggccagcctgtacttcgtggccctgatgaccttcggcaactacgtgctgttcaacctgctggtggccatcctggtggagggcttccaggccgagggcgacgccaacagaagctacagcgacgaggaccagagcagcagcaacatcgaggagttcgacaagctgcaggagggcctggacagcagcggcgaccccaagctgtgccccatccccatgacccccaacggccacctggaccccagcctgcccctgggcggccacctgggccccgccggcgccgccggccccgcccccagactgagcctgcagcccgaccccatgctggtggccctgggcagcagaaagagcagcgtgatgagcctgggcagaatgagctacgaccagagaagcctgagcagcagcagaagcagctactacggcccctggggcagaagcgccgcctgggccagcagaagaagcagctggaacagcctgaagcacaagccccccagcgccgagcacgagagcctgctgagcgccgagagaggcggcggcgccagagtgtgcgaggtggccgccgacgagggcccccccagagccgcccccctgcacaccccccacgcccaccacatccaccacggcccccacctggcccacagacacagacaccacagaagaaccctgagcctggacaacagagacagcgtggacctggccgagctggtgcccgccgtgggcgcccaccccagagccgcctggagagccgccggccccgcccccggccacgaggactgcaacggcagaatgcccagcatcgccaaggacgtgttcaccaagatgggcgacagaggcgacagaggcgaggacgaggaggagatcgactacaccctgtgcttcagagtgagaaagatgatcgacgtgtacaagcccgactggtgcgaggtgagagaggactggagcgtgtacctgttcagccccgagaacagattcagagtgctgtgccagaccatcatcgcccacaagctgttcgactacgtggtgctggccttcatcttcctgaactgcatcaccatcgccctggagagaccccagatcgaggccggcagcaccgagagaatcttcctgaccgtgagcaactacatcttcaccgccatcttcgtgggcgagatgaccctgaaggtggtgagcctgggcctgtacttcggcgagcaggcctacctgagaagcagctggaacgtgctggacggcttcctggtgttcgtgagcatcatcgacatcgtggtgagcctggccagcgccggcggcgccaagatcctgggcgtgctgagagtgctgagactgctgagaaccctgagacccctgagagtgatcagcagagcccccggcctgaagctggtggtggagaccctgatcagcagcctgaagcccatcggcaacatcgtgctgatctgctgcgccttcttcatcatcttcggcatcctgggcgtgcagctgttcaagggcaagttctaccactgcctgggcgtggacaccagaaacatcaccaacagaagcgactgcatggccgccaactacagatgggtgcaccacaagtacaacttcgacaacctgggccaggccctgatgagcctgttcgtgctggccagcaaggacggctgggtgaacatcatgtacaacggcctggacgccgtggccgtggaccagcagcccgtgaccaaccacaacccctggatgctgctgtacttcatcagcttcctgctgatcgtgagcttcttcgtgctgaacatgttcgtgggcgtggtggtggagaacttccacaagtgcagacagcaccaggaggccgaggaggccagaagaagagaggagaagagactgagaagactggagaagaagagaagaaaggcccagagactgccctactacgccacctactgccacaccagactgctgatccacagcatgtgcaccagccactacctggacatcttcatcaccttcatcatctgcctgaacgtggtgaccatgagcctggagcactacaaccagcccaccagcctggagaccgccctgaagtactgcaactacatgttcaccaccgtgttcgtgctggaggccgtgctgaagctggtggccttcggcctgagaagattcttcaaggacagatggaaccagctggacctggccatcgtgctgctgagcgtgatgggcatcaccctggaggagatcgagatcaacgccgccctgcccatcaaccccaccatcatcagaatcatgagagtgctgagaatcgccagagtgctgaagctgctgaagatggccaccggcatgagagccctgctggacaccgtggtgcaggccctgccccaggtgggcaacctgggcctgctgttcatgctgctgttcttcatctacgccgccctgggcgtggagctgttcggcaagctggtgtgcaacgacgagaacccctgcgagggcatgagcagacacgccaccttcgagaacttcggcatggccttcctgaccctgttccaggtgagcaccggcgacaactggaacggcatcatgaaggacaccctgagagactgcacccacgacgagagaagctgcctgagcagcctgcagttcgtgagccccctgtacttcgtgagcttcgtgctgaccgcccagttcgtgctgatcaacgtggtggtggccgtgctgatgaagcacctggacgacagcaacaaggaggcccaggaggacgccgagatggacgccgagctggagctggagatggcccacggcctgggccccggccccagactgcccaccggcagccccggcgcccccggcagaggccccggcggcgccggcggcggcggcgacaccgagggcggcctgtgcagaagatgctacagccccgcccaggagaacctgtggctggacagcgtgagcctgatcatcaaggacagcctggagggcgagctgaccatcatcgacaacctgagcggcagcatcttccaccactacagcagccccgccggctgcaagaagtgccaccacgacaagcaggaggtgcagctggccgagaccgaggccttcagcctgaacagcgacagaagcagcagcatcctgctgggcgacgacctgagcctggaggaccccaccgcctgcccccccggcagaaaggacagcaagggcgagctggacccccccgagcccatgagagtgggcgacctgggcgagtgcttcttccccctgagcagcaccgccgtgagccccgaccccgagaacttcctgtgcgagatggaggagatccccttcaaccccgtgagaagctggctgaagcacgacagcagccaggccccccccagccccttcagccccgacgccagcagccccctgctgcccatgcccgccgagttcttccaccccgccgtgagcgccagccagaagggccccgagaagggcaccggcaccggcaccctgcccaagatcgccctgcagggcagctgggccagcctgagaagccccagagtgaactgcaccctgctgagacaggccaccggcagcgacaccagcctggacgccagccccagcagcagcgccggcagcctgcagaccaccctggaggacagcctgaccctgagcgacagccccagaagagccctgggcccccccgcccccgcccccggccccagagccggcctgagccccgccgccagaagaagactgagcctgagaggcagaggcctgttcagcctgagaggcctgagagcccaccagagaagccacagcagcggcggcagcaccagccccggctgcacccaccacgacagcatggaccccagcgacgaggagggcagaggcggcgccggcggcggcggcgccggcagcgagcacagcgagaccctgagcagcctgagcctgaccagcctgttctgcccccccccccccccccccgcccccggcctgacccccgccagaaagttcagcagcaccagcagcctggccgcccccggcagaccccacgccgccgccctggcccacggcctggccagaagccccagctgggccgccgacagaagcaaggacccccccggcagagcccccctgcccatgggcctgggccccctggccccccccccccagcccctgcccggcgagctggagcccggcgacgccgccagcaagagaaagagatag

SEQ ID NO: 75077 - DNA, 6051 bp, synthetic construct
  misc_feature 1..6051: note = Description of Artificial Sequence: Synthetic coding sequence
  source 1..6051: mol_type = other DNA
atggccgagagcgccagcccccccagcagcagcgccgccgcccccgccgccgagcccggcgtgaccaccgagcagcccggccccagaagcccccccagcagcccccccggcctggaggagcccctggacggcgccgacccccacgtgccccaccccgacctggcccccatcgccttcttctgcctgagacagaccaccagccccagaaactggtgcatcaagatggtgtgcaacccctggttcgagtgcgtgagcatgctggtgatcctgctgaactgcgtgaccctgggcatgtaccagccctgcgacgacatggactgcctgagcgacagatgcaagatcctgcaggtgttcgacgacttcatcttcatcttcttcgccatggagatggtgctgaagatggtggccctgggcatcttcggcaagaagtgctacctgggcgacacctggaacagactggacttcttcatcgtgatggccggcatggtggagtacagcctggacctgcagaacatcaacctgagcgccatcagaaccgtgagagtgctgagacccctgaaggccatcaacagagtgcccagcatgagaatcctggtgaacctgctgctggacaccctgcccatgctgggcaacgtgctgctgctgtgcttcttcgtgttcttcatcttcggcatcatcggcgtgcagctgtgggccggcctgctgagaaacagatgcttcctggaggagaacttcaccatccagggcgacgtggccctgcccccctactaccagcccgaggaggacgacgagatgcccttcatctgcagcctgagcggcgacaacggcatcatgggctgccacgagatcccccccctgaaggagcagggcagagagtgctgcctgagcaaggacgacgtgtacgacttcggcgccggcagacaggacctgaacgccagcggcctgtgcgtgaactggaacagatactacaacgtgtgcagaaccggcagcgccaacccccacaagggcgccatcaacttcgacaacatcggctacgcctggatcgtgatcttccaggtgatcaccctggagggctgggtggagatcatgtactacgtgatggacgcccacagcttctacaacttcatctacttcatcctgctgatcatcgtgggcagcttcttcatgatcaacctgtgcctggtggtgatcgccacccagttcagcgagaccaagcagagagagcacagactgatgctggagcagagacagagatacctgagcagcagcaccgtggccagctacgccgagcccggcgactgctacgaggagatcttccagtacgtgtgccacatcctgagaaaggccaagagaagagccctgggcctgtaccaggccctgcagagcagaagacaggccctgggccccgaggcccccgcccccgccaagcccggcccccacgccaaggagcccagacactaccacggcaagaccaagggccagggcgacgagggcagacacctgggcagcagacactgccagaccctgcacggccccgccagccccggcaacgaccacagcggcagagagctgtgcccccagcacagccccctggacgccaccccccacaccctggtgcagcccatccccgccaccctggccagcgaccccgccagctgcccctgctgccagcacgaggacggcagaagacccagcggcctgggcagcaccgacagcggccaggagggcagcggcagcggcagcagcgccggcggcgaggacgaggccgacggcgacggcgccagaagcagcgaggacggcgccagcagcgagctgggcaaggaggaggaggaggaggagcaggccgacggcgccgtgtggctgtgcggcgacgtgtggagagagaccagagccaagctgagaggcatcgtggacagcaagtacttcaacagaggcatcatgatggccatcctggtgaacaccgtgagcatgggcatcgagcaccacgagcagcccgaggagctgaccaacatcctggagatctgcaacgtggtgttcaccagcatgttcgccctggagatgatcctgaagctggccgccttcggcctgttcgactacctgagaaacccctacaacatcttcgacagcatcatcgtgatcatcagcatctgggagatcgtgggccaggccgacggcggcctgagcgtgctgagaaccttcagactgctgagagtgctgaagctggtgagattcatgcccgccctgagaagacagctggtggtgctgatgaagaccatggacaacgtggccaccttctgcatgctgctgatgctgttcatcttcatcttcagcatcctgggcatgcacatcttcggctgcaagttcagcctgagaaccgacaccggcgacaccgtgcccgacagaaagaacttcgacagcctgctgtgggccatcgtgaccgtgttccagatcctgacccaggaggactggaacgtggtgctgtacaacggcatggccagcaccagcccctgggccagcctgtacttcgtggccctgatgaccttcggcaactacgtgctgttcaacctgctggtggccatcctggtggagggcttccaggccgagggcgacgccaacagaagctacagcgacgaggaccagagcagcagcaacatcgaggagttcgacaagctgcaggagggcctggacagcagcggcgaccccaagctgtgccccatccccatgacccccaacggccacctggaccccagcctgcccctgggcggccacctgggccccgccggcgccgccggccccgcccccagactgagcctgcagcccgaccccatgctggtggccctgggcagcagaaagagcagcgtgatgagcctgggcagaatgagctacgaccagagaagcctgagcagcagcagaagcagctactacggcccctggggcagaagcgccgcctgggccagcagaagaagcagctggaacagcctgaagcacaagccccccagcgccgagcacgagagcctgctgagcgccgagagaggcggcggcgccagagtgtgcgaggtggccgccgacgagggcccccccagagccgcccccctgcacaccccccacgcccaccacatccaccacggcccccacctggcccacagacacagacaccacagaagaaccctgagcctggacaacagagacagcgtggacctggccgagctggtgcccgccgtgggcgcccaccccagagccgcctggagagccgccggccccgcccccggccacgaggactgcaacggcagaatgcccagcatcgccaaggacgtgttcaccaagatgggcgacagaggcgacagaggcgaggacgaggaggagatcgactacaccctgtgcttcagagtgagaaagatgatcgacgtgtacaagcccgactggtgcgaggtgagagaggactggagcgtgtacctgttcagccccgagaacagattcagagtgctgtgccagaccatcatcgcccacaagctgttcgactacgtggtgctggccttcatcttcctgaactgcatcaccatcgccctggagagaccccagatcgaggccggcagcaccgagagaatcttcctgaccgtgagcaactacatcttcaccgccatcttcgtgggcgagatgaccctgaaggtggtgagcctgggcctgtacttcggcgagcaggcctacctgagaagcagctggaacgtgctggacggcttcctggtgttcgtgagcatcatcgacatcgtggtgagcctggccagcgccggcggcgccaagatcctgggcgtgctgagagtgctgagactgctgagaaccctgagacccctgagagtgatcagcagagcccccggcctgaagctggtggtggagaccctgatcagcagcctgaagcccatcggcaacatcgtgctgatctgctgcgccttcttcatcatcttcggcatcctgggcgtgcagctgttcaagggcaagttctaccactgcctgggcgtggacaccagaaacatcaccaacagaagcgactgcatggccgccaactacagatgggtgcaccacaagtacaacttcgacaacctgggccaggccctgatgagcctgttcgtgctggccagcaaggacggctgggtgaacatcatgtacaacggcctggacgccgtggccgtggaccagcagcccgtgaccaaccacaacccctggatgctgctgtacttcatcagcttcctgctgatcgtgagcttcttcgtgctgaacatgttcgtgggcgtggtggtggagaacttccacaagtgcagacagcaccaggaggccgaggaggccagaagaagagaggagaagagactgagaagactggagaagaagagaagaaaggcccagagactgccctactacgccacctactgccacaccagactgctgatccacagcatgtgcaccagccactacctggacatcttcatcaccttcatcatctgcctgaacgtggtgaccatgagcctggagcactacaaccagcccaccagcctggagaccgccctgaagtactgcaactacatgttcaccaccgtgttcgtgctggaggccgtgctgaagctggtggccttcggcctgagaagattcttcaaggacagatggaaccagctggacctggccatcgtgctgctgagcgtgatgggcatcaccctggaggagatcgagatcaacgccgccctgcccatcaaccccaccatcatcagaatcatgagagtgctgagaatcgccagagtgctgaagctgctgaagatggccaccggcatgagagccctgctggacaccgtggtgcaggccctgccccaggtgggcaacctgggcctgctgttcatgctgctgttcttcatctacgccgccctgggcgtggagctgttcggcaagctggtgtgcaacgacgagaacccctgcgagggcatgagcagacacgccaccttcgagaacttcggcatggccttcctgaccctgttccaggtgagcaccggcgacaactggaacggcatcatgaaggacaccctgagagactgcacccacgacgagagaagctgcctgagcagcctgcagttcgtgagccccctgtacttcgtgagcttcgtgctgaccgcccagttcgtgctgatcaacgtggtggtggccgtgctgatgaagcacctggacgacagcaacaaggaggcccaggaggacgccgagatggacgccgagctggagctggagatggcccacggcctgggccccggccccagactgcccaccggcagccccggcgcccccggcagaggccccggcggcgccggcggcggcggcgacaccgagggcggcctgtgcagaagatgctacagccccgcccaggagaacctgtggctggacagcgtgagcctgatcatcaaggacagcctggagggcgagctgaccatcatcgacaacctgagcggcagcatcttccaccactacagcagccccgccggctgcaagaagtgccaccacgacaagcaggaggtgcagctggccgagaccgaggccttcagcctgaacagcgacagaagcagcagcatcctgctgggcgacgacctgagcctggaggaccccaccgcctgcccccccggcagaaaggacagcaagggcgagctggacccccccgagcccatgagagtgggcgacctgggcgagtgcttcttccccctgagcagcaccgccgtgagccccgaccccgagaacttcctgtgcgagatggaggagatccccttcaaccccgtgagaagctggctgaagcacgacagcagccaggccccccccagccccttcagccccgacgccagcagccccctgctgcccatgcccgccgagttcttccaccccgccgtgagcgccagccagaagggccccgagaagggcaccggcaccggcaccctgcccaagatcgccctgcagggcagctgggccagcctgagaagccccagagtgaactgcaccctgctgagacaggtgcccaccccccccagaccctag

SEQ ID NO: 75078 - DNA, 6672 bp, synthetic construct
  misc_feature 1..6672: note = Description of Artificial Sequence: Synthetic coding sequence
  source 1..6672: mol_type = other DNA
atggccgagagcgccagcccccccagcagcagcgccgccgcccccgccgccgagcccggcgtgaccaccgagcagcccggccccagaagcccccccagcagcccccccggcctggaggagcccctggacggcgccgacccccacgtgccccaccccgacctggcccccatcgccttcttctgcctgagacagaccaccagccccagaaactggtgcatcaagatggtgtgcaacccctggttcgagtgcgtgagcatgctggtgatcctgctgaactgcgtgaccctgggcatgtaccagccctgcgacgacatggactgcctgagcgacagatgcaagatcctgcaggtgttcgacgacttcatcttcatcttcttcgccatggagatggtgctgaagatggtggccctgggcatcttcggcaagaagtgctacctgggcgacacctggaacagactggacttcttcatcgtgatggccggcatggtggagtacagcctggacctgcagaacatcaacctgagcgccatcagaaccgtgagagtgctgagacccctgaaggccatcaacagagtgcccagcatgagaatcctggtgaacctgctgctggacaccctgcccatgctgggcaacgtgctgctgctgtgcttcttcgtgttcttcatcttcggcatcatcggcgtgcagctgtgggccggcctgctgagaaacagatgcttcctggaggagaacttcaccatccagggcgacgtggccctgcccccctactaccagcccgaggaggacgacgagatgcccttcatctgcagcctgagcggcgacaacggcatcatgggctgccacgagatcccccccctgaaggagcagggcagagagtgctgcctgagcaaggacgacgtgtacgacttcggcgccggcagacaggacctgaacgccagcggcctgtgcgtgaactggaacagatactacaacgtgtgcagaaccggcagcgccaacccccacaagggcgccatcaacttcgacaacatcggctacgcctggatcgtgatcttccaggtgatcaccctggagggctgggtggagatcatgtactacgtgatggacgcccacagcttctacaacttcatctacttcatcctgctgatcatcgtgggcagcttcttcatgatcaacctgtgcctggtggtgatcgccacccagttcagcgagaccaagcagagagagcacagactgatgctggagcagagacagagatacctgagcagcagcaccgtggccagctacgccgagcccggcgactgctacgaggagatcttccagtacgtgtgccacatcctgagaaaggccaagagaagagccctgggcctgtaccaggccctgcagagcagaagacaggccctgggccccgaggcccccgcccccgccaagcccggcccccacgccaaggagcccagacactaccacggcaagaccaagggccagggcgacgagggcagacacctgggcagcagacactgccagaccctgcacggccccgccagccccggcaacgaccacagcggcagagagctgtgcccccagcacagccccctggacgccaccccccacaccctggtgcagcccatccccgccaccctggccagcgaccccgccagctgcccctgctgccagcacgaggacggcagaagacccagcggcctgggcagcaccgacagcggccaggagggcagcggcagcggcagcagcgccggcggcgaggacgaggccgacggcgacggcgccagaagcagcgaggacggcgccagcagcgagctgggcaaggaggaggaggaggaggagcaggccgacggcgccgtgtggctgtgcggcgacgtgtggagagagaccagagccaagctgagaggcatcgtggacagcaagtacttcaacagaggcatcatgatggccatcctggtgaacaccgtgagcatgggcatcgagcaccacgagcagcccgaggagctgaccaacatcctggagatctgcaacgtggtgttcaccagcatgttcgccctggagatgatcctgaagctggccgccttcggcctgttcgactacctgagaaacccctacaacatcttcgacagcatcatcgtgatcatcagcatctgggagatcgtgggccaggccgacggcggcctgagcgtgctgagaaccttcagactgctgagagtgctgaagctggtgagattcatgcccgccctgagaagacagctggtggtgctgatgaagaccatggacaacgtggccaccttctgcatgctgctgatgctgttcatcttcatcttcagcatcctgggcatgcacatcttcggctgcaagttcagcctgagaaccgacaccggcgacaccgtgcccgacagaaagaacttcgacagcctgctgtgggccatcgtgaccgtgttccagatcctgacccaggaggactggaacgtggtgctgtacaacggcatggccagcaccagcccctgggccagcctgtacttcgtggccctgatgaccttcggcaactacgtgctgttcaacctgctggtggccatcctggtggagggcttccaggccgagggcgacgccaacagaagctacagcgacgaggaccagagcagcagcaacatcgaggagttcgacaagctgcaggagggcctggacagcagcggcgaccccaagctgtgccccatccccatgacccccaacggccacctggaccccagcctgcccctgggcggccacctgggccccgccggcgccgccggccccgcccccagactgagcctgcagcccgaccccatgctggtggccctgggcagcagaaagagcagcgtgatgagcctgggcagaatgagctacgaccagagaagcctgagcagcagcagaagcagctactacggcccctggggcagaagcgccgcctgggccagcagaagaagcagctggaacagcctgaagcacaagccccccagcgccgagcacgagagcctgctgagcgccgagagaggcggcggcgccagagtgtgcgaggtggccgccgacgagggcccccccagagccgcccccctgcacaccccccacgcccaccacatccaccacggcccccacctggcccacagacacagacaccacagaagaaccctgagcctggacaacagagacagcgtggacctggccgagctggtgcccgccgtgggcgcccaccccagagccgcctggagagccgccggccccgcccccggccacgaggactgcaacggcagaatgcccagcatcgccaaggacgtgttcaccaagatgggcgacagaggcgacagaggcgaggacgaggaggagatcgactacaccctgtgcttcagagtgagaaagatgatcgacgtgtacaagcccgactggtgcgaggtgagagaggactggagcgtgtacctgttcagccccgagaacagattcagagtgctgtgccagaccatcatcgcccacaagctgttcgactacgtggtgctggccttcatcttcctgaactgcatcaccatcgccctggagagaccccagatcgaggccggcagcaccgagagaatcttcctgaccgtgagcaactacatcttcaccgccatcttcgtgggcgagatgaccctgaaggtggtgagcctgggcctgtacttcggcgagcaggcctacctgagaagcagctggaacgtgctggacggcttcctggtgttcgtgagcatcatcgacatcgtggtgagcctggccagcgccggcggcgccaagatcctgggcgtgctgagagtgctgagactgctgagaaccctgagacccctgagagtgatcagcagagcccccggcctgaagctggtggtggagaccctgatcagcagcctgaagcccatcggcaacatcgtgctgatctgctgcgccttcttcatcatcttcggcatcctgggcgtgcagctgttcaagggcaagttctaccactgcctgggcgtggacaccagaaacatcaccaacagaagcgactgcatggccgccaactacagatgggtgcaccacaagtacaacttcgacaacctgggccaggccctgatgagcctgttcgtgctggccagcaaggacggctgggtgaacatcatgtacaacggcctggacgccgtggccgtggaccagcagcccgtgaccaaccacaacccctggatgctgctgtacttcatcagcttcctgctgatcgtgagcttcttcgtgctgaacatgttcgtgggcgtggtggtggagaacttccacaagtgcagacagcaccaggaggccgaggaggccagaagaagagaggagaagagactgagaagactggagaagaagagaagaaaggcccagagactgccctactacgccacctactgccacaccagactgctgatccacagcatgtgcaccagccactacctggacatcttcatcaccttcatcatctgcctgaacgtggtgaccatgagcctggagcactacaaccagcccaccagcctggagaccgccctgaagtactgcaactacatgttcaccaccgtgttcgtgctggaggccgtgctgaagctggtggccttcggcctgagaagattcttcaaggacagatggaaccagctggacctggccatcgtgctgctgagcgtgatgggcatcaccctggaggagatcgagatcaacgccgccctgcccatcaaccccaccatcatcagaatcatgagagtgctgagaatcgccagagtgctgaagctgctgaagatggccaccggcatgagagccctgctggacaccgtggtgcaggccctgccccaggtgggcaacctgggcctgctgttcatgctgctgttcttcatctacgccgccctgggcgtggagctgttcggcaagctggtgtgcaacgacgagaacccctgcgagggcatgagcagacacgccaccttcgagaacttcggcatggccttcctgaccctgttccaggtgagcaccggcgacaactggaacggcatcatgaaggacaccctgagagactgcacccacgacgagagaagctgcctgagcagcctgcagttcgtgagccccctgtacttcgtgagcttcgtgctgaccgcccagttcgtgctgatcaacgtggtggtggccgtgctgatgaagcacctggacgacagcaacaaggaggcccaggaggacgccgagatggacgccgagctggagctggagatggcccacggcctgggccccggccccagactgcccaccggcagccccggcgcccccggcagaggccccggcggcgccggcggcggcggcgacaccgagggcggcctgtgcagaagatgctacagccccgcccaggagaacctgtggctggacagcgtgagcctgatcatcaaggacagcctggagggcgagctgaccatcatcgacaacctgagcggcagcatcttccaccactacagcagccccgccggctgcaagaagtgccaccacgacaagcaggaggtgcagctggccgagaccgaggccttcagcctgaacagcgacagaagcagcagcatcctgctgggcgacgacctgagcctggaggaccccaccgcctgcccccccggcagaaaggacagcaagggcgagctggacccccccgagcccatgagagtgggcgacctgggcgagtgcttcttccccctgagcagcaccgccgtgagccccgaccccgagaacttcctgtgcgagatggaggagatccccttcaaccccgtgagaagctggctgaagcacgacagcagccaggccccccccagccccttcagccccgacgccagcagccccctgctgcccatgcccgccgagttcttccaccccgccgtgagcgccagccagaagggccccgagaagggcaccggcaccggcaccctgcccaagatcgccctgcagggcagctgggccagcctgagaagccccagagtgaactgcaccctgctgagacaggccaccggcagcgacaccagcctggacgccagccccagcagcagcgccggcagcctgcagaccaccctggaggacagcctgaccctgagcgacagccccagaagagccctgggcccccccgcccccgcccccggccccagagccggcctgagccccgccgccagaagaagactgagcctgagaggcagaggcctgttcagcctgagaggcctgagagcccaccagagaagccacagcagcggcggcagcaccagccccggctgcacccaccacgacagcatggaccccagcgacgaggagggcagaggcggcgccggcggcggcggcgccggcagcgagcacagcgagaccctgagcagcctgagcctgaccagcctgttctgcccccccccccccccccccgcccccggcctgacccccgccagaaagttcagcagcaccagcagcctggccgcccccggcagaccccacgccgccgccctggcccacggcctggccagaagccccagctgggccgccgacagaagcaaggacccccccggcagagcccccctgcccatgggcctgggccccctggccccccccccccagcccctgcccggcgagctggagcccggcgacgccgccagcaagagaaagagatag

SEQ ID NO: 75079 - DNA, 6567 bp, synthetic construct
  misc_feature 1..6567: note = Description of Artificial Sequence: Synthetic coding sequence
  source 1..6567: mol_type = other DNA
atggccgagagcgccagcccccccagcagcagcgccgccgcccccgccgccgagcccggcgtgaccaccgagcagcccggccccagaagcccccccagcagcccccccggcctggaggagcccctggacggcgccgacccccacgtgccccaccccgacctggcccccatcgccttcttctgcctgagacagaccaccagccccagaaactggtgcatcaagatggtgtgcaacccctggttcgagtgcgtgagcatgctggtgatcctgctgaactgcgtgaccctgggcatgtaccagccctgcgacgacatggactgcctgagcgacagatgcaagatcctgcaggtgttcgacgacttcatcttcatcttcttcgccatggagatggtgctgaagatggtggccctgggcatcttcggcaagaagtgctacctgggcgacacctggaacagactggacttcttcatcgtgatggccggcatggtggagtacagcctggacctgcagaacatcaacctgagcgccatcagaaccgtgagagtgctgagacccctgaaggccatcaacagagtgcccagcatgagaatcctggtgaacctgctgctggacaccctgcccatgctgggcaacgtgctgctgctgtgcttcttcgtgttcttcatcttcggcatcatcggcgtgcagctgtgggccggcctgctgagaaacagatgcttcctggaggagaacttcaccatccagggcgacgtggccctgcccccctactaccagcccgaggaggacgacgagatgcccttcatctgcagcctgagcggcgacaacggcatcatgggctgccacgagatcccccccctgaaggagcagggcagagagtgctgcctgagcaaggacgacgtgtacgacttcggcgccggcagacaggacctgaacgccagcggcctgtgcgtgaactggaacagatactacaacgtgtgcagaaccggcagcgccaacccccacaagggcgccatcaacttcgacaacatcggctacgcctggatcgtgatcttccaggtgatcaccctggagggctgggtggagatcatgtactacgtgatggacgcccacagcttctacaacttcatctacttcatcctgctgatcatcgtgggcagcttcttcatgatcaacctgtgcctggtggtgatcgccacccagttcagcgagaccaagcagagagagcacagactgatgctggagcagagacagagatacctgagcagcagcaccgtggccagctacgccgagcccggcgactgctacgaggagatcttccagtacgtgtgccacatcctgagaaaggccaagagaagagccctgggcctgtaccaggccctgcagagcagaagacaggccctgggccccgaggcccccgcccccgccaagcccggcccccacgccaaggagcccagacactaccagctgtgcccccagcacagccccctggacgccaccccccacaccctggtgcagcccatccccgccaccctggccagcgaccccgccagctgcccctgctgccagcacgaggacggcagaagacccagcggcctgggcagcaccgacagcggccaggagggcagcggcagcggcagcagcgccggcggcgaggacgaggccgacggcgacggcgccagaagcagcgaggacggcgccagcagcgagctgggcaaggaggaggaggaggaggagcaggccgacggcgccgtgtggctgtgcggcgacgtgtggagagagaccagagccaagctgagaggcatcgtggacagcaagtacttcaacagaggcatcatgatggccatcctggtgaacaccgtgagcatgggcatcgagcaccacgagcagcccgaggagctgaccaacatcctggagatctgcaacgtggtgttcaccagcatgttcgccctggagatgatcctgaagctggccgccttcggcctgttcgactacctgagaaacccctacaacatcttcgacagcatcatcgtgatcatcagcatctgggagatcgtgggccaggccgacggcggcctgagcgtgctgagaaccttcagactgctgagagtgctgaagctggtgagattcatgcccgccctgagaagacagctggtggtgctgatgaagaccatggacaacgtggccaccttctgcatgctgctgatgctgttcatcttcatcttcagcatcctgggcatgcacatcttcggctgcaagttcagcctgagaaccgacaccggcgacaccgtgcccgacagaaagaacttcgacagcctgctgtgggccatcgtgaccgtgttccagatcctgacccaggaggactggaacgtggtgctgtacaacggcatggccagcaccagcccctgggccagcctgtacttcgtggccctgatgaccttcggcaactacgtgctgttcaacctgctggtggccatcctggtggagggcttccaggccgagggcgacgccaacagaagctacagcgacgaggaccagagcagcagcaacatcgaggagttcgacaagctgcaggagggcctggacagcagcggcgaccccaagctgtgccccatccccatgacccccaacggccacctggaccccagcctgcccctgggcggccacctgggccccgccggcgccgccggccccgcccccagactgagcctgcagcccgaccccatgctggtggccctgggcagcagaaagagcagcgtgatgagcctgggcagaatgagctacgaccagagaagcctgagcagcagcagaagcagctactacggcccctggggcagaagcgccgcctgggccagcagaagaagcagctggaacagcctgaagcacaagccccccagcgccgagcacgagagcctgctgagcgccgagagaggcggcggcgccagagtgtgcgaggtggccgccgacgagggcccccccagagccgcccccctgcacaccccccacgcccaccacatccaccacggcccccacctggcccacagacacagacaccacagaagaaccctgagcctggacaacagagacagcgtggacctggccgagctggtgcccgccgtgggcgcccaccccagagccgcctggagagccgccggccccgcccccggccacgaggactgcaacggcagaatgcccagcatcgccaaggacgtgttcaccaagatgggcgacagaggcgacagaggcgaggacgaggaggagatcgactacaccctgtgcttcagagtgagaaagatgatcgacgtgtacaagcccgactggtgcgaggtgagagaggactggagcgtgtacctgttcagccccgagaacagattcagagtgctgtgccagaccatcatcgcccacaagctgttcgactacgtggtgctggccttcatcttcctgaactgcatcaccatcgccctggagagaccccagatcgaggccggcagcaccgagagaatcttcctgaccgtgagcaactacatcttcaccgccatcttcgtgggcgagatgaccctgaaggtggtgagcctgggcctgtacttcggcgagcaggcctacctgagaagcagctggaacgtgctggacggcttcctggtgttcgtgagcatcatcgacatcgtggtgagcctggccagcgccggcggcgccaagatcctgggcgtgctgagagtgctgagactgctgagaaccctgagacccctgagagtgatcagcagagcccccggcctgaagctggtggtggagaccctgatcagcagcctgaagcccatcggcaacatcgtgctgatctgctgcgccttcttcatcatcttcggcatcctgggcgtgcagctgttcaagggcaagttctaccactgcctgggcgtggacaccagaaacatcaccaacagaagcgactgcatggccgccaactacagatgggtgcaccacaagtacaacttcgacaacctgggccaggccctgatgagcctgttcgtgctggccagcaaggacggctgggtgaacatcatgtacaacggcctggacgccgtggccgtggaccagcagcccgtgaccaaccacaacccctggatgctgctgtacttcatcagcttcctgctgatcgtgagcttcttcgtgctgaacatgttcgtgggcgtggtggtggagaacttccacaagtgcagacagcaccaggaggccgaggaggccagaagaagagaggagaagagactgagaagactggagaagaagagaagaaaggcccagagactgccctactacgccacctactgccacaccagactgctgatccacagcatgtgcaccagccactacctggacatcttcatcaccttcatcatctgcctgaacgtggtgaccatgagcctggagcactacaaccagcccaccagcctggagaccgccctgaagtactgcaactacatgttcaccaccgtgttcgtgctggaggccgtgctgaagctggtggccttcggcctgagaagattcttcaaggacagatggaaccagctggacctggccatcgtgctgctgagcgtgatgggcatcaccctggaggagatcgagatcaacgccgccctgcccatcaaccccaccatcatcagaatcatgagagtgctgagaatcgccagagtgctgaagctgctgaagatggccaccggcatgagagccctgctggacaccgtggtgcaggccctgccccaggtgggcaacctgggcctgctgttcatgctgctgttcttcatctacgccgccctgggcgtggagctgttcggcaagctggtgtgcaacgacgagaacccctgcgagggcatgagcagacacgccaccttcgagaacttcggcatggccttcctgaccctgttccaggtgagcaccggcgacaactggaacggcatcatgaaggacaccctgagagactgcacccacgacgagagaagctgcctgagcagcctgcagttcgtgagccccctgtacttcgtgagcttcgtgctgaccgcccagttcgtgctgatcaacgtggtggtggccgtgctgatgaagcacctggacgacagcaacaaggaggcccaggaggacgccgagatggacgccgagctggagctggagatggcccacggcctgggccccggccccagactgcccaccggcagccccggcgcccccggcagaggccccggcggcgccggcggcggcggcgacaccgagggcggcctgtgcagaagatgctacagccccgcccaggagaacctgtggctggacagcgtgagcctgatcatcaaggacagcctggagggcgagctgaccatcatcgacaacctgagcggcagcatcttccaccactacagcagccccgccggctgcaagaagtgccaccacgacaagcaggaggtgcagctggccgagaccgaggccttcagcctgaacagcgacagaagcagcagcatcctgctgggcgacgacctgagcctggaggaccccaccgcctgcccccccggcagaaaggacagcaagggcgagctggacccccccgagcccatgagagtgggcgacctgggcgagtgcttcttccccctgagcagcaccgccgtgagccccgaccccgagaacttcctgtgcgagatggaggagatccccttcaaccccgtgagaagctggctgaagcacgacagcagccaggccccccccagccccttcagccccgacgccagcagccccctgctgcccatgcccgccgagttcttccaccccgccgtgagcgccagccagaagggccccgagaagggcaccggcaccggcaccctgcccaagatcgccctgcagggcagctgggccagcctgagaagccccagagtgaactgcaccctgctgagacaggccaccggcagcgacaccagcctggacgccagccccagcagcagcgccggcagcctgcagaccaccctggaggacagcctgaccctgagcgacagccccagaagagccctgggcccccccgcccccgcccccggccccagagccggcctgagccccgccgccagaagaagactgagcctgagaggcagaggcctgttcagcctgagaggcctgagagcccaccagagaagccacagcagcggcggcagcaccagccccggctgcacccaccacgacagcatggaccccagcgacgaggagggcagaggcggcgccggcggcggcggcgccggcagcgagcacagcgagaccctgagcagcctgagcctgaccagcctgttctgcccccccccccccccccccgcccccggcctgacccccgccagaaagttcagcagcaccagcagcctggccgcccccggcagaccccacgccgccgccctggcccacggcctggccagaagccccagctgggccgccgacagaagcaaggacccccccggcagagcccccctgcccatgggcctgggccccctggccccccccccccagcccctgcccggcgagctggagcccggcgacgccgccagcaagagaaagagatag

SEQ ID NO: 75080 - DNA, 5946 bp, synthetic construct
  misc_feature 1..5946: note = Description of Artificial Sequence: Synthetic coding sequence
  source 1..5946: mol_type = other DNA
atggccgagagcgccagcccccccagcagcagcgccgccgcccccgccgccgagcccggcgtgaccaccgagcagcccggccccagaagcccccccagcagcccccccggcctggaggagcccctggacggcgccgacccccacgtgccccaccccgacctggcccccatcgccttcttctgcctgagacagaccaccagccccagaaactggtgcatcaagatggtgtgcaacccctggttcgagtgcgtgagcatgctggtgatcctgctgaactgcgtgaccctgggcatgtaccagccctgcgacgacatggactgcctgagcgacagatgcaagatcctgcaggtgttcgacgacttcatcttcatcttcttcgccatggagatggtgctgaagatggtggccctgggcatcttcggcaagaagtgctacctgggcgacacctggaacagactggacttcttcatcgtgatggccggcatggtggagtacagcctggacctgcagaacatcaacctgagcgccatcagaaccgtgagagtgctgagacccctgaaggccatcaacagagtgcccagcatgagaatcctggtgaacctgctgctggacaccctgcccatgctgggcaacgtgctgctgctgtgcttcttcgtgttcttcatcttcggcatcatcggcgtgcagctgtgggccggcctgctgagaaacagatgcttcctggaggagaacttcaccatccagggcgacgtggccctgcccccctactaccagcccgaggaggacgacgagatgcccttcatctgcagcctgagcggcgacaacggcatcatgggctgccacgagatcccccccctgaaggagcagggcagagagtgctgcctgagcaaggacgacgtgtacgacttcggcgccggcagacaggacctgaacgccagcggcctgtgcgtgaactggaacagatactacaacgtgtgcagaaccggcagcgccaacccccacaagggcgccatcaacttcgacaacatcggctacgcctggatcgtgatcttccaggtgatcaccctggagggctgggtggagatcatgtactacgtgatggacgcccacagcttctacaacttcatctacttcatcctgctgatcatcgtgggcagcttcttcatgatcaacctgtgcctggtggtgatcgccacccagttcagcgagaccaagcagagagagcacagactgatgctggagcagagacagagatacctgagcagcagcaccgtggccagctacgccgagcccggcgactgctacgaggagatcttccagtacgtgtgccacatcctgagaaaggccaagagaagagccctgggcctgtaccaggccctgcagagcagaagacaggccctgggccccgaggcccccgcccccgccaagcccggcccccacgccaaggagcccagacactaccagctgtgcccccagcacagccccctggacgccaccccccacaccctggtgcagcccatccccgccaccctggccagcgaccccgccagctgcccctgctgccagcacgaggacggcagaagacccagcggcctgggcagcaccgacagcggccaggagggcagcggcagcggcagcagcgccggcggcgaggacgaggccgacggcgacggcgccagaagcagcgaggacggcgccagcagcgagctgggcaaggaggaggaggaggaggagcaggccgacggcgccgtgtggctgtgcggcgacgtgtggagagagaccagagccaagctgagaggcatcgtggacagcaagtacttcaacagaggcatcatgatggccatcctggtgaacaccgtgagcatgggcatcgagcaccacgagcagcccgaggagctgaccaacatcctggagatctgcaacgtggtgttcaccagcatgttcgccctggagatgatcctgaagctggccgccttcggcctgttcgactacctgagaaacccctacaacatcttcgacagcatcatcgtgatcatcagcatctgggagatcgtgggccaggccgacggcggcctgagcgtgctgagaaccttcagactgctgagagtgctgaagctggtgagattcatgcccgccctgagaagacagctggtggtgctgatgaagaccatggacaacgtggccaccttctgcatgctgctgatgctgttcatcttcatcttcagcatcctgggcatgcacatcttcggctgcaagttcagcctgagaaccgacaccggcgacaccgtgcccgacagaaagaacttcgacagcctgctgtgggccatcgtgaccgtgttccagatcctgacccaggaggactggaacgtggtgctgtacaacggcatggccagcaccagcccctgggccagcctgtacttcgtggccctgatgaccttcggcaactacgtgctgttcaacctgctggtggccatcctggtggagggcttccaggccgagggcgacgccaacagaagctacagcgacgaggaccagagcagcagcaacatcgaggagttcgacaagctgcaggagggcctggacagcagcggcgaccccaagctgtgccccatccccatgacccccaacggccacctggaccccagcctgcccctgggcggccacctgggccccgccggcgccgccggccccgcccccagactgagcctgcagcccgaccccatgctggtggccctgggcagcagaaagagcagcgtgatgagcctgggcagaatgagctacgaccagagaagcctgagcagcagcagaagcagctactacggcccctggggcagaagcgccgcctgggccagcagaagaagcagctggaacagcctgaagcacaagccccccagcgccgagcacgagagcctgctgagcgccgagagaggcggcggcgccagagtgtgcgaggtggccgccgacgagggcccccccagagccgcccccctgcacaccccccacgcccaccacatccaccacggcccccacctggcccacagacacagacaccacagaagaaccctgagcctggacaacagagacagcgtggacctggccgagctggtgcccgccgtgggcgcccaccccagagccgcctggagagccgccggccccgcccccggccacgaggactgcaacggcagaatgcccagcatcgccaaggacgtgttcaccaagatgggcgacagaggcgacagaggcgaggacgaggaggagatcgactacaccctgtgcttcagagtgagaaagatgatcgacgtgtacaagcccgactggtgcgaggtgagagaggactggagcgtgtacctgttcagccccgagaacagattcagagtgctgtgccagaccatcatcgcccacaagctgttcgactacgtggtgctggccttcatcttcctgaactgcatcaccatcgccctggagagaccccagatcgaggccggcagcaccgagagaatcttcctgaccgtgagcaactacatcttcaccgccatcttcgtgggcgagatgaccctgaaggtggtgagcctgggcctgtacttcggcgagcaggcctacctgagaagcagctggaacgtgctggacggcttcctggtgttcgtgagcatcatcgacatcgtggtgagcctggccagcgccggcggcgccaagatcctgggcgtgctgagagtgctgagactgctgagaaccctgagacccctgagagtgatcagcagagcccccggcctgaagctggtggtggagaccctgatcagcagcctgaagcccatcggcaacatcgtgctgatctgctgcgccttcttcatcatcttcggcatcctgggcgtgcagctgttcaagggcaagttctaccactgcctgggcgtggacaccagaaacatcaccaacagaagcgactgcatggccgccaactacagatgggtgcaccacaagtacaacttcgacaacctgggccaggccctgatgagcctgttcgtgctggccagcaaggacggctgggtgaacatcatgtacaacggcctggacgccgtggccgtggaccagcagcccgtgaccaaccacaacccctggatgctgctgtacttcatcagcttcctgctgatcgtgagcttcttcgtgctgaacatgttcgtgggcgtggtggtggagaacttccacaagtgcagacagcaccaggaggccgaggaggccagaagaagagaggagaagagactgagaagactggagaagaagagaagaaaggcccagagactgccctactacgccacctactgccacaccagactgctgatccacagcatgtgcaccagccactacctggacatcttcatcaccttcatcatctgcctgaacgtggtgaccatgagcctggagcactacaaccagcccaccagcctggagaccgccctgaagtactgcaactacatgttcaccaccgtgttcgtgctggaggccgtgctgaagctggtggccttcggcctgagaagattcttcaaggacagatggaaccagctggacctggccatcgtgctgctgagcgtgatgggcatcaccctggaggagatcgagatcaacgccgccctgcccatcaaccccaccatcatcagaatcatgagagtgctgagaatcgccagagtgctgaagctgctgaagatggccaccggcatgagagccctgctggacaccgtggtgcaggccctgccccaggtgggcaacctgggcctgctgttcatgctgctgttcttcatctacgccgccctgggcgtggagctgttcggcaagctggtgtgcaacgacgagaacccctgcgagggcatgagcagacacgccaccttcgagaacttcggcatggccttcctgaccctgttccaggtgagcaccggcgacaactggaacggcatcatgaaggacaccctgagagactgcacccacgacgagagaagctgcctgagcagcctgcagttcgtgagccccctgtacttcgtgagcttcgtgctgaccgcccagttcgtgctgatcaacgtggtggtggccgtgctgatgaagcacctggacgacagcaacaaggaggcccaggaggacgccgagatggacgccgagctggagctggagatggcccacggcctgggccccggccccagactgcccaccggcagccccggcgcccccggcagaggccccggcggcgccggcggcggcggcgacaccgagggcggcctgtgcagaagatgctacagccccgcccaggagaacctgtggctggacagcgtgagcctgatcatcaaggacagcctggagggcgagctgaccatcatcgacaacctgagcggcagcatcttccaccactacagcagccccgccggctgcaagaagtgccaccacgacaagcaggaggtgcagctggccgagaccgaggccttcagcctgaacagcgacagaagcagcagcatcctgctgggcgacgacctgagcctggaggaccccaccgcctgcccccccggcagaaaggacagcaagggcgagctggacccccccgagcccatgagagtgggcgacctgggcgagtgcttcttccccctgagcagcaccgccgtgagccccgaccccgagaacttcctgtgcgagatggaggagatccccttcaaccccgtgagaagctggctgaagcacgacagcagccaggccccccccagccccttcagccccgacgccagcagccccctgctgcccatgcccgccgagttcttccaccccgccgtgagcgccagccagaagggccccgagaagggcaccggcaccggcaccctgcccaagatcgccctgcagggcagctgggccagcctgagaagccccagagtgaactgcaccctgctgagacaggtgcccaccccccccagaccctag

SEQ ID NO: 75081 - DNA, 1041 bp, synthetic construct
  misc_feature 1..1041: note = Description of Artificial Sequence: Synthetic coding sequence
  source 1..1041: mol_type = other DNA
atgatggacaagttcagaatgatcttccagttcctgcagagcaaccaggagagcttcatgaacggcatctgcggcatcatggccctggccagcgcccagatgtacagcgccttcgacttcaactgcccctgcctgcccggctacaacgccgcctacagcgccggcatcctgctggccccccccctggtgctgttcctgctgggcctggtgatgaacaacaacgtgagcatgctggccgaggagtggaagagacccctgggcagaagagccaaggaccccgccgtgctgagatacatgttctgcagcatggcccagagagccctgatcgcccccgtggtgtgggtggccgtgaccctgctggacggcaagtgcttcctgtgcgccttctgcaccgccgtgcccgtgagcgccctgggcaacggcagcctggcccccggcctgcccgcccccgagctggccagactgctggccagagtgccctgccccgagatctacgacggcgactggctgctggccagagaggtggccgtgagatacctgagatgcatcagccaggccctgggctggagcttcgtgctgctgaccaccctgctggccttcgtggtgagaagcgtgagaccctgcttcacccaggccgccttcctgaagagcaagtactggagccactacatcgacatcgagagaaagctgttcgacgagacctgcaccgagcacgccaaggccttcgccaaggtgtgcatccagcagttcttcgaggccatgaaccacgacctggagctgggccacacccacggcaccctggccaccgcccccgccagcgccgccgcccccaccacccccgacggcgccgaggaggagagagagaagctgagaggcatcaccgaccagggcaccatgaacagactgctgaccagctggcacaagtgcaagccccccctgagactgggccaggaggagccccccctgatgggcaacggctgggccggcggcggccccagaccccccagaaaggaggtggccacctacttcagcaaggtgtag

SEQ ID NO: 75082 - DNA, 972 bp, synthetic construct
  misc_feature 1..972: note = Description of Artificial Sequence: Synthetic coding sequence
  source 1..972: mol_type = other DNA
atggccgccctgatcgccgagaacttcagattcctgagcctgttcttcaagagcaaggacgtgatgatcttcaacggcctggtggccctgggcaccgtgggcagccaggagctgttcagcgtggtggccttccactgcccctgcagccccgccagaaactacctgtacggcctggccgccatcggcgtgcccgccctggtgctgttcatcatcggcatcatcctgaacaaccacacctggaacctggtggccgagtgccagcacagaagaaccaagaactgcagcgccgcccccaccttcctgctgctgagcagcatcctgggcagagccgccgtggcccccgtgacctggagcgtgatcagcctgctgagaggcgaggcctacgtgtgcgccctgagcgagttcgtggaccccagcagcctgaccgccagagaggagcacttccccagcgcccacgccaccgagatcctggccagattcccctgcaaggagaaccccgacaacctgagcgacttcagagaggaggtgagcagaagactgagatacgagagccagctgttcggctggctgctgatcggcgtggtggccatcctggtgttcctgaccaagtgcctgaagcactactgcagccccctgagctacagacaggaggcctactgggcccagtacagagccaacgaggaccagctgttccagagaaccgccgaggtgcacagcagagtgctggccgccaacaacgtgagaagattcttcggcttcgtggccctgaacaaggacgacgaggagctgatcgccaacttccccgtggagggcacccagcccagaccccagtggaacgccatcaccggcgtgtacctgtacagagagaaccagggcctgcccctgtacagcagactgcacaagtgggcccagggcctggccggcaacggcgccgcccccgacaacgtggagatggccctgctgcccagctag

SEQ ID NO: 75083 - DNA, 972 bp, synthetic construct; identical to SEQ ID NO: 75082
  misc_feature 1..972: note = Description of Artificial Sequence: Synthetic coding sequence
  source 1..972: mol_type = other DNA

SEQ ID NO: 75084 - DNA, 657 bp, synthetic construct
  misc_feature 1..657: note = Description of Artificial Sequence: Synthetic coding sequence
  source 1..657: mol_type = other DNA
atggccgccctgatcgccgagaacttcagattcctgagcctgttcttcaagagcaaggacgtgatgatcttcaacggcctggtggccctgggcaccgtgggcagccaggagctgttcagcgtggtggccttccactgcccctgcagccccgccagaaactacctgtacggcctggccgccatcggcgtgcccgccctggtgctgttcatcatcggcatcatcctgaacaaccacacctggaacctggtggccgagtgccagcacagaagaaccaagaactgcagcgccgcccccaccttcctgctgctgagcagcatcctgggcagagccgccgtggcccccgtgacctggagcgtgatcagcctgctgagaggcgaggcctacgtgtgcgccctgagcgagttcgtggaccccagcagcctgaccgccagagaggagcacttccccagcgcccacgccaccgagatcctggccagattcccctgcaaggagaaccccgacaacctgagcgacttcagagaggaggtgagcagaagactgagatacgagagccaggtgagaagctgcgccaagggcagcagcagcagcctggtggtggccggcgagagaagcggcgacggcctggtgctgaagctgggcctggtgctgagaggctag

SEQ ID NO: 75085 - DNA, 891 bp, synthetic construct
  misc_feature 1..891: note = Description of Artificial Sequence: Synthetic coding sequence
  source 1..891: mol_type = other DNA
atggagagcatggccgtggccaccgacggcggcgagagacccggcgtgcccgccggcagcggcctgagcgccagccagagaagagccgagctgagaagaagaaagctgctgatgaacagcgagcagagaatcaacagaatcatgggcttccacagacccggcagcggcgccgaggaggagagccagaccaagagcaagcagcaggacagcgacaagctgaacagcctgagcgtgcccagcgtgagcaagagagtggtgctgggcgacagcgtgagcaccggcaccaccgaccagcagggcggcgtggccgaggtgaagggcacccagctgggcgacaagctggacagcttcatcaagccccccgagtgcagcagcgacgtgaacctggagctgagacagagaaacagaggcgacctgaccgccgacagcgtgcagagaggcagcagacacggcctggagcagtacctgagcagattcgaggaggccatgaagctgagaaagcagctgatcagcgagaagcccagccaggaggacggcaacaccaccgaggagttcgacagcttcagaatcttcagactggtgggctgcgccctgctggccctgggcgtgagagccttcgtgtgcaagtacctgagcatcttcgcccccttcctgaccctgcagctggcctacatgggcctgtacaagtacttccccaagagcgagaagaagatcaagaccaccgtgctgaccgccgccctgctgctgagcggcatccccgccgaggtgatcaacagaagcatggacacctacagcaagatgggcgaggtgttcaccgacctgtgcgtgtacttcttcaccttcatcttctgccacgagctgctggactactggggcagcgaggtgccctag

SEQ ID NO: 75086 - DNA, 1113 bp, synthetic construct
  misc_feature 1..1113: note = Description of Artificial Sequence: Synthetic coding sequence
  source 1..1113: mol_type = other DNA
atgctgggcgccgtggagggccccagatggaagcaggccgaggacatcagagacatctacgacttcagagacgtgctgggcaccggcgccttcagcgaggtgatcctggccgaggacaagagaacccagaagctggtggccatcaagtgcatcgccaaggaggccctggagggcaaggagggcagcatggagaacgagatcgccgtgctgcacaagatcaagcaccccaacatcgtggccctggacgacatctacgagagcggcggccacctgtacctgatcatgcagctggtgagcggcggcgagctgttcgacagaatcgtggagaagggcttctacaccgagagagacgccagcagactgatcttccaggtgctggacgccgtgaagtacctgcacgacctgggcatcgtgcacagagacctgaagcccgagaacctgctgtactacagcctggacgaggacagcaagatcatgatcagcgacttcggcctgagcaagatggaggaccccggcagcgtgctgagcaccgcctgcggcacccccggctacgtggcccccgaggtgctggcccagaagccctacagcaaggccgtggactgctggagcatcggcgtgatcgcctacatcctgctgtgcggctacccccccttctacgacgagaacgacgccaagctgttcgagcagatcctgaaggccgagtacgagttcgacagcccctactgggacgacatcagcgacagcgccaaggacttcatcagacacctgatggagaaggaccccgagaagagattcacctgcgagcaggccctgcagcacccctggatcgccggcgacaccgccctggacaagaacatccaccagagcgtgagcgagcagatcaagaagaacttcgccaagagcaagtggaagcaggccttcaacgccaccgccgtggtgagacacatgagaaagctgcagctgggcaccagccaggagggccagggccagaccgccagccacggcgagctgctgacccccgtggccggcggccccgccgccggctgctgctgcagagactgctgcgtggagcccggcaccgagctgagccccaccctgccccaccagctgtag

SEQ ID NO: 75087 - DNA, 1437 bp, synthetic construct
  misc_feature 1..1437: note = Description of Artificial Sequence: Synthetic coding sequence
  source 1..1437: mol_type = other DNA
atggccaccatcacctgcaccagattcaccgaggagtaccagctgttcgaggagctgggcaagggcgccttcagcgtggtgagaagatgcgtgaaggtgctggccggccaggagtacgccgccaagatcatcaacaccaagaagctgagcgccagagaccaccagaagctggagagagaggccagaatctgcagactgctgaagcaccccaacatcgtgagactgcacgacagcatcagcgaggagggccaccactacctgatcttcgacctggtgaccggcggcgagctgttcgaggacatcgtggccagagagtactacagcgaggccgacgccagccactgcatccagcagatcctggaggccgtgctgcactgccaccagatgggcgtggtgcacagagacctgaagcccgagaacctgctgctggccagcaagctgaagggcgccgccgtgaagctggccgacttcggcctggccatcgaggtggagggcgagcagcaggcctggttcggcttcgccggcacccccggctacctgagccccgaggtgctgagaaaggacccctacggcaagcccgtggacctgtgggcctgcggcgtgatcctgtacatcctgctggtgggctacccccccttctgggacgaggaccagcacagactgtaccagcagatcaaggccggcgcctacgacttccccagccccgagtgggacaccgtgacccccgaggccaaggacctgatcaacaagatgctgaccatcaaccccagcaagagaatcaccgccgccgaggccctgaagcacccctggatcagccacagaagcaccgtggccagctgcatgcacagacaggagaccgtggactgcctgaagaagttcaacgccagaagaaagctgaagggcgccatcctgaccaccatgctggccaccagaaacttcagcggcggcaagagcggcggcaacaagaagagcgacggcgtgaaggagagcagcgagagcaccaacaccaccatcgaggacgaggacaccaaggtgagaaagcaggagatcatcaaggtgaccgagcagctgatcgaggccatcagcaacggcgacttcgagagctacaccaagatgtgcgaccccggcatgaccgccttcgagcccgaggccctgggcaacctggtggagggcctggacttccacagattctacttcgagaacctgtggagcagaaacagcaagcccgtgcacaccaccatcctgaacccccacatccacctgatgggcgacgagagcgcctgcatcgcctacatcagaatcacccagtacctggacgccggcggcatccccagaaccgcccagagcgaggagaccagagtgtggcacagaagagacggcaagtggcagatcgtgcacttccacagaagcggcgcccccagcgtgctgccccactag

SEQ ID NO: 75088 - DNA, 1470 bp, synthetic construct
  misc_feature 1..1470: note = Description of Artificial Sequence: Synthetic coding sequence
  source 1..1470: mol_type = other DNA
atggccaccatcacctgcaccagattcaccgaggagtaccagctgttcgaggagctgggcaagggcgccttcagcgtggtgagaagatgcgtgaaggtgctggccggccaggagtacgccgccaagatcatcaacaccaagaagctgagcgccagagaccaccagaagctggagagagaggccagaatctgcagactgctgaagcaccccaacatcgtgagactgcacgacagcatcagcgaggagggccaccactacctgatcttcgacctggtgaccggcggcgagctgttcgaggacatcgtggccagagagtactacagcgaggccgacgccagccactgcatccagcagatcctggaggccgtgctgcactgccaccagatgggcgtggtgcacagagacctgaagcccgagaacctgctgctggccagcaagctgaagggcgccgccgtgaagctggccgacttcggcctggccatcgaggtggagggcgagcagcaggcctggttcggcttcgccggcacccccggctacctgagccccgaggtgctgagaaaggacccctacggcaagcccgtggacctgtgggcctgcggcgtgatcctgtacatcctgctggtgggctacccccccttctgggacgaggaccagcacagactgtaccagcagatcaaggccggcgcctacgacttccccagccccgagtgggacaccgtgacccccgaggccaaggacctgatcaacaagatgctgaccatcaaccccagcaagagaatcaccgccgccgaggccctgaagcacccctggatcagccacagaagcaccgtggccagctgcatgcacagacaggagaccgtggactgcctgaagaagttcaacgccagaagaaagctgaagggcgccatcctgaccaccatgctggccaccagaaacttcagcggcggcaagagcggcggcaacaagaagagcgacggcgtgaagaagagaaagagcagcagcagcgtgcagctgatggagagcagcgagagcaccaacaccaccatcgaggacgaggacaccaaggtgagaaagcaggagatcatcaaggtgaccgagcagctgatcgaggccatcagcaacggcgacttcgagagctacaccaagatgtgcgaccccggcatgaccgccttcgagcccgaggccctgggcaacctggtggagggcctggacttccacagattctacttcgagaacctgtggagcagaaacagcaagcccgtgcacaccaccatcctgaacccccacatccacctgatgggcgacgagagcgcctgcatcgcctacatcagaatcacccagtacctggacgccggcggcatccccagaaccgcccagagcgaggagaccagagtgtggcacagaagagacggcaagtggcagatcgtgcacttccacagaagcggcgcccccagcgtgctgccccactag

SEQ ID NO: 75089 - DNA, 276 bp, synthetic construct
  misc_feature 1..276: note = Description of Artificial Sequence: Synthetic coding sequence
  source 1..276: mol_type = other DNA
atggccaccatcacctgcaccagattcaccgaggagtaccagctgttcgaggagctgggcaagggcgccttcagcgtggtgagaagatgcgtgaaggtgctggccggccaggagtacgccgccaagatcatcaacaccaagaagctgagcgccagagaccaccagaagctggagagagaggccagaatctgcagactgctgaagcaccccaacatcgtgagactgcacgacagcatcagcgaggagggccaccactacctgatcttcgacctgtag

SEQ ID NO: 75090 - DNA, 1554 bp, synthetic construct
  misc_feature 1..1554: note = Description of Artificial Sequence: Synthetic coding sequence
  source 1..1554: mol_type = other DNA
atggccaccaccgtgacctgcaccagattcaccgacgagtaccagctgtacgaggacatcggcaagggcgccttcagcgtggtgagaagatgcgtgaagctgtgcaccggccacgagtacgccgccaagatcatcaacaccaagaagctgagcgccagagaccaccagaagctggagagagaggccagaatctgcagactgctgaagcacagcaacatcgtgagactgcacgacagcatcagcgaggagggcttccactacctggtgttcgacctggtgaccggcggcgagctgttcgaggacatcgtggccagagagtactacagcgaggccgacgccagccactgcatccagcagatcctggaggccgtgctgcactgccaccagatgggcgtggtgcacagagacctgaagcccgagaacctgctgctggccagcaagtgcaagggcgccgccgtgaagctggccgacttcggcctggccatcgaggtgcagggcgaccagcaggcctggttcggcttcgccggcacccccggctacctgagccccgaggtgctgagaaaggaggcctacggcaagcccgtggacatctgggcctgcggcgtgatcctgtacatcctgctggtgggctacccccccttctgggacgaggaccagcacaagctgtaccagcagatcaaggccggcgcctacgacttccccagccccgagtgggacaccgtgacccccgaggccaagaacctgatcaaccagatgctgaccatcaaccccgccaagagaatcaccgcccacgaggccctgaagcacccctgggtgtgccagagaagcaccgtggccagcatgatgcacagacaggagaccgtggagtgcctgaagaagttcaacgccagaagaaagctgaagggcgccatcctgaccaccatgctggccaccagaaacttcagcgccaagagcctgctgaacaagaaggccgacggcgtgaagccccagaccaacagcaccaagaacagcgccgccgccaccagccccaagggcaccctgccccccgccgccctggagccccagaccaccgtgatccacaaccccgtggacggcatcaaggagagcagcgacagcgccaacaccaccatcgaggacgaggacgccaaggccagaaagcaggagatcatcaagaccaccgagcagctgatcgaggccgtgaacaacggcgacttcgaggcctacgccaagatctgcgaccccggcctgaccagcttcgagcccgaggccctgggcaacctggtggagggcatggacttccacagattctacttcgagaacctgctggccaagaacagcaagcccatccacaccaccatcctgaacccccacgtgcacgtgatcggcgaggacgccgcctgcatcgcctacatcagactgacccagtacatcgacggccagggcagacccagaaccagccagagcgaggagaccagagtgtggcacagaagagacggcaagtggcagaacgtgcacttccactgcagcggcgcccccgtggcccccctgcagtag

SEQ ID NO: 75091 - DNA, 1350 bp, synthetic construct
  misc_feature 1..1350: note = Description of Artificial Sequence: Synthetic coding sequence
  source 1..1350: mol_type = other DNA
atggccaccaccgtgacctgcaccagattcaccgacgagtaccagctgtacgaggacatcggcaagggcgccttcagcgtggtgagaagatgcgtgaagctgtgcaccggccacgagtacgccgccaagatcatcaacaccaagaagctgagcgccagagaccaccagaagctggagagagaggccagaatctgcagactgctgaagcacagcaacatcgtgagactgcacgacagcatcagcgaggagggcttccactacctggtgttcgacctggtgaccggcggcgagctgttcgaggacatcgtggccagagagtactacagcgaggccgacgccagccactgcatccagcagatcctggaggccgtgctgcactgccaccagatgggcgtggtgcacagagacctgaagcccgagaacctgctgctggccagcaagtgcaagggcgccgccgtgaagctggccgacttcggcctggccatcgaggtgcagggcgaccagcaggcctggttcggcttcgccggcacccccggctacctgagccccgaggtgctgagaaaggaggcctacggcaagcccgtggacatctgggcctgcggcgtgatcctgtacatcctgctggtgggctacccccccttctgggacgaggaccagcacaagctgtaccagcagatcaaggccggcgcctacgacttccccagccccgagtgggacaccgtgacccccgaggccaagaacctgatcaaccagatgctgaccatcaaccccgccaagagaatcaccgcccacgaggccctgaagcacccctgggtgtgccagagaagcaccgtggccagcatgatgcacagacaggagaccgtggagtgcctgaagaagttcaacgccagaagaaagctgaagggcgccatcctgaccaccatgctggccaccagaaacttcagcgccagaaagcaggagatcatcaagaccaccgagcagctgatcgaggccgtgaacaacggcgacttcgaggcctacgccaagatctgcgaccccggcctgaccagcttcgagcccgaggccctgggcaacctggtggagggcatggacttccacagattctacttcgagaacctgctggccaagaacagcaagcccatccacaccaccatcctgaacccccacgtgcacgtgatcggcgaggacgccgcctgcatcgcctacatcagactgacccagtacatcgacggccagggcagacccagaaccagccagagcgaggagaccagagtgtggcacagaagagacggcaagtggcagaacgtgcacttccactgcagcggcgcccccgtggcccccctgcagtag

SEQ ID NO: 75092 - DNA, 1479 bp, synthetic construct
  misc_feature 1..1479: note = Description of Artificial Sequence: Synthetic coding sequence
  source 1..1479: mol_type = other DNA
atggccaccaccgtgacctgcaccagattcaccgacgagtaccagctgtacgaggacatcggcaagggcgccttcagcgtggtgagaagatgcgtgaagctgtgcaccggccacgagtacgccgccaagatcatcaacaccaagaagctgagcgccagagaccaccagaagctggagagagaggccagaatctgcagactgctgaagcacagcaacatcgtgagactgcacgacagcatcagcgaggagggcttccactacctggtgttcgacctggtgaccggcggcgagctgttcgaggacatcgtggccagagagtactacagcgaggccgacgccagccactgcatccagcagatcctggaggccgtgctgcactgccaccagatgggcgtggtgcacagagacctgaagcccgagaacctgctgctggccagcaagtgcaagggcgccgccgtgaagctggccgacttcggcctggccatcgaggtgcagggcgaccagcaggcctggttcggcttcgccggcacccccggctacctgagccccgaggtgctgagaaaggaggcctacggcaagcccgtggacatctgggcctgcggcgtgatcctgtacatcctgctggtgggctacccccccttctgggacgaggaccagcacaagctgtaccagcagatcaaggccggcgcctacgacttccccagccccgagtgggacaccgtgacccccgaggccaagaacctgatcaaccagatgctgaccatcaaccccgccaagagaatcaccgcccacgaggccctgaagcacccctgggtgtgccagagaagcaccgtggccagcatgatgcacagacaggagaccgtggagtgcctgaagaagttcaacgccagaagaaagctgaagggcgccatcctgaccaccatgctggccaccagaaacttcagcgtgggcagacagaccaccgcccccgccaccatgagcaccgccgccagcggcaccaccatgggcctggtggagcaggccaagagcctgctgaacaagaaggccgacggcgtgaaggagccccagaccaccgtgatccacaaccccgtggacggcatcaaggagagcagcgacagcgccaacaccaccatcgaggacgaggacgccaaggccagaaagcaggagatcatcaagaccaccgagcagctgatcgaggccgtgaacaacggcgacttcgaggcctacgccttctacttcgagaacctgctggccaagaacagcaagcccatccacaccaccatcctgaacccccacgtgcacgtgatcggcgaggacgccgcctgcatcgcctacatcagactgacccagtacatcgacggccagggcagacccagaaccagccagagcgaggagaccagagtgtggcacagaagagacggcaagtggcagaacgtgcacttccactgcagcggcgcccccgtggcccccctgcagtag

SEQ ID NO: 75093 - DNA, 1629 bp, synthetic construct
  misc_feature 1..1629: note = Description of Artificial Sequence: Synthetic coding sequence
  source 1..1629: mol_type = other DNA
atggccaccaccgtgacctgcaccagattcaccgacgagtaccagctgtacgaggacatcggcaagggcgccttcagcgtggtgagaagatgcgtgaagctgtgcaccggccacgagtacgccgccaagatcatcaacaccaagaagctgagcgccagagaccaccagaagctggagagagaggccagaatctgcagactgctgaagcacagcaacatcgtgagactgcacgacagcatcagcgaggagggcttccactacctggtgttcgacctggtgaccggcggcgagctgttcgaggacatcgtggccagagagtactacagcgaggccgacgccagccactgcatccagcagatcctggaggccgtgctgcactgccaccagatgggcgtggtgcacagagacctgaagcccgagaacctgctgctggccagcaagtgcaagggcgccgccgtgaagctggccgacttcggcctggccatcgaggtgcagggcgaccagcaggcctggttcggcttcgccggcacccccggctacctgagccccgaggtgctgagaaaggaggcctacggcaagcccgtggacatctgggcctgcggcgtgatcctgtacatcctgctggtgggctacccccccttctgggacgaggaccagcacaagctgtaccagcagatcaaggccggcgcctacgacttccccagccccgagtgggacaccgtgacccccgaggccaagaacctgatcaaccagatgctgaccatcaaccccgccaagagaatcaccgcccacgaggccctgaagcacccctgggtgtgccagagaagcaccgtggccagcatgatgcacagacaggagaccgtggagtgcctgaagaagttcaacgccagaagaaagctgaagggcgccatcctgaccaccatgctggccaccagaaacttcagcgtgggcagacagaccaccgcccccgccaccatgagcaccgccgccagcggcaccaccatgggcctggtggagcaggccaagagcctgctgaacaagaaggccgacggcgtgaagccccagaccaacagcaccaagaacagcgccgccgccaccagccccaagggcaccctgccccccgccgccctggagccccagaccaccgtgatccacaaccccgtggacggcatcaaggagagcagcgacagcgccaacaccaccatcgaggacgaggacgccaaggccagaaagcaggagatcatcaagaccaccgagcagctgatcgaggccgtgaacaacggcgacttcgaggcctacgccaagatctgcgaccccggcctgaccagcttcgagcccgaggccctgggcaacctggtggagggcatggacttccacagattctacttcgagaacctgctggccaagaacagcaagcccatccacaccaccatcctgaacccccacgtgcacgtgatcggcgaggacgccgcctgcatcgcctacatcagactgacccagtacatcgacggccagggcagacccagaaccagccagagcgaggagaccagagtgtggcacagaagagacggcaagtggcagaacgtgcacttccactgcagcggcgcccccgtggcccccctgcagtag

SEQ ID NO: 75094 - DNA, 1440 bp, synthetic construct
  misc_feature 1..1440: note = Description of Artificial Sequence: Synthetic coding sequence
  source 1..1440: mol_type = other DNA
atggccaccaccgtgacctgcaccagattcaccgacgagtaccagctgtacgaggacatcggcaagggcgccttcagcgtggtgagaagatgcgtgaagctgtgcaccggccacgagtacgccgccaagatcatcaacaccaagaagctgagcgccagagaccaccagaagctggagagagaggccagaatctgcagactgctgaagcacagcaacatcgtgagactgcacgacagcatcagcgaggagggcttccactacctggtgttcgacctggtgaccggcggcgagctgttcgaggacatcgtggccagagagtactacagcgaggccgacgccagccactgcatccagcagatcctggaggccgtgctgcactgccaccagatgggcgtggtgcacagagacctgaagcccgagaacctgctgctggccagcaagtgcaagggcgccgccgtgaagctggccgacttcggcctggccatcgaggtgcagggcgaccagcaggcctggttcggcttcgccggcacccccggctacctgagccccgaggtgctgagaaaggaggcctacggcaagcccgtggacatctgggcctgcggcgtgatcctgtacatcctgctggtgggctacccccccttctgggacgaggaccagcacaagctgtaccagcagatcaaggccggcgcctacgacttccccagccccgagtgggacaccgtgacccccgaggccaagaacctgatcaaccagatgctgaccatcaaccccgccaagagaatcaccgcccacgaggccctgaagcacccctgggtgtgccagagaagcaccgtggccagcatgatgcacagacaggagaccgtggagtgcctgaagaagttcaacgccagaagaaagctgaagggcgccatcctgaccaccatgctggccaccagaaacttcagcgccgccaagagcctgctgaacaagaaggccgacggcgtgaaggagagcagcgacagcgccaacaccaccatcgaggacgaggacgccaaggccagaaagcaggagatcatcaagaccaccgagcagctgatcgaggccgtgaacaacggcgacttcgaggcctacgccaagatctgcgaccccggcctgaccagcttcgagcccgaggccctgggcaacctggtggagggcatggacttccacagattctacttcgagaacctgctggccaagaacagcaagcccatccacaccaccatcctgaacccccacgtgcacgtgatcggcgaggacgccgcctgcatcgcctacatcagactgacccagtacatcgacggccagggcagacccagaaccagccagagcgaggagaccagagtgtggcacagaagagacggcaagtggcagaacgtgcacttccactgcagcggcgcccccgtggcccccctgcagtag

SEQ ID NO: 75095 - DNA, 1512 bp, synthetic construct
  misc_feature 1..1512: note = Description of Artificial Sequence: Synthetic coding sequence
  source 1..1512: mol_type = other DNA
atggccaccaccgtgacctgcaccagattcaccgacgagtaccagctgtacgaggacatcggcaagggcgccttcagcgtggtgagaagatgcgtgaagctgtgcaccggccacgagtacgccgccaagatcatcaacaccaagaagctgagcgccagagaccaccagaagctggagagagaggccagaatctgcagactgctgaagcacagcaacatcgtgagactgcacgacagcatcagcgaggagggcttccactacctggtgttcgacctggtgaccggcggcgagctgttcgaggacatcgtggccagagagtactacagcgaggccgacgccagccactgcatccagcagatcctggaggccgtgctgcactgccaccagatgggcgtggtgcacagagacctgaagcccgagaacctgctgctggccagcaagtgcaagggcgccgccgtgaagctggccgacttcggcctggccatcgaggtgcagggcgaccagcaggcctggttcggcttcgccggcacccccggctacctgagccccgaggtgctgagaaaggaggcctacggcaagcccgtggacatctgggcctgcggcgtgatcctgtacatcctgctggtgggctacccccccttctgggacgaggaccagcacaagctgtaccagcagatcaaggccggcgcctacgacttccccagccccgagtgggacaccgtgacccccgaggccaagaacctgatcaaccagatgctgaccatcaaccccgccaagagaatcaccgcccacgaggccctgaagcacccctgggtgtgccagagaagcaccgtggccagcatgatgcacagacaggagaccgtggagtgcctgaagaagttcaacgccagaagaaagctgaagggcgccatcctgaccaccatgctggccaccagaaacttcagcgccgccaagagcctgctgaacaagaaggccgacggcgtgaagccccagaccaacagcaccaagaacagcgccgccgccaccagccccaagggcaccctgccccccgccgccctggagagcagcgacagcgccaacaccaccatcgaggacgaggacgccaaggccagaaagcaggagatcatcaagaccaccgagcagctgatcgaggccgtgaacaacggcgacttcgaggcctacgccaagatctgcgaccccggcctgaccagcttcgagcccgaggccctgggcaacctggtggagggcatggacttccacagattctacttcgagaacctgctggccaagaacagcaagcccatccacaccaccatcctgaacccccacgtgcacgtgatcggcgaggacgccgcctgcatcgcctacatcagactgacccagtacatcgacggccagggcagacccagaaccagccagagcgaggagaccagagtgtggcacagaagagacggcaagtggcagaacgtgcacttccactgcagcggcgcccccgtggcccccctgcagtag

SEQ ID NO: 75096 - DNA, 1557 bp, synthetic construct
  misc_feature 1..1557: note = Description of Artificial Sequence: Synthetic coding sequence
  source 1..1557: mol_type = other DNA
atggccaccaccgtgacctgcaccagattcaccgacgagtaccagctgtacgaggacatcggcaagggcgccttcagcgtggtgagaagatgcgtgaagctgtgcaccggccacgagtacgccgccaagatcatcaacaccaagaagctgagcgccagagaccaccagaagctggagagagaggccagaatctgcagactgctgaagcacagcaacatcgtgagactgcacgacagcatcagcgaggagggcttccactacctggtgttcgacctggtgaccggcggcgagctgttcgaggacatcgtggccagagagtactacagcgaggccgacgccagccactgcatccagcagatcctggaggccgtgctgcactgccaccagatgggcgtggtgcacagagacctgaagcccgagaacctgctgctggccagcaagtgcaagggcgccgccgtgaagctggccgacttcggcctggccatcgaggtgcagggcgaccagcaggcctggttcggcttcgccggcacccccggctacctgagccccgaggtgctgagaaaggaggcctacggcaagcccgtggacatctgggcctgcggcgtgatcctgtacatcctgctggtgggctacccccccttctgggacgaggaccagcacaagctgtaccagcagatcaaggccggcgcctacgacttccccagccccgagtgggacaccgtgacccccgaggccaagaacctgatcaaccagatgctgaccatcaaccccgccaagagaatcaccgcccacgaggccctgaagcacccctgggtgtgccagagaagcaccgtggccagcatgatgcacagacaggagaccgtggagtgcctgaagaagttcaacgccagaagaaagctgaagggcgccatcctgaccaccatgctggccaccagaaacttcagcgccgccaagagcctgctgaacaagaaggccgacggcgtgaagccccagaccaacagcaccaagaacagcgccgccgccaccagccccaagggcaccctgccccccgccgccctggagccccagaccaccgtgatccacaaccccgtggacggcatcaaggagagcagcgacagcgccaacaccaccatcgaggacgaggacgccaaggccagaaagcaggagatcatcaagaccaccgagcagctgatcgaggccgtgaacaacggcgacttcgaggcctacgccaagatctgcgaccccggcctgaccagcttcgagcccgaggccctgggcaacctggtggagggcatggacttccacagattctacttcgagaacctgctggccaagaacagcaagcccatccacaccaccatcctgaacccccacgtgcacgtgatcggcgaggacgccgcctgcatcgcctacatcagactgacccagtacatcgacggccagggcagacccagaaccagccagagcgaggagaccagagtgtggcacagaagagacggcaagtggcagaacgtgcacttccactgcagcggcgcccccgtggcccccctgcagtag

SEQ ID NO: 75097 - DNA, 2001 bp, synthetic construct
  misc_feature 1..2001: note = Description of Artificial Sequence: Synthetic coding sequence
  source 1..2001: mol_type = other DNA
atggccaccaccgtgacctgcaccagattcaccgacgagtaccagctgtacgaggacatcggcaagggcgccttcagcgtggtgagaagatgcgtgaagctgtgcaccggccacgagtacgccgccaagatcatcaacaccaagaagctgagcgccagagaccaccagaagctggagagagaggccagaatctgcagactgctgaagcacagcaacatcgtgagactgcacgacagcatcagcgaggagggcttccactacctggtgttcgacctggtgaccggcggcgagctgttcgaggacatcgtggccagagagtactacagcgaggccgacgccagccactgcatccagcagatcctggaggccgtgctgcactgccaccagatgggcgtggtgcacagagacctgaagcccgagaacctgctgctggccagcaagtgcaagggcgccgccgtgaagctggccgacttcggcctggccatcgaggtgcagggcgaccagcaggcctggttcggcttcgccggcacccccggctacctgagccccgaggtgctgagaaaggaggcctacggcaagcccgtggacatctgggcctgcggcgtgatcctgtacatcctgctggtgggctacccccccttctgggacgaggaccagcacaagctgtaccagcagatcaaggccggcgcctacgacttccccagccccgagtgggacaccgtgacccccgaggccaagaacctgatcaaccagatgctgaccatcaaccccgccaagagaatcaccgcccacgaggccctgaagcacccctgggtgtgccagagaagcaccgtggccagcatgatgcacagacaggagaccgtggagtgcctgaagaagttcaacgccagaagaaagctgaagggcgccatcctgaccaccatgctggccaccagaaacttcagcgtgggcagacagaccaccgcccccgccaccatgagcaccgccgccagcggcaccaccatgggcctggtggagcaggccaagagcctgctgaacaagaaggccgacggcgtgaagccccagaccaacagcaccaagaacagcgccgccgccaccagccccaagggcaccctgccccccgccgccctggagccccagaccaccgtgatccacaaccccgtggacggcatcaaggagagcagcgacagcgccaacaccaccatcgaggacgaggacgccaaggcccccagagtgcccgacatcctgagcagcgtgagaagaggcagcggcgcccccgaggccgagggccccctgccctgccccagccccgcccccttcagccccctgcccgcccccagccccagaatcagcgacatcctgaacagcgtgagaagaggcagcggcacccccgaggccgagggccccctgagcgccggcccccccccctgcctgagccccgccctgctgggccccctgagcagccccagccccagaatcagcgacatcctgaacagcgtgagaagaggcagcggcacccccgaggccgagggccccagccccgtgggcccccccccctgccccagccccaccatccccggccccctgcccacccccagcagaaagcaggagatcatcaagaccaccgagcagctgatcgaggccgtgaacaacggcgacttcgaggcctacgccaagatctgcgaccccggcctgaccagcttcgagcccgaggccctgggcaacctggtggagggcatggacttccacagattctacttcgagaacctgctggccaagaacagcaagcccatccacaccaccatcctgaacccccacgtgcacgtgatcggcgaggacgccgcctgcatcgcctacatcagactgacccagtacatcgacggccagggcagacccagaaccagccagagcgaggagaccagagtgtggcacagaagagacggcaagtggcagaacgtgcacttccactgcagcggcgcccccgtggcccccctgcagtag

SEQ ID NO: 75098 - DNA, 1629 bp, synthetic construct; identical to SEQ ID NO: 75093
  misc_feature 1..1629: note = Description of Artificial Sequence: Synthetic coding sequence
  source 1..1629: mol_type = other DNA

SEQ ID NO: 75099 - DNA, 1557 bp, synthetic construct; identical to SEQ ID NO: 75096
  misc_feature 1..1557: note = Description of Artificial Sequence: Synthetic coding sequence
  source 1..1557: mol_type = other DNA

SEQ ID NO: 75100 - DNA, 918 bp, synthetic construct
  misc_feature 1..918: note = Description of Artificial Sequence: Synthetic coding sequence
  source 1..918: mol_type = other DNA
atgggcgtggtgcacagagacctgaagcccgagaacctgctgctggccagcaagtgcaagggcgccgccgtgaagctggccgacttcggcctggccatcgaggtgcagggcgaccagcaggcctggttcggcttcgccggcacccccggctacctgagccccgaggtgctgagaaaggaggcctacggcaagcccgtggacatctgggcctgcggcgtgatcctgtacatcctgctggtgggctacccccccttctgggacgaggaccagcacaagctgtaccagcagatcaaggccggcgcctacgacttccccagccccgagtgggacaccgtgacccccgaggccaagaacctgatcaaccagatgctgaccatcaaccccgccaagagaatcaccgcccacgaggccctgaagcacccctgggtgtgccagagaagcaccgtggccagcatgatgcacagacaggagaccgtggagtgcctgaagaagttcaacgccagaagaaagctgaagggcgccatcctgaccaccatgctggccaccagaaacttcagcgtgggcagacagaccaccgcccccgccaccatgagcaccgccgccagcggcaccaccatgggcctggtggagcaggccaagagcctgctgaacaagaaggccgacggcgtgaagccccagaccaacagcaccaagaacagcgccgccgccaccagccccaagggcaccctgccccccgccgccctggagccccagaccaccgtgatccacaaccccgtggacggcatcaaggagagcagcgacagcgccaacaccaccatcgaggacgaggacgccaaggccagaaagcaggagatcatcaagaccaccgagcagctgatcgaggccgtgaacaacggcgacttcgaggcctacgcctag

SEQ ID NO: 75101 - DNA, 1437 bp, synthetic construct
  misc_feature 1..1437: note = Description of Artificial Sequence: Synthetic coding sequence
  source 1..1437: mol_type = other DNA
atggccagcaccaccacctgcaccagattcaccgacgagtaccagctgttcgaggagctgggcaagggcgccttcagcgtggtgagaagatgcatgaagatccccaccggccaggagtacgccgccaagatcatcaacaccaagaagctgagcgccagagaccaccagaagctggagagagaggccagaatctgcagactgctgaagcaccccaacatcgtgagactgcacgacagcatcagcgaggagggcttccactacctggtgttcgacctggtgaccggcggcgagctgttcgaggacatcgtggccagagagtactacagcgaggccgacgccagccactgcatccagcagatcctggagagcgtgaaccactgccacctgaacggcatcgtgcacagagacctgaagcccgagaacctgctgctggccagcaagagcaagggcgccgccgtgaagctggccgacttcggcctggccatcgaggtgcagggcgaccagcaggcctggttcggcttcgccggcacccccggctacctgagccccgaggtgctgagaaaggacccctacggcaagcccgtggacatgtgggcctgcggcgtgatcctgtacatcctgctggtgggctacccccccttctgggacgaggaccagcacagactgtaccagcagatcaaggccggcgcctacgacttccccagccccgagtgggacaccgtgacccccgaggccaaggacctgatcaacaagatgctgaccatcaaccccgccaagagaatcaccgccagcgaggccctgaagcacccctggatctgccagagaagcaccgtggccagcatgatgcacagacaggagaccgtggactgcctgaagaagttcaacgccagaagaaagctgaagggcgccatcctgaccaccatgctggccaccagaaacttcagcgccgccaagagcctgctgaagaagcccgacggcgtgaaggagagcaccgagagcagcaacaccaccatcgaggacgaggacgtgaaggccagaaagcaggagatcatcaaggtgaccgagcagctgatcgaggccatcaacaacggcgacttcgaggcctacaccaagatctgcgaccccggcctgaccgccttcgagcccgaggccctgggcaacctggtggagggcatggacttccacagattctacttcgagaacgccctgagcaagagcaacaagcccatccacaccatcatcctgaacccccacgtgcacctggtgggcgacgacgccgcctgcatcgcctacatcagactgacccagtacatggacggcagcggcatgcccaagaccatgcagagcgaggagaccagagtgtggcacagaagagacggcaagtggcagaacgtgcacttccacagaagcggcagccccaccgtgcccatcaagtag

SEQ ID NO: 75102 - DNA, 1500 bp, synthetic construct
  misc_feature 1..1500: note = Description of Artificial Sequence: Synthetic coding sequence
  source 1..1500: mol_type = other DNA
atggccagcaccaccacctgcaccagattcaccgacgagtaccagctgttcgaggagctgggcaagggcgccttcagcgtggtgagaagatgcatgaagatccccaccggccaggagtacgccgccaagatcatcaacaccaagaagctgagcgccagagaccaccagaagctggagagagaggccagaatctgcagactgctgaagcaccccaacatcgtgagactgcacgacagcatcagcgaggagggcttccactacctggtgttcgacctggtgaccggcggcgagctgttcgaggacatcgtggccagagagtactacagcgaggccgacgccagccactgcatccagcagatcctggagagcgtgaaccactgccacctgaacggcatcgtgcacagagacctgaagcccgagaacctgctgctggccagcaagagcaagggcgccgccgtgaagctggccgacttcggcctggccatcgaggtgcagggcgaccagcaggcctggttcggcttcgccggcacccccggctacctgagccccgaggtgctgagaaaggacccctacggcaagcccgtggacatgtgggcctgcggcgtgatcctgtacatcctgctggtgggctacccccccttctgggacgaggaccagcacagactgtaccagcagatcaaggccggcgcctacgacttccccagccccgagtgggacaccgtgacccccgaggccaaggacctgatcaacaagatgctgaccatcaaccccgccaagagaatcaccgccagcgaggccctgaagcacccctggatctgccagagaagcaccgtggccagcatgatgcacagacaggagaccgtggactgcctgaagaagttcaacgccagaagaaagctgaagggcgccatcctgaccaccatgctggccaccagaaacttcagcgccgccaagagcctgctgaagaagcccgacggcgtgaaggagagcaccgagagcagcaacaccaccatcgaggacgaggacgtgaaggccagaaagcaggagatcatcaaggtgaccgagcagctgatcgaggccatcaacaacggcgacttcgaggcctacaccaagatctgcgaccccggcctgaccgccttcgagcccgaggccctgggcaacctggtggagggcatggacttccacagattctacttcgagaacgccctgagcaagagcaacaagcccatccacaccatcatcctgaacccccacgtgcacctggtgggcgacgacgccgcctgcatcgcctacatcagactgacccagtacatggacggcagcggcatgcccaagaccatgcagagcgaggagaccagagtgtggcacagaagagacggcaagtggcagaacgtgcacttccacagaagcggcagccccaccgtgcccatcaagcccccctgcatccccaacggcaaggagaacttcagcggcggcaccagcctgtggcagaacatctag

SEQ ID NO: 75103 - DNA, 1437 bp, synthetic construct; identical to SEQ ID NO: 75101
  misc_feature 1..1437: note = Description of Artificial Sequence: Synthetic coding sequence
  source 1..1437: mol_type = other DNA

SEQ ID NO: 75104 - DNA, 1479 bp, synthetic construct
  misc_feature 1..1479: note = Description of Artificial Sequence: Synthetic coding sequence
  source 1..1479: mol_type = other DNA
atggccagcaccaccacctgcaccagattcaccgacgagtaccagctgttcgaggagctgggcaagggcgccttcagcgtggtgagaagatgcatgaagatccccaccggccaggagtacgccgccaagatcatcaacaccaagaagctgagcgccagagaccaccagaagctggagagagaggccagaatctgcagactgctgaagcaccccaacatcgtgagactgcacgacagcatcagcgaggagggcttccactacctggtgttcgacctggtgaccggcggcgagctgttcgaggacatcgtggccagagagtactacagcgaggccgacgccagccactgcatccagcagatcctggagagcgtgaaccactgccacctgaacggcatcgtgcacagagacctgaagcccgagaacctgctgctggccagcaagagcaagggcgccgccgtgaagctggccgacttcggcctggccatcgaggtgcagggcgaccagcaggcctggttcggcttcgccggcacccccggctacctgagccccgaggtgctgagaaaggacccctacggcaagcccgtggacatgtgggcctgcggcgtgatcctgtacatcctgctggtgggctacccccccttctgggacgaggaccagcacagactgtaccagcagatcaaggccggcgcctacgacttccccagccccgagtgggacaccgtgacccccgaggccaaggacctgatcaacaagatgctgaccatcaaccccgccaagagaatcaccgccagcgaggccctgaagcacccctggatctgccagagaagcaccgtggccagcatgatgcacagacaggagaccgtggactgcctgaagaagttcaacgccagaagaaagctgaagggcgccatcctgaccaccatgctggccaccagaaacttcagcgccgccaagagcctgctgaagaagcccgacggcgtgaaggagccccagaccaccgtgatccacaaccccgacggcaacaaggagagcaccgagagcagcaacaccaccatcgaggacgaggacgtgaaggccagaaagcaggagatcatcaaggtgaccgagcagctgatcgaggccatcaacaacggcgacttcgaggcctacaccaagatctgcgaccccggcctgaccgccttcgagcccgaggccctgggcaacctggtggagggcatggacttccacagattctacttcgagaacgccctgagcaagagcaacaagcccatccacaccatcatcctgaacccccacgtgcacctggtgggcgacgacgccgcctgcatcgcctacatcagactgacccagtacatggacggcagcggcatgcccaagaccatgcagagcgaggagaccagagtgtggcacagaagagacggcaagtggcagaacgtgcacttccacagaagcggcagccccaccgtgcccatcaagtag

SEQ ID NO: 75105 - DNA, 1533 bp, synthetic construct
  misc_feature 1..1533: note = Description of Artificial Sequence: Synthetic coding sequence
  source 1..1533: mol_type = other DNA
atggccagcaccaccacctgcaccagattcaccgacgagtaccagctgttcgaggagctgggcaagggcgccttcagcgtggtgagaagatgcatgaagatccccaccggccaggagtacgccgccaagatcatcaacaccaagaagctgagcgccagagaccaccagaagctggagagagaggccagaatctgcagactgctgaagcaccccaacatcgtgagactgcacgacagcatcagcgaggagggcttccactacctggtgttcgacctggtgaccggcggcgagctgttcgaggacatcgtggccagagagtactacagcgaggccgacgccagccactgcatccagcagatcctggagagcgtgaaccactgccacctgaacggcatcgtgcacagagacctgaagcccgagaacctgctgctggccagcaagagcaagggcgccgccgtgaagctggccgacttcggcctggccatcgaggtgcagggcgaccagcaggcctggttcggcttcgccggcacccccggctacctgagccccgaggtgctgagaaaggacccctacggcaagcccgtggacatgtgggcctgcggcgtgatcctgtacatcctgctggtgggctacccccccttctgggacgaggaccagcacagactgtaccagcagatcaaggccggcgcctacgacttccccagccccgagtgggacaccgtgacccccgaggccaaggacctgatcaacaagatgctgaccatcaaccccgccaagagaatcaccgccagcgaggccctgaagcacccctggatctgccagagaagcaccgtggccagcatgatgcacagacaggagaccgtggactgcctgaagaagttcaacgccagaagaaagctgaagggcgccatcctgaccaccatgctggccaccagaaacttcagcgccgccaagagcctgctgaagaagcccgacggcgtgaagaagagaaagagcagcagcagcgtgcagatgatggagagcaccgagagcagcaacaccaccatcgaggacgaggacgtgaaggccagaaagcaggagatcatcaaggtgaccgagcagctgatcgaggccatcaacaacggcgacttcgaggcctacaccaagatctgcgaccccggcctgaccgccttcgagcccgaggccctgggcaacctggtggagggcatggacttccacagattctacttcgagaacgccctgagcaagagcaacaagcccatccacaccatcatcctgaacccccacgtgcacctggtgggcgacgacgccgcctgcatcgcctacatcagactgacccagtacatggacggcagcggcatgcccaagaccatgcagagcgaggagaccagagtgtggcacagaagagacggcaagtggcagaacgtgcacttccacagaagcggcagccccaccgtgcccatcaagcccccctgcatccccaacggcaaggagaacttcagcggcggcaccagcctgtggcagaacatctag

SEQ ID NO: 75106 - DNA, 1542 bp, synthetic construct
  misc_feature 1..1542: note = Description of Artificial Sequence: Synthetic coding sequence
  source 1..1542: mol_type = other DNA
atggccagcaccaccacctgcaccagattcaccgacgagtaccagctgttcgaggagctgggcaagggcgccttcagcgtggtgagaagatgcatgaagatccccaccggccaggagtacgccgccaagatcatcaacaccaagaagctgagcgccagagaccaccagaagctggagagagaggccagaatctgcagactgctgaagcaccccaacatcgtgagactgcacgacagcatcagcgaggagggcttccactacctggtgttcgacctggtgaccggcggcgagctgttcgaggacatcgtggccagagagtactacagcgaggccgacgccagccactgcatccagcagatcctggagagcgtgaaccactgccacctgaacggcatcgtgcacagagacctgaagcccgagaacctgctgctggccagcaagagcaagggcgccgccgtgaagctggccgacttcggcctggccatcgaggtgcagggcgaccagcaggcctggttcggcttcgccggcacccccggctacctgagccccgaggtgctgagaaaggacccctacggcaagcccgtggacatgtgggcctgcggcgtgatcctgtacatcctgctggtgggctacccccccttctgggacgaggaccagcacagactgtaccagcagatcaaggccggcgcctacgacttccccagccccgagtgggacaccgtgacccccgaggccaaggacctgatcaacaagatgctgaccatcaaccccgccaagagaatcaccgccagcgaggccctgaagcacccctggatctgccagagaagcaccgtggccagcatgatgcacagacaggagaccgtggactgcctgaagaagttcaacgccagaagaaagctgaagggcgccatcctgaccaccatgctggccaccagaaacttcagcgccgccaagagcctgctgaagaagcccgacggcgtgaaggagccccagaccaccgtgatccacaaccccgacggcaacaaggagagcaccgagagcagcaacaccaccatcgaggacgaggacgtgaaggccagaaagcaggagatcatcaaggtgaccgagcagctgatcgaggccatcaacaacggcgacttcgaggcctacaccaagatctgcgaccccggcctgaccgccttcgagcccgaggccctgggcaacctggtggagggcatggacttccacagattctacttcgagaacgccctgagcaagagcaacaagcccatccacaccatcatcctgaacccccacgtgcacctggtgggcgacgacgccgcctgcatcgcctacatcagactgacccagtacatggacggcagcggcatgcccaagaccatgcagagcgaggagaccagagtgtggcacagaagagacggcaagtggcagaacgtgcacttccacagaagcggcagccccaccgtgcccatcaagcccccctgcatccccaacggcaaggagaacttcagcggcggcaccagcctgtggcagaacatctag

SEQ ID NO: 75107 - DNA, 1560 bp, synthetic construct
  misc_feature 1..1560: note = Description of Artificial Sequence: Synthetic coding sequence
  source 1..1560: mol_type = other DNA
atggccagcaccaccacctgcaccagattcaccgacgagtaccagctgttcgaggagctgggcaagggcgccttcagcgtggtgagaagatgcatgaagatccccaccggccaggagtacgccgccaagatcatcaacaccaagaagctgagcgccagagaccaccagaagctggagagagaggccagaatctgcagactgctgaagcaccccaacatcgtgagactgcacgacagcatcagcgaggagggcttccactacctggtgttcgacctggtgaccggcggcgagctgttcgaggacatcgtggccagagagtactacagcgaggccgacgccagccactgcatccagcagatcctggagagcgtgaaccactgccacctgaacggcatcgtgcacagagacctgaagcccgagaacctgctgctggccagcaagagcaagggcgccgccgtgaagctggccgacttcggcctggccatcgaggtgcagggcgaccagcaggcctggttcggcttcgccggcacccccggctacctgagccccgaggtgctgagaaaggacccctacggcaagcccgtggacatgtgggcctgcggcgtgatcctgtacatcctgctggtgggctacccccccttctgggacgaggaccagcacagactgtaccagcagatcaaggccggcgcctacgacttccccagccccgagtgggacaccgtgacccccgaggccaaggacctgatcaacaagatgctgaccatcaaccccgccaagagaatcaccgccagcgaggccctgaagcacccctggatctgccagagaagcaccgtggccagcatgatgcacagacaggagaccgtggactgcctgaagaagttcaacgccagaagaaagctgaagggcgccatcctgaccaccatgctggccaccagaaacttcagcgccgccaagagcctgctgaagaagcccgacggcgtgaagatcaacaacaaggccaacgtggtgaccagccccaaggagaacatccccacccccgccctggagagcaccgagagcagcaacaccaccatcgaggacgaggacgtgaaggccagaaagcaggagatcatcaaggtgaccgagcagctgatcgaggccatcaacaacggcgacttcgaggcctacaccaagatctgcgaccccggcctgaccgccttcgagcccgaggccctgggcaacctggtggagggcatggacttccacagattctacttcgagaacgccctgagcaagagcaacaagcccatccacaccatcatcctgaacccccacgtgcacctggtgggcgacgacgccgcctgcatcgcctacatcagactgacccagtacatggacggcagcggcatgcccaagaccatgcagagcgaggagaccagagtgtggcacagaagagacggcaagtggcagaacgtgcacttccacagaagcggcagccccaccgtgcccatcaagcccccctgcatccccaacggcaaggagaacttcagcggcggcaccagcctgtggcagaacatctag

SEQ ID NO: 75108 - DNA, 1575 bp, synthetic construct
  misc_feature 1..1575: note = Description of Artificial Sequence: Synthetic coding sequence
  source 1..1575: mol_type = other DNA
atggccagcaccaccacctgcaccagattcaccgacgagtaccagctgttcgaggagctgggcaagggcgccttcagcgtggtgagaagatgcatgaagatccccaccggccaggagtacgccgccaagatcatcaacaccaagaagctgagcgccagagaccaccagaagctggagagagaggccagaatctgcagactgctgaagcaccccaacatcgtgagactgcacgacagcatcagcgaggagggcttccactacctggtgttcgacctggtgaccggcggcgagctgttcgaggacatcgtggccagagagtactacagcgaggccgacgccagccactgcatccagcagatcctggagagcgtgaaccactgccacctgaacggcatcgtgcacagagacctgaagcccgagaacctgctgctggccagcaagagcaagggcgccgccgtgaagctggccgacttcggcctggccatcgaggtgcagggcgaccagcaggcctggttcggcttcgccggcacccccggctacctgagccccgaggtgctgagaaaggacccctacggcaagcccgtggacatgtgggcctgcggcgtgatcctgtacatcctgctggtgggctacccccccttctgggacgaggaccagcacagactgtaccagcagatcaaggccggcgcctacgacttccccagccccgagtgggacaccgtgacccccgaggccaaggacctgatcaacaagatgctgaccatcaaccccgccaagagaatcaccgccagcgaggccctgaagcacccctggatctgccagagaagcaccgtggccagcatgatgcacagacaggagaccgtggactgcctgaagaagttcaacgccagaagaaagctgaagggcgccatcctgaccaccatgctggccaccagaaacttcagcgccgccaagagcctgctgaagaagcccgacggcgtgaagaagagaaagagcagcagcagcgtgcagatgatggagccccagaccaccgtgatccacaaccccgacggcaacaaggagagcaccgagagcagcaacaccaccatcgaggacgaggacgtgaaggccagaaagcaggagatcatcaaggtgaccgagcagctgatcgaggccatcaacaacggcgacttcgaggcctacaccaagatctgcgaccccggcctgaccgccttcgagcccgaggccctgggcaacctggtggagggcatggacttccacagattctacttcgagaacgccctgagcaagagcaacaagcccatccacaccatcatcctgaacccccacgtgcacctggtgggcgacgacgccgcctgcatcgcctacatcagactgacccagtacatggacggcagcggcatgcccaagaccatgcagagcgaggagaccagagtgtggcacagaagagacggcaagtggcagaacgtgcacttccacagaagcggcagccccaccgtgcccatcaagcccccctgcatccccaacggcaaggagaacttcagcggcggcaccagcctgtggcagaacatctag

SEQ ID NO: 75109 - DNA, 1470 bp, synthetic construct
  misc_feature 1..1470: note = Description of Artificial Sequence: Synthetic coding sequence
  source 1..1470: mol_type = other DNA
atggccagcaccaccacctgcaccagattcaccgacgagtaccagctgttcgaggagctgggcaagggcgccttcagcgtggtgagaagatgcatgaagatccccaccggccaggagtacgccgccaagatcatcaacaccaagaagctgagcgccagagaccaccagaagctggagagagaggccagaatctgcagactgctgaagcaccccaacatcgtgagactgcacgacagcatcagcgaggagggcttccactacctggtgttcgacctggtgaccggcggcgagctgttcgaggacatcgtggccagagagtactacagcgaggccgacgccagccactgcatccagcagatcctggagagcgtgaaccactgccacctgaacggcatcgtgcacagagacctgaagcccgagaacctgctgctggccagcaagagcaagggcgccgccgtgaagctggccgacttcggcctggccatcgaggtgcagggcgaccagcaggcctggttcggcttcgccggcacccccggctacctgagccccgaggtgctgagaaaggacccctacggcaagcccgtggacatgtgggcctgcggcgtgatcctgtacatcctgctggtgggctacccccccttctgggacgaggaccagcacagactgtaccagcagatcaaggccggcgcctacgacttccccagccccgagtgggacaccgtgacccccgaggccaaggacctgatcaacaagatgctgaccatcaaccccgccaagagaatcaccgccagcgaggccctgaagcacccctggatctgccagagaagcaccgtggccagcatgatgcacagacaggagaccgtggactgcctgaagaagttcaacgccagaagaaagctgaagggcgccatcctgaccaccatgctggccaccagaaacttcagcgccgccaagagcctgctgaagaagcccgacggcgtgaagaagagaaagagcagcagcagcgtgcagatgatggagagcaccgagagcagcaacaccaccatcgaggacgaggacgtgaaggccagaaagcaggagatcatcaaggtgaccgagcagctgatcgaggccatcaacaacggcgacttcgaggcctacaccaagatctgcgaccccggcctgaccgccttcgagcccgaggccctgggcaacctggtggagggcatggacttccacagattctacttcgagaacgccctgagcaagagcaacaagcccatccacaccatcatcctgaacccccacgtgcacctggtgggcgacgacgccgcctgcatcgcctacatcagactgacccagtacatggacggcagcggcatgcccaagaccatgcagagcgaggagaccagagtgtggcacagaagagacggcaagtggcagaacgtgcacttccacagaagcggcagccccaccgtgcccatcaagtag

SEQ ID NO: 75110 - DNA, 549 bp, synthetic construct
  misc_feature 1..549: note = Description of Artificial Sequence: Synthetic coding sequence
  source 1..549: mol_type = other DNA
tgaagaaagctgaagggcgccatcctgaccaccatgctggccaccagaaacttcagcgccgccaagagcctgctgaagaagcccgacggcgtgaaggagagcaccgagagcagcaacaccaccatcgaggacgaggacgtgaaggccagaaagcaggagatcatcaaggtgaccgagcagctgatcgaggccatcaacaacggcgacttcgaggcctacaccaagatctgcgaccccggcctgaccgccttcgagcccgaggccctgggcaacctggtggagggcatggacttccacagattctacttcgagaacgccctgagcaagagcaacaagcccatccacaccatcatcctgaacccccacgtgcacctggtgggcgacgacgccgcctgcatcgcctacatcagactgacccagtacatggacggcagcggcatgcccaagaccatgcagagcgaggagaccagagtgtggcacagaagagacggcaagtggcagaacgtgcacttccacagaagcggcagccccaccgtgcccatcaagtag

SEQ ID NO: 75111 - DNA, 1437 bp, synthetic construct
  misc_feature 1..1437: note = Description of Artificial Sequence: Synthetic coding sequence
  source 1..1437: mol_type = other DNA
atggccagcaccaccacctgcaccagattcaccgacgagtaccagctgttcgaggagctgggcaagggcgccttcagcgtggtgagaagatgcatgaagatccccaccggccaggagtacgccgccaagatcatcaacaccaagaagctgagcgccagagaccaccagaagctggagagagaggccagaatctgcagactgctgaagcaccccaacatcgtgagactgcacgacagcatcagcgaggagggcttccactacctggtgttcgacctggtgaccggcggcgagctgttcgaggacatcgtggccagagagtactacagcgaggccgacgccagccactgcatccagcagatcctggagagcgtgaaccactgccacctgaacggcatcgtgcacagagacctgaagcccgagaacctgctgctggccagcaagagcaagggcgccgccgtgaagctggccgacttcggcctggccatcgaggtgcagggcgaccagcaggcctggttcggcttcgccggcacccccggctacctgagccccgaggtgctgagaaaggacccctacggcaagcccgtggacatgtgggcctgcggcgtgatcctgtacatcctgctggtgggctacccccccttctgggacgaggaccagcacagactgtaccagcagatcaaggccggcgcctacgacttccccagccccgagtgggacaccgtgacccccgaggccaaggacctgatcaacaagatgctgaccatcaaccccgccaagagaatcaccgccagcgaggccctgaagcacccctggatctgccagagaagcaccgtggccagcatgatgcacagacaggagaccgtggactgcctgaagaagttcaacgccagaagaaagctgaagggcgccatcctgaccaccatgctggccaccagaaacttcagcgccgccaagagcctgctgaagaagcccgacggcgtgaaggagagcaccgagagcagcaacaccaccatcgaggacgaggacgtgaaggccagaaagcaggagatcatcaaggtgaccgagcagctgatcgaggccatcaacaacggcgacttcgaggcctacaccaagatctgcgaccccggcctgaccgccttcgagcccgaggccctgggcaacctggtggagggcatggacttccacagattctacttcgagaacgccctgagcaagagcaacaagcccatccacaccatcatcctgaacccccacgtgcacctggtgggcgacgacgccgcctgcatcgcctacatcagactgacccagtacatggacggcagcggcatgcccaagaccatgcagagcgaggagaccagagtgtggcacagaagagacggcaagtggcagaacgtgcacttccacagaagcggcagccccaccgtgcccatcaactag

SEQ ID NO: 75112 - DNA, 1590 bp, synthetic construct
  misc_feature 1..1590: note = Description of Artificial Sequence: Synthetic coding sequence
  source 1..1590: mol_type = other DNA
atggccaccaccgccacctgcaccagattcaccgacgactaccagctgttcgaggagctgggcaagggcgccttcagcgtggtgagaagatgcgtgaagaagaccagcacccaggagtacgccgccaagatcatcaacaccaagaagctgagcgccagagaccaccagaagctggagagagaggccagaatctgcagactgctgaagcaccccaacatcgtgagactgcacgacagcatcagcgaggagggcttccactacctggtgttcgacctggtgaccggcggcgagctgttcgaggacatcgtggccagagagtactacagcgaggccgacgccagccactgcatccaccagatcctggagagcgtgaaccacatccaccagcacgacatcgtgcacagagacctgaagcccgagaacctgctgctggccagcaagtgcaagggcgccgccgtgaagctggccgacttcggcctggccatcgaggtgcagggcgagcagcaggcctggttcggcttcgccggcacccccggctacctgagccccgaggtgctgagaaaggacccctacggcaagcccgtggacatctgggcctgcggcgtgatcctgtacatcctgctggtgggctacccccccttctgggacgaggaccagcacaagctgtaccagcagatcaaggccggcgcctacgacttccccagccccgagtgggacaccgtgacccccgaggccaagaacctgatcaaccagatgctgaccatcaaccccgccaagagaatcaccgccgaccaggccctgaagcacccctgggtgtgccagagaagcaccgtggccagcatgatgcacagacaggagaccgtggagtgcctgagaaagttcaacgccagaagaaagctgaagggcgccatcctgaccaccatgctggtgagcagaaacttcagcgccgccaagagcctgctgaacaagaagagcgacggcggcgtgaagaagagaaagagcagcagcagcgtgcacctgatgccccagagcaacaacaagaacagcctggtgagccccgcccaggagcccgcccccctgcagaccgccatggagccccagaccaccgtggtgcacaacgccaccgacggcatcaagggcagcaccgagagctgcaacaccaccaccgaggacgaggacctgaaggtgagaaagcaggagatcatcaagatcaccgagcagctgatcgaggccatcaacaacggcgacttcgaggcctacaccaagatctgcgaccccggcctgaccagcttcgagcccgaggccctgggcaacctggtggagggcatggacttccacaagttctacttcgagaacctgctgagcaagaacagcaagcccatccacaccaccatcctgaacccccacgtgcacgtgatcggcgaggacgccgcctgcatcgcctacatcagactgacccagtacatcgacggccagggcagacccagaaccagccagagcgaggagaccagagtgtggcacagaagagacggcaagtggctgaacgtgcactaccactgcagcggcgcccccgccgcccccctgcagtag

SEQ ID NO: 75113 - DNA, 1584 bp, synthetic construct
  misc_feature 1..1584: note = Description of Artificial Sequence: Synthetic coding sequence
  source 1..1584: mol_type = other DNA
atggccaccaccgccacctgcaccagattcaccgacgactaccagctgttcgaggagctgggcaagggcgccttcagcgtggtgagaagatgcgtgaagaagaccagcacccaggagtacgccgccaagatcatcaacaccaagaagctgagcgccagagaccaccagaagctggagagagaggccagaatctgcagactgctgaagcaccccaacatcgtgagactgcacgacagcatcagcgaggagggcttccactacctggtgttcgacctggtgaccggcggcgagctgttcgaggacatcgtggccagagagtactacagcgaggccgacgccagccactgcatccaccagatcctggagagcgtgaaccacatccaccagcacgacatcgtgcacagagacctgaagcccgagaacctgctgctggccagcaagtgcaagggcgccgccgtgaagctggccgacttcggcctggccatcgaggtgcagggcgagcagcaggcctggttcggcttcgccggcacccccggctacctgagccccgaggtgctgagaaaggacccctacggcaagcccgtggacatctgggcctgcggcgtgatcctgtacatcctgctggtgggctacccccccttctgggacgaggaccagcacaagctgtaccagcagatcaaggccggcgcctacgacttccccagccccgagtgggacaccgtgacccccgaggccaagaacctgatcaaccagatgctgaccatcaaccccgccaagagaatcaccgccgaccaggccctgaagcacccctgggtgtgccagagaagcaccgtggccagcatgatgcacagacaggagaccgtggagtgcctgagaaagttcaacgccagaagaaagctgaagggcgccatcctgaccaccatgctggtgagcagaaacttcagcgtgggcagacagagcagcgcccccgccagccccgccgccagcgccgccggcctggccggccaggccgccaagagcctgctgaacaagaagagcgacggcggcgtgaagaagagaaagagcagcagcagcgtgcacctgatggagccccagaccaccgtggtgcacaacgccaccgacggcatcaagggcagcaccgagagctgcaacaccaccaccgaggacgaggacctgaaggtgagaaagcaggagatcatcaagatcaccgagcagctgatcgaggccatcaacaacggcgacttcgaggcctacaccaagatctgcgaccccggcctgaccagcttcgagcccgaggccctgggcaacctggtggagggcatggacttccacaagttctacttcgagaacctgctgagcaagaacagcaagcccatccacaccaccatcctgaacccccacgtgcacgtgatcggcgaggacgccgcctgcatcgcctacatcagactgacccagtacatcgacggccagggcagacccagaaccagccagagcgaggagaccagagtgtggcacagaagagacggcaagtggctgaacgtgcactaccactgcagcggcgcccccgccgcccccctgcagtag

SEQ ID NO: 75114 - DNA, 1671 bp, synthetic construct
  misc_feature 1..1671: note = Description of Artificial Sequence: Synthetic coding sequence
  source 1..1671: mol_type = other DNA
atggccaccaccgccacctgcaccagattcaccgacgactaccagctgttcgaggagctgggcaagggcgccttcagcgtggtgagaagatgcgtgaagaagaccagcacccaggagtacgccgccaagatcatcaacaccaagaagctgagcgccagagaccaccagaagctggagagagaggccagaatctgcagactgctgaagcaccccaacatcgtgagactgcacgacagcatcagcgaggagggcttccactacctggtgttcgacctggtgaccggcggcgagctgttcgaggacatcgtggccagagagtactacagcgaggccgacgccagccactgcatccaccagatcctggagagcgtgaaccacatccaccagcacgacatcgtgcacagagacctgaagcccgagaacctgctgctggccagcaagtgcaagggcgccgccgtgaagctggccgacttcggcctggccatcgaggtgcagggcgagcagcaggcctggttcggcttcgccggcacccccggctacctgagccccgaggtgctgagaaaggacccctacggcaagcccgtggacatctgggcctgcggcgtgatcctgtacatcctgctggtgggctacccccccttctgggacgaggaccagcacaagctgtaccagcagatcaaggccggcgcctacgacttccccagccccgagtgggacaccgtgacccccgaggccaagaacctgatcaaccagatgctgaccatcaaccccgccaagagaatcaccgccgaccaggccctgaagcacccctgggtgtgccagagaagcaccgtggccagcatgatgcacagacaggagaccgtggagtgcctgagaaagttcaacgccagaagaaagctgaagggcgccatcctgaccaccatgctggtgagcagaaacttcagcgccgccaagagcctgctgaacaagaagagcgacggcggcgtgaagccccagagcaacaacaagaacagcctggtgagccccgcccaggagcccgcccccctgcagaccgccatggagccccagaccaccgtggtgcacaacgccaccgacggcatcaagggcagcaccgagagctgcaacaccaccaccgaggacgaggacctgaaggccgcccccctgagaaccggcaacggcagcagcgtgcccgagggcagaagcagcagagacagaaccgcccccagcgccggcatgcagccccagcccagcctgtgcagcagcgccatgagaaagcaggagatcatcaagatcaccgagcagctgatcgaggccatcaacaacggcgacttcgaggcctacaccaagatctgcgaccccggcctgaccagcttcgagcccgaggccctgggcaacctggtggagggcatggacttccacaagttctacttcgagaacctgctgagcaagaacagcaagcccatccacaccaccatcctgaacccccacgtgcacgtgatcggcgaggacgccgcctgcatcgcctacatcagactgacccagtacatcgacggccagggcagacccagaaccagccagagcgaggagaccagagtgtggcacagaagagacggcaagtggctgaacgtgcactaccactgcagcggcgcccccgccgcccccctgcagtag

SEQ ID NO: 75115 - DNA, 1488 bp, synthetic construct
  misc_feature 1..1488: note = Description of Artificial Sequence: Synthetic coding sequence
  source 1..1488: mol_type = other DNA
atggccaccaccgccacctgcaccagattcaccgacgactaccagctgttcgaggagctgggcaagggcgccttcagcgtggtgagaagatgcgtgaagaagaccagcacccaggagtacgccgccaagatcatcaacaccaagaagctgagcgccagagaccaccagaagctggagagagaggccagaatctgcagactgctgaagcaccccaacatcgtgagactgcacgacagcatcagcgaggagggcttccactacctggtgttcgacctggtgaccggcggcgagctgttcgaggacatcgtggccagagagtactacagcgaggccgacgccagccactgcatccaccagatcctggagagcgtgaaccacatccaccagcacgacatcgtgcacagagacctgaagcccgagaacctgctgctggccagcaagtgcaagggcgccgccgtgaagctggccgacttcggcctggccatcgaggtgcagggcgagcagcaggcctggttcggcttcgccggcacccccggctacctgagccccgaggtgctgagaaaggacccctacggcaagcccgtggacatctgggcctgcggcgtgatcctgtacatcctgctggtgggctacccccccttctgggacgaggaccagcacaagctgtaccagcagatcaaggccggcgcctacgacttccccagccccgagtgggacaccgtgacccccgaggccaagaacctgatcaaccagatgctgaccatcaaccccgccaagagaatcaccgccgaccaggccctgaagcacccctgggtgtgccagagaagcaccgtggccagcatgatgcacagacaggagaccgtggagtgcctgagaaagttcaacgccagaagaaagctgaagggcgccatcctgaccaccatgctggtgagcagaaacttcagcgccgccaagagcctgctgaacaagaagagcgacggcggcgtgaaggagccccagaccaccgtggtgcacaacgccaccgacggcatcaagggcagcaccgagagctgcaacaccaccaccgaggacgaggacctgaaggtgagaaagcaggagatcatcaagatcaccgagcagctgatcgaggccatcaacaacggcgacttcgaggcctacaccaagatctgcgaccccggcctgaccagcttcgagcccgaggccctgggcaacctggtggagggcatggacttccacaagttctacttcgagaacctgctgagcaagaacagcaagcccatccacaccaccatcctgaacccccacgtgcacgtgatcggcgaggacgccgcctgcatcgcctacatcagactgacccagtacatcgacggccagggcagacccagaaccagccagagcgaggagaccagagtgtggcacagaagagacggcaagtggctgaacgtgcactaccactgcagcggcgcccccgccgcccccctgcagtag

SEQ ID NO: 75116 - DNA, 1551 bp, synthetic construct
  misc_feature 1..1551: note = Description of Artificial Sequence: Synthetic coding sequence
  source 1..1551: mol_type = other DNA
atggccaccaccgccacctgcaccagattcaccgacgactaccagctgttcgaggagctgggcaagggcgccttcagcgtggtgagaagatgcgtgaagaagaccagcacccaggagtacgccgccaagatcatcaacaccaagaagctgagcgccagagaccaccagaagctggagagagaggccagaatctgcagactgctgaagcaccccaacatcgtgagactgcacgacagcatcagcgaggagggcttccactacctggtgttcgacctggtgaccggcggcgagctgttcgaggacatcgtggccagagagtactacagcgaggccgacgccagccactgcatccaccagatcctggagagcgtgaaccacatccaccagcacgacatcgtgcacagagacctgaagcccgagaacctgctgctggccagcaagtgcaagggcgccgccgtgaagctggccgacttcggcctggccatcgaggtgcagggcgagcagcaggcctggttcggcttcgccggcacccccggctacctgagccccgaggtgctgagaaaggacccctacggcaagcccgtggacatctgggcctgcggcgtgatcctgtacatcctgctggtgggctacccccccttctgggacgaggaccagcacaagctgtaccagcagatcaaggccggcgcctacgacttccccagccccgagtgggacaccgtgacccccgaggccaagaacctgatcaaccagatgctgaccatcaaccccgccaagagaatcaccgccgaccaggccctgaagcacccctgggtgtgccagagaagcaccgtggccagcatgatgcacagacaggagaccgtggagtgcctgagaaagttcaacgccagaagaaagctgaagggcgccatcctgaccaccatgctggtgagcagaaacttcagcgtgggcagacagagcagcgcccccgccagccccgccgccagcgccgccggcctggccggccaggccgccaagagcctgctgaacaagaagagcgacggcggcgtgaaggagccccagaccaccgtggtgcacaacgccaccgacggcatcaagggcagcaccgagagctgcaacaccaccaccgaggacgaggacctgaaggtgagaaagcaggagatcatcaagatcaccgagcagctgatcgaggccatcaacaacggcgacttcgaggcctacaccaagatctgcgaccccggcctgaccagcttcgagcccgaggccctgggcaacctggtggagggcatggacttccacaagttctacttcgagaacctgctgagcaagaacagcaagcccatccacaccaccatcctgaacccccacgtgcacgtgatcggcgaggacgccgcctgcatcgcctacatcagactgacccagtacatcgacggccagggcagacccagaaccagccagagcgaggagaccagagtgtggcacagaagagacggcaagtggctgaacgtgcactaccactgcagcggcgcccccgccgcccccctgcagtag

SEQ ID NO: 75117 - DNA, 1602 bp, synthetic construct
  misc_feature 1..1602: note = Description of Artificial Sequence: Synthetic coding sequence
  source 1..1602: mol_type = other DNA
atggccaccaccgccacctgcaccagattcaccgacgactaccagctgttcgaggagctgggcaagggcgccttcagcgtggtgagaagatgcgtgaagaagaccagcacccaggagtacgccgccaagatcatcaacaccaagaagctgagcgccagagaccaccagaagctggagagagaggccagaatctgcagactgctgaagcaccccaacatcgtgagactgcacgacagcatcagcgaggagggcttccactacctggtgttcgacctggtgaccggcggcgagctgttcgaggacatcgtggccagagagtactacagcgaggccgacgccagccactgcatccaccagatcctggagagcgtgaaccacatccaccagcacgacatcgtgcacagagacctgaagcccgagaacctgctgctggccagcaagtgcaagggcgccgccgtgaagctggccgacttcggcctggccatcgaggtgcagggcgagcagcaggcctggttcggcttcgccggcacccccggctacctgagccccgaggtgctgagaaaggacccctacggcaagcccgtggacatctgggcctgcggcgtgatcctgtacatcctgctggtgggctacccccccttctgggacgaggaccagcacaagctgtaccagcagatcaaggccggcgcctacgacttccccagccccgagtgggacaccgtgacccccgaggccaagaacctgatcaaccagatgctgaccatcaaccccgccaagagaatcaccgccgaccaggccctgaagcacccctgggtgtgccagagaagcaccgtggccagcatgatgcacagacaggagaccgtggagtgcctgagaaagttcaacgccagaagaaagctgaagggcgccatcctgaccaccatgctggtgagcagaaacttcagcgccgccaagagcctgctgaacaagaagagcgacggcggcgtgaaggagccccagaccaccgtggtgcacaacgccaccgacggcatcaagggcagcaccgagagctgcaacaccaccaccgaggacgaggacctgaaggccgcccccctgagaaccggcaacggcagcagcgtgcccgagggcagaagcagcagagacagaaccgcccccagcgccggcatgcagccccagcccagcctgtgcagcagcgccatgagaaagcaggagatcatcaagatcaccgagcagctgatcgaggccatcaacaacggcgacttcgaggcctacaccaagatctgcgaccccggcctgaccagcttcgagcccgaggccctgggcaacctggtggagggcatggacttccacaagttctacttcgagaacctgctgagcaagaacagcaagcccatccacaccaccatcctgaacccccacgtgcacgtgatcggcgaggacgccgcctgcatcgcctacatcagactgacccagtacatcgacggccagggcagacccagaaccagccagagcgaggagaccagagtgtggcacagaagagacggcaagtggctgaacgtgcactaccactgcagcggcgcccccgccgcccccctgcagtag

SEQ ID NO: 75118 - DNA, 1677 bp, synthetic construct
  misc_feature 1..1677: note = Description of Artificial Sequence: Synthetic coding sequence
  source 1..1677: mol_type = other DNA
atggccaccaccgccacctgcaccagattcaccgacgactaccagctgttcgaggagctgggcaagggcgccttcagcgtggtgagaagatgcgtgaagaagaccagcacccaggagtacgccgccaagatcatcaacaccaagaagctgagcgccagagaccaccagaagctggagagagaggccagaatctgcagactgctgaagcaccccaacatcgtgagactgcacgacagcatcagcgaggagggcttccactacctggtgttcgacctggtgaccggcggcgagctgttcgaggacatcgtggccagagagtactacagcgaggccgacgccagccactgcatccaccagatcctggagagcgtgaaccacatccaccagcacgacatcgtgcacagagacctgaagcccgagaacctgctgctggccagcaagtgcaagggcgccgccgtgaagctggccgacttcggcctggccatcgaggtgcagggcgagcagcaggcctggttcggcttcgccggcacccccggctacctgagccccgaggtgctgagaaaggacccctacggcaagcccgtggacatctgggcctgcggcgtgatcctgtacatcctgctggtgggctacccccccttctgggacgaggaccagcacaagctgtaccagcagatcaaggccggcgcctacgacttccccagccccgagtgggacaccgtgacccccgaggccaagaacctgatcaaccagatgctgaccatcaaccccgccaagagaatcaccgccgaccaggccctgaagcacccctgggtgtgccagagaagcaccgtggccagcatgatgcacagacaggagaccgtggagtgcctgagaaagttcaacgccagaagaaagctgaagggcgccatcctgaccaccatgctggtgagcagaaacttcagcgccgccaagagcctgctgaacaagaagagcgacggcggcgtgaagaagagaaagagcagcagcagcgtgcacctgatgccccagagcaacaacaagaacagcctggtgagccccgcccaggagcccgcccccctgcagaccgccatggagccccagaccaccgtggtgcacaacgccaccgacggcatcaagggcagcaccgagagctgcaacaccaccaccgaggacgaggacctgaagggcagcgtgcccgagggcagaagcagcagagacagaaccgcccccagcgccggcatgcagccccagcccagcctgtgcagcagcgccatgagaaagcaggagatcatcaagatcaccgagcagctgatcgaggccatcaacaacggcgacttcgaggcctacaccaagatctgcgaccccggcctgaccagcttcgagcccgaggccctgggcaacctggtggagggcatggacttccacaagttctacttcgagaacctgctgagcaagaacagcaagcccatccacaccaccatcctgaacccccacgtgcacgtgatcggcgaggacgccgcctgcatcgcctacatcagactgacccagtacatcgacggccagggcagacccagaaccagccagagcgaggagaccagagtgtggcacagaagagacggcaagtggctgaacgtgcactaccactgcagcggcgcccccgccgcccccctgcagtag

SEQ ID NO: 75119 - DNA, 1767 bp, synthetic construct
  misc_feature 1..1767: note = Description of Artificial Sequence: Synthetic coding sequence
  source 1..1767: mol_type = other DNA
atggccaccaccgccacctgcaccagattcaccgacgactaccagctgttcgaggagctgggcaagggcgccttcagcgtggtgagaagatgcgtgaagaagaccagcacccaggagtacgccgccaagatcatcaacaccaagaagctgagcgccagagaccaccagaagctggagagagaggccagaatctgcagactgctgaagcaccccaacatcgtgagactgcacgacagcatcagcgaggagggcttccactacctggtgttcgacctggtgaccggcggcgagctgttcgaggacatcgtggccagagagtactacagcgaggccgacgccagccactgcatccaccagatcctggagagcgtgaaccacatccaccagcacgacatcgtgcacagagacctgaagcccgagaacctgctgctggccagcaagtgcaagggcgccgccgtgaagctggccgacttcggcctggccatcgaggtgcagggcgagcagcaggcctggttcggcttcgccggcacccccggctacctgagccccgaggtgctgagaaaggacccctacggcaagcccgtggacatctgggcctgcggcgtgatcctgtacatcctgctggtgggctacccccccttctgggacgaggaccagcacaagctgtaccagcagatcaaggccggcgcctacgacttccccagccccgagtgggacaccgtgacccccgaggccaagaacctgatcaaccagatgctgaccatcaaccccgccaagagaatcaccgccgaccaggccctgaagcacccctgggtgtgccagagaagcaccgtggccagcatgatgcacagacaggagaccgtggagtgcctgagaaagttcaacgccagaagaaagctgaagggcgccatcctgaccaccatgctggtgagcagaaacttcagcgtgggcagacagagcagcgcccccgccagccccgccgccagcgccgccggcctggccggccaggccgccaagagcctgctgaacaagaagagcgacggcggcgtgaagaagagaaagagcagcagcagcgtgcacctgatgccccagagcaacaacaagaacagcctggtgagccccgcccaggagcccgcccccctgcagaccgccatggagccccagaccaccgtggtgcacaacgccaccgacggcatcaagggcagcaccgagagctgcaacaccaccaccgaggacgaggacctgaaggccgcccccctgagaaccggcaacggcagcagcgtgcccgagggcagaagcagcagagacagaaccgcccccagcgccggcatgcagccccagcccagcctgtgcagcagcgccatgagaaagcaggagatcatcaagatcaccgagcagctgatcgaggccatcaacaacggcgacttcgaggcctacaccaagatctgcgaccccggcctgaccagcttcgagcccgaggccctgggcaacctggtggagggcatggacttccacaagttctacttcgagaacctgctgagcaagaacagcaagcccatccacaccaccatcctgaacccccacgtgcacgtgatcggcgaggacgccgcctgcatcgcctacatcagactgacccagtacatcgacggccagggcagacccagaaccagccagagcgaggagaccagagtgtggcacagaagagacggcaagtggctgaacgtgcactaccactgcagcggcgcccccgccgcccccctgcagtag

SEQ ID NO: 75120 - DNA, 1362 bp, synthetic construct
  misc_feature 1..1362: note = Description of Artificial Sequence: Synthetic coding sequence
  source 1..1362: mol_type = other DNA
agactgctgaagcaccccaacatcgtgagactgcacgacagcatcagcgaggagggcttccactacctggtgttcgacctggtgaccggcggcgagctgttcgaggacatcgtggccagagagtactacagcgaggccgacgccagccactgcatccaccagatcctggagagcgtgaaccacatccaccagcacgacatcgtgcacagagacctgaagcccgagaacctgctgctggccagcaagtgcaagggcgccgccgtgaagctggccgacttcggcctggccatcgaggtgcagggcgagcagcaggcctggttcggcttcgccggcacccccggctacctgagccccgaggtgctgagaaaggacccctacggcaagcccgtggacatctgggcctgcggcgtgatcctgtacatcctgctggtgggctacccccccttctgggacgaggaccagcacaagctgtaccagcagatcaaggccggcgcctacgacttccccagccccgagtgggacaccgtgacccccgaggccaagaacctgatcaaccagatgctgaccatcaaccccgccaagagaatcaccgccgaccaggccctgaagcacccctgggtgtgccagagaagcaccgtggccagcatgatgcacagacaggagaccgtggagtgcctgagaaagttcaacgccagaagaaagctgaagggcgccatcctgaccaccatgctggtgagcagaaacttcagcgccgccaagagcctgctgaacaagaagagcgacggcggcgtgaagccccagagcaacaacaagaacagcctggtgagccccgcccaggagcccgcccccctgcagaccgccatggagccccagaccaccgtggtgcacaacgccaccgacggcatcaagggcagcaccgagagctgcaacaccaccaccgaggacgaggacctgaaggtgagaaagcaggagatcatcaagatcaccgagcagctgatcgaggccatcaacaacggcgacttcgaggcctacaccaagatctgcgaccccggcctgaccagcttcgagcccgaggccctgggcaacctggtggagggcatggacttccacaagttctacttcgagaacctgctgagcaagaacagcaagcccatccacaccaccatcctgaacccccacgtgcacgtgatcggcgaggacgccgcctgcatcgcctacatcagactgacccagtacatcgacggccagggcagacccagaaccagccagagcgaggagaccagagtgtggcacagaagagacggcaagtggctgaacgtgcactaccactgcagcggcgcccccgccgcccccctgcagtag

SEQ ID NO: 75121 - DNA, 1008 bp, synthetic construct
  misc_feature 1..1008: note = Description of Artificial Sequence: Synthetic coding sequence
  source 1..1008: mol_type = other DNA
tgataccagcagatcaaggccggcgcctacgacttccccagccccgagtgggacaccgtgacccccgaggccaagaacctgatcaaccagatgctgaccatcaaccccgccaagagaatcaccgccgaccaggccctgaagcacccctgggtgtgccagagaagcaccgtggccagcatgatgcacagacaggagaccgtggagtgcctgagaaagttcaacgccagaagaaagctgaagggcgccatcctgaccaccatgctggtgagcagaaacttcagcgccgccaagagcctgctgaacaagaagagcgacggcggcgtgaagccccagagcaacaacaagaacagcctggtgagccccgcccaggagcccgcccccctgcagaccgccatggagccccagaccaccgtggtgcacaacgccaccgacggcatcaagggcagcaccgagagctgcaacaccaccaccgaggacgaggacctgaaggccgcccccctgagaaccggcaacggcagcagcgtgcccgagggcagaagcagcagagacagaaccgcccccagcgccggcatgcagccccagcccagcctgtgcagcagcgccatgagaaagcaggagatcatcaagatcaccgagcagctgatcgaggccatcaacaacggcgacttcgaggcctacaccaagatctgcgaccccggcctgaccagcttcgagcccgaggccctgggcaacctggtggagggcatggacttccacaagttctacttcgagaacctgctgagcaagaacagcaagcccatccacaccaccatcctgaacccccacgtgcacgtgatcggcgaggacgccgcctgcatcgcctacatcagactgacccagtacatcgacggccagggcagacccagaaccagccagagcgaggagaccagagtgtggcacagaagagacggcaagtggctgaacgtgcactaccactgcagcggcgcccccgccgcccccctgcagtag

SEQ ID NO: 75122 - DNA, 543 bp, synthetic construct
  misc_feature 1..543: note = Description of Artificial Sequence: Synthetic coding sequence
  source 1..543: mol_type = other DNA
atggccaccaccgccacctgcaccagattcaccgacgactaccagctgttcgaggagctgggcaagggcgccttcagcgtggtgagaagatgcgtgaagaagaccagcacccaggagtacgccgccaagatcatcaacaccaagaagctgagcgccagagaccaccagaagctggagagagaggccagaatctgcagactgctgaagcaccccaacatcgccaccatccacggcggcatccacgacgccagcagcggcgactgcggcgtgttcgcccaggtgcagtgccccgagaagaccgagggctgccacccccacgaccacgcctgcctgcaggagctgctgagctgccagaagcccatcgagcaggaggtgggctggagatgccaggccaccgagcagcagcagaagcagagcagaaagcccagccccagagccagagccctggccgacggccacggcgccaccaaccactgcggcacccagagatacagatgggaccagggcctgcacagagagctgcagcaccaccacagaagatag

SEQ ID NO: 75123 - DNA, 240 bp, synthetic construct
  misc_feature 1..240: note = Description of Artificial Sequence: Synthetic coding sequence
  source 1..240: mol_type = other DNA
atgagcgagatcctgccctacagcgaggacaagatgggcagattcggcgccgaccccgagggcagcgacctgagcttcagctgcagactgcaggacaccaacagcttcttcgccggcaaccaggccaagagaccccccaagctgggccagatcggcagagccaagagagtggtgatcgaggacgacagaatcgacgacgtgctgaagggcatgggcgagaagccccccagcggcgtgtag

SEQ ID NO: 75124 - DNA, 1422 bp, synthetic construct
  misc_feature 1..1422: note = Description of Artificial Sequence: Synthetic coding sequence
  source 1..1422: mol_type = other DNA
atgctgaaggtgaccgtgcccagctgcagcgccagcagctgcagcagcgtgaccgccagcgccgcccccggcaccgccagcctggtgcccgactactggatcgacggcagcaacagagacgccctgagcgacttcttcgaggtggagagcgagctgggcagaggcgccaccagcatcgtgtacagatgcaagcagaagggcacccagaagccctacgccctgaaggtgctgaagaagaccgtggacaagaagatcgtgagaaccgagatcggcgtgctgctgagactgagccaccccaacatcatcaagctgaaggagatcttcgagacccccaccgagatcagcctggtgctggagctggtgaccggcggcgagctgttcgacagaatcgtggagaagggctactacagcgagagagacgccgccgacgccgtgaagcagatcctggaggccgtggcctacctgcacgagaacggcatcgtgcacagagacctgaagcccgagaacctgctgtacgccacccccgcccccgacgcccccctgaagatcgccgacttcggcctgagcaagatcgtggagcaccaggtgctgatgaagaccgtgtgcggcacccccggctactgcgcccccgagatcctgagaggctgcgcctacggccccgaggtggacatgtggagcgtgggcatcatcacctacatcctgctgtgcggcttcgagcccttctacgacgagagaggcgaccagttcatgttcagaagaatcctgaactgcgagtactacttcatcagcccctggtgggacgaggtgagcctgaacgccaaggacctggtgagaaagctgatcgtgctggaccccaagaagagactgaccaccttccaggccctgcagcacccctgggtgaccggcaaggccgccaacttcgtgcacatggacaccgcccagaagaagctgcaggagttcaacgccagaagaaagctgaaggccgccgtgaaggccgtggtggccagcagcagactgggcagcgccagcagcagccacggcagcatccaggagagccacaaggccagcagagaccccagccccatccaggacggcaacgaggacatgaaggccatccccgagggcgagaagatccagggcgacggcgcccaggccgccgtgaagggcgcccaggccgagctgatgaaggtgcaggccctggagaaggtgaagggcgccgacatcaacgccgaggaggcccccaagatggtgcccaaggccgtggaggacggcatcaaggtggccgacctggagctggaggagggcctggccgaggagaagctgaagaccgtggaggaggccgccgcccccagagagggccagggcagcagcgccgtgggcttcgaggtgccccagcaggacgtgatcctgcccgagtactag

SEQ ID NO: 75125 - DNA, 429 bp, synthetic construct
  misc_feature 1..429: note = Description of Artificial Sequence: Synthetic coding sequence
  source 1..429: mol_type = other DNA
atgctgaaggtgaccgtgcccagctgcagcgccagcagctgcagcagcgtgaccgccagcgccgcccccggcaccgccagcctggtgcccgactactggatcgacggcagcaacagagacgccctgagcgacttcttcgaggtggagagcgagctgggcagaggcgccaccagcatcgtgtacagatgcaagcagaagggcacccagaagccctacgccctgaaggtgctgaagaagaccgtggacaagaagatcgtgagaaccgagatcggcgtgctgctgagactgagccaccccaacatcatcaagctgaaggagatcttcgagacccccaccgagatcagcctggtgctggagctggtgaccggcggcgagctgttcgacagaatcgtggagaagggctactacagcgagagagacgccgcctag

SEQ ID NO: 75126 - DNA, 1422 bp, synthetic construct; identical to SEQ ID NO: 75124
  misc_feature 1..1422: note = Description of Artificial Sequence: Synthetic coding sequence
  source 1..1422: mol_type = other DNA

SEQ ID NO: 75127 - DNA, 2766 bp, synthetic construct
  misc_feature 1..2766: note = Description of Artificial Sequence: Synthetic coding sequence
  source 1..2766: mol_type = other DNA
atggccgacgacgacgtgctgttcgaggacgtgtacgagctgtgcgaggtgatcggcaagggccccttcagcgtggtgagaagatgcatcaacagagagaccggccagcagttcgccgtgaagatcgtggacgtggccaagttcaccagcagccccggcctgagcaccgaggacctgaagagagaggccagcatctgccacatgctgaagcacccccacatcgtggagctgctggagacctacagcagcgacggcatgctgtacatggtgttcgagttcatggacggcgccgacctgtgcttcgagatcgtgaagagagccgacgccggcttcgtgtacagcgaggccgtggccagccactacatgagacagatcctggaggccctgagatactgccacgacaacaacatcatccacagagacgtgaagccccactgcgtgctgctggccagcaaggagaacagcgcccccgtgaagctgggcggcttcggcgtggccatccagctgggcgagagcggcctggtggccggcggcagagtgggcaccccccacttcatggcccccgaggtggtgaagagagagccctacggcaagcccgtggacgtgtggggctgcggcgtgatcctgttcatcctgctgagcggctgcctgcccttctacggcaccaaggagagactgttcgagggcatcatcaagggcaagtacaagatgaaccccagacagtggagccacatcagcgagagcgccaaggacctggtgagaagaatgctgatgctggaccccgccgagagaatcaccgtgtacgaggccctgaaccacccctggctgaaggagagagacagatacgcctacaagatccacctgcccgagaccgtggagcagctgagaaagttcaacgccagaagaaagctgaagggcgccgtgctggccgccgtgagcagccacaagttcaacagcttctacggcgacccccccgaggagctgcccgacttcagcgaggaccccaccagcagcgtgctgctgatcgtgagcagagccgtgagccaggtgctggacagcctggaggagatccacgccctgaccgactgcagcgagaaggacctggacttcctgcacagcgtgttccaggaccagcacctgcacaccctgctggacctgtacgacaagatcaacaccaagagcagcccccagatcagaaacccccccagcgacgccgtgcagagagccaaggaggtgctggaggagatcagctgctaccccgagaacaacgacgccaaggagctgaagagaatcctgacccagccccacttcatggccctgctgcagacccacgacgtggtggcccacgaggtgtacagcgacgaggccctgagagtgacccccccccccaccagcccctacctgaacggcgacagccccgagagcgccaacggcgacatggacatggagaacgtgaccagagtgagactggtgcagttccagaagaacaccgacgagcccatgggcatcaccctgaagatgaacgagctgaaccactgcatcgtggccagaatcatgcacggcggcatgatccacagacagggcaccctgcacgtgggcgacgagatcagagagatcaacggcatcagcgtggccaaccagaccgtggagcagctgcagaagatgctgagagagatgagaggcagcatcaccttcaagatcgtgcccagctacagaacccagagcagcagctgcgagagagacagccccagcaccagcagacagagccccgccaacggccacagcagcaccaacaacagcgtgagcgacctgcccagcaccacccagcccaagggcagacagatctacgtgagagcccagttcgagtacgaccccgccaaggacgacctgatcccctgcaaggaggccggcatcagattcagagtgggcgacatcatccagatcatcagcaaggacgaccacaactggtggcagggcaagctggagaacagcaagaacggcaccgccggcctgatccccagccccgagctgcaggagtggagagtggcctgcatcgccatggagaagaccaagcaggagcagcaggccagctgcacctggttcggcaagaagaagaagcagtacaaggacaagtacctggccaagcacaacgccgacctggtgacctacgaggaggtggtgaagctgcccgccttcaagagaaagaccctggtgctgctgggcgcccacggcgtgggcagaagacacatcaagaacaccctgatcaccaagcaccccgacagattcgcctaccccatcccccacaccaccagaccccccaagaaggacgaggagaacggcaagaactactacttcgtgagccacgaccagatgatgcaggacatcagcaacaacgagtacctggagtacggcagccacgaggacgccatgtacggcaccaagctggagaccatcagaaagatccacgagcagggcctgatcgccatcctggacgtggagccccaggccctgaaggtgctgagaaccgccgagttcgcccccttcgtggtgttcatcgccgcccccaccatcacccccggcctgaacgaggacgagagcctgcagagactgcagaaggagagcgacatcctgcagagaacctacgcccactacttcgacctgaccatcatcaacaacgagatcgacgagaccatcagacacctggaggaggccgtggagctggtgtgcaccgccccccagtgggtgcccgtgagctgggtgtactag

SEQ ID NO: 75128 - DNA, 2730 bp, synthetic construct
  misc_feature 1..2730: note = Description of Artificial Sequence: Synthetic coding sequence
  source 1..2730: mol_type = other DNA
atggccgacgacgacgtgctgttcgaggacgtgtacgagctgtgcgaggtgatcggcaagggccccttcagcgtggtgagaagatgcatcaacagagagaccggccagcagttcgccgtgaagatcgtggacgtggccaagttcaccagcagccccggcctgagcaccgaggacctgaagagagaggccagcatctgccacatgctgaagcacccccacatcgtggagctgctggagacctacagcagcgacggcatgctgtacatggtgttcgagttcatggacggcgccgacctgtgcttcgagatcgtgaagagagccgacgccggcttcgtgtacagcgaggccgtggccagccactacatgagacagatcctggaggccctgagatactgccacgacaacaacatcatccacagagacgtgaagccccactgcgtgctgctggccagcaaggagaacagcgcccccgtgaagctgggcggcttcggcgtggccatccagctgggcgagagcggcctggtggccggcggcagagtgggcaccccccacttcatggcccccgaggtggtgaagagagagccctacggcaagcccgtggacgtgtggggctgcggcgtgatcctgttcatcctgctgagcggctgcctgcccttctacggcaccaaggagagactgttcgagggcatcatcaagggcaagtacaagatgaaccccagacagtggagccacatcagcgagagcgccaaggacctggtgagaagaatgctgatgctggaccccgccgagagaatcaccgtgtacgaggccctgaaccacccctggctgaaggagagagacagatacgcctacaagatccacctgcccgagaccgtggagcagctgagaaagttcaacgccagaagaaagctgaagggcgccgtgctggccgccgtgagcagccacaagttcaacagcttctacggcgacccccccgaggagctgcccgacttcagcgaggaccccaccagcagcgtgctgctgatcgtgagcagagccgtgagccaggtgctggacagcctggaggagatccacgccctgaccgactgcagcgagaaggacctggacttcctgcacagcgtgttccaggaccagcacctgcacaccctgctggacctgtacgacaagatcaacaccaagagcagcccccagatcagaaacccccccagcgacgccgtgcagagagccaaggaggtgctggaggagatcagctgctaccccgagaacaacgacgccaaggagctgaagagaatcctgacccagccccacttcatggccctgctgcagacccacgacgtggtggcccacgaggtgtacagcgacgaggccctgagagtgacccccccccccaccagcccctacctgaacggcgacagccccgagagcgccaacggcgacatggacatggagaacgtgaccagagtgagactggtgcagttccagaagaacaccgacgagcccatgggcatcaccctgaagatgaacgagctgaaccactgcatcgtggccagaatcatgcacggcggcatgatccacagacagggcaccctgcacgtgggcgacgagatcagagagatcaacggcatcagcgtggccaaccagaccgtggagcagctgcagaagatgctgagagagatgagaggcagcatcaccttcaagatcgtgcccagctacagaacccagagcagcagctgcgagagagacagccccagcaccagcagacagagccccgccaacggccacagcagcaccaacaacagcgtgagcatctacgtgagagcccagttcgagtacgaccccgccaaggacgacctgatcccctgcaaggaggccggcatcagattcagagtgggcgacatcatccagatcatcagcaaggacgaccacaactggtggcagggcaagctggagaacagcaagaacggcaccgccggcctgatccccagccccgagctgcaggagtggagagtggcctgcatcgccatggagaagaccaagcaggagcagcaggccagctgcacctggttcggcaagaagaagaagcagtacaaggacaagtacctggccaagcacaacgccgacctggtgacctacgaggaggtggtgaagctgcccgccttcaagagaaagaccctggtgctgctgggcgcccacggcgtgggcagaagacacatcaagaacaccctgatcaccaagcaccccgacagattcgcctaccccatcccccacaccaccagaccccccaagaaggacgaggagaacggcaagaactactacttcgtgagccacgaccagatgatgcaggacatcagcaacaacgagtacctggagtacggcagccacgaggacgccatgtacggcaccaagctggagaccatcagaaagatccacgagcagggcctgatcgccatcctggacgtggagccccaggccctgaaggtgctgagaaccgccgagttcgcccccttcgtggtgttcatcgccgcccccaccatcacccccggcctgaacgaggacgagagcctgcagagactgcagaaggagagcgacatcctgcagagaacctacgcccactacttcgacctgaccatcatcaacaacgagatcgacgagaccatcagacacctggaggaggccgtggagctggtgtgcaccgccccccagtgggtgcccgtgagctgggtgtactag

SEQ ID NO: 75129 - DNA, 1773 bp, synthetic construct
  misc_feature 1..1773: note = Description of Artificial Sequence: Synthetic coding sequence
  source 1..1773: mol_type = other DNA
atggccgacgacgacgtgctgttcgaggacgtgtacgagctgtgcgaggtgatcggcaagggccccttcagcgtggtgagaagatgcatcaacagagagaccggccagcagttcgccgtgaagatcgtggacgtggccaagttcaccagcagccccggcctgagcaccgaggacctgaagagagaggccagcatctgccacatgctgaagcacccccacatcgtggagctgctggagacctacagcagcgacggcatgctgtacatggtgttcgagttcatggacggcgccgacctgtgcttcgagatcgtgaagagagccgacgccggcttcgtgtacagcgaggccgtggccagccactacatgagacagatcctggaggccctgagatactgccacgacaacaacatcatccacagagacgtgaagccccactgcgtgctgctggccagcaaggagaacagcgcccccgtgaagctgggcggcttcggcgtggccatccagctgggcgagagcggcctggtggccggcggcagagtgggcaccccccacttcatggcccccgaggtggtgaagagagagccctacggcaagcccgtggacgtgtggggctgcggcgtgatcctgttcatcctgctgagcggctgcctgcccttctacggcaccaaggagagactgttcgagggcatcatcaagggcaagtacaagatgaaccccagacagtggagccacatcagcgagagcgccaaggacctggtgagaagaatgctgatgctggaccccgccgagagaatcaccgtgtacgaggccctgaaccacccctggctgaaggagagagacagatacgcctacaagatccacctgcccgagaccgtggagcagctgagaaagttcaacgccagaagaaagctgaagggcgccgtgctggccgccgtgagcagccacaagttcaacagcttctacggcgacccccccgaggagctgcccgacttcagcgaggaccccaccagcagcggcctgctggccgccgagagagccgtgagccaggtgctggacagcctggaggagatccacgccctgaccgactgcagcgagaaggacctggacttcctgcacagcgtgttccaggaccagcacctgcacaccctgctggacctgtacgacaagatcaacaccaagagcagcccccagatcagaaacccccccagcgacgccgtgcagagagccaaggaggtgctggaggagatcagctgctaccccgagaacaacgacgccaaggagctgaagagaatcctgacccagccccacttcatggccctgctgcagacccacgacgtggtggcccacgaggtgtacagcgacgaggccctgagagtgacccccccccccaccagcccctacctgaacggcgacagccccgagagcgccaacggcgacatggacatggagaacgtgaccagagtgagactggtgcagttccagaagaacaccgacgagcccatgggcatcaccctgaagatgaacgagctgaaccactgcatcgtggccagaatcatgcacggcggcatgatccacagacagggcaccctgcacgtgggcgacgagatcagagagatcaacggcatcagcgtggccaaccagaccgtggagcagctgcagaagatgctgagagagatgagaggcagcatcaccttcaagatcgtgcccagctacagaacccagagcagcagctgcgaggtgatgaccctgaccaaccacccccacctgctgtag

SEQ ID NO: 75130 - DNA, 2730 bp, synthetic construct
  misc_feature 1..2730: note = Description of Artificial Sequence: Synthetic coding sequence
  source 1..2730: mol_type = other DNA
atggccgacgacgacgtgctgttcgaggacgtgtacgagctgtgcgaggtgatcggcaagggccccttcagcgtggtgagaagatgcatcaacagagagaccggccagcagttcgccgtgaagatcgtggacgtggccaagttcaccagcagccccggcctgagcaccgaggacctgaagagagaggccagcatctgccacatgctgaagcacccccacatcgtggagctgctggagacctacagcagcgacggcatgctgtacatggtgttcgagttcatggacggcgccgacctgtgcttcgagatcgtgaagagagccgacgccggcttcgtgtacagcgaggccgtggccagccactacatgagacagatcctggaggccctgagatactgccacgacaacaacatcatccacagagacgtgaagccccactgcgtgctgctggccagcaaggagaacagcgcccccgtgaagctgggcggcttcggcgtggccatccagctgggcgagagcggcctggtggccggcggcagagtgggcaccccccacttcatggcccccgaggtggtgaagagagagccctacggcaagcccgtggacgtgtggggctgcggcgtgatcctgttcatcctgctgagcggctgcctgcccttctacggcaccaaggagagactgttcgagggcatcatcaagggcaagtacaagatgaaccccagacagtggagccacatcagcgagagcgccaaggacctggtgagaagaatgctgatgctggaccccgccgagagaatcaccgtgtacgaggccctgaaccacccctggctgaaggagagagacagatacgcctacaagatccacctgcccgagaccgtggagcagctgagaaagttcaacgccagaagaaagctgaagggcgccgtgctggccgccgtgagcagccacaagttcaacagcttctacggcgacccccccgaggagctgcccgacttcagcgaggaccccaccagcagcggcctgctggccgccgagagagccgtgagccaggtgctggacagcctggaggagatccacgccctgaccgactgcagcgagaaggacctggacttcctgcacagcgtgttccaggaccagcacctgcacaccctgctggacctgtacgacaagatcaacaccaagagcagcccccagatcagaaacccccccagcgacgccgtgcagagagccaaggaggtgctggaggagatcagctgctaccccgagaacaacgacgccaaggagctgaagagaatcctgacccagccccacttcatggccctgctgcagacccacgacgtggtggcccacgaggtgtacagcgacgaggccctgagagtgacccccccccccaccagcccctacctgaacggcgacagccccgagagcgccaacggcgacatggacatggagaacgtgaccagagtgagactggtgcagttccagaagaacaccgacgagcccatgggcatcaccctgaagatgaacgagctgaaccactgcatcgtggccagaatcatgcacggcggcatgatccacagacagggcaccctgcacgtgggcgacgagatcagagagatcaacggcatcagcgtggccaaccagaccgtggagcagctgcagaagatgctgagagagatgagaggcagcatcaccttcaagatcgtgcccagctacagaacccagagcagcagctgcgagagagacagccccagcaccagcagacagagccccgccaacggccacagcagcaccaacaacagcgtgagcatctacgtgagagcccagttcgagtacgaccccgccaaggacgacctgatcccctgcaaggaggccggcatcagattcagagtgggcgacatcatccagatcatcagcaaggacgaccacaactggtggcagggcaagctggagaacagcaagaacggcaccgccggcctgatccccagccccgagctgcaggagtggagagtggcctgcatcgccatggagaagaccaagcaggagcagcaggccagctgcacctggttcggcaagaagaagaagcagtacaaggacaagtacctggccaagcacaacgccgacctggtgacctacgaggaggtggtgaagctgcccgccttcaagagaaagaccctggtgctgctgggcgcccacggcgtgggcagaagacacatcaagaacaccctgatcaccaagcaccccgacagattcgcctaccccatcccccacaccaccagaccccccaagaaggacgaggagaacggcaagaactactacttcgtgagccacgaccagatgatgcaggacatcagcaacaacgagtacctggagtacggcagccacgaggacgccatgtacggcaccaagctggagaccatcagaaagatccacgagcagggcctgatcgccatcctggacgtggagccccaggccctgaaggtgctgagaaccgccgagttcgcccccttcgtggtgttcatcgccgcccccaccatcacccccggcctgaacgaggacgagagcctgcagagactgcagaaggagagcgacatcctgcagagaacctacgcccactacttcgacctgaccatcatcaacaacgagatcgacgagaccatcagacacctggaggaggccgtggagctggtgtgcaccgccccccagtgggtgcccgtgagctgggtgtactag

SEQ ID NO: 75131 - DNA, 2781 bp, synthetic construct
  misc_feature 1..2781: note = Description of Artificial Sequence: Synthetic coding sequence
  source 1..2781: mol_type = other DNA
atggccgacgacgacgtgctgttcgaggacgtgtacgagctgtgcgaggtgatcggcaagggccccttcagcgtggtgagaagatgcatcaacagagagaccggccagcagttcgccgtgaagatcgtggacgtggccaagttcaccagcagccccggcctgagcaccgaggacctgaagagagaggccagcatctgccacatgctgaagcacccccacatcgtggagctgctggagacctacagcagcgacggcatgctgtacatggtgttcgagttcatggacggcgccgacctgtgcttcgagatcgtgaagagagccgacgccggcttcgtgtacagcgaggccgtggccagccactacatgagacagatcctggaggccctgagatactgccacgacaacaacatcatccacagagacgtgaagccccactgcgtgctgctggccagcaaggagaacagcgcccccgtgaagctgggcggcttcggcgtggccatccagctgggcgagagcggcctggtggccggcggcagagtgggcaccccccacttcatggcccccgaggtggtgaagagagagccctacggcaagcccgtggacgtgtggggctgcggcgtgatcctgttcatcctgctgagcggctgcctgcccttctacggcaccaaggagagactgttcgagggcatcatcaagggcaagtacaagatgaaccccagacagtggagccacatcagcgagagcgccaaggacctggtgagaagaatgctgatgctggaccccgccgagagaatcaccgtgtacgaggccctgaaccacccctggctgaaggagagagacagatacgcctacaagatccacctgcccgagaccgtggagcagctgagaaagttcaacgccagaagaaagctgaagggcgccgtgctggccgccgtgagcagccacaagttcaacagcttctacggcgacccccccgaggagctgcccgacttcagcgaggaccccaccagcagcggcctgctggccgccgagagagccgtgagccaggtgctggacagcctggaggagatccacgccctgaccgactgcagcgagaaggacctggacttcctgcacagcgtgttccaggaccagcacctgcacaccctgctggacctgtacgacaagatcaacaccaagagcagcccccagatcagaaacccccccagcgacgccgtgcagagagccaaggaggtgctggaggagatcagctgctaccccgagaacaacgacgccaaggagctgaagagaatcctgacccagccccacttcatggccctgctgcagacccacgacgtggtggcccacgaggtgtacagcgacgaggccctgagagtgacccccccccccaccagcccctacctgaacggcgacagccccgagagcgccaacggcgacatggacatggagaacgtgaccagagtgagactggtgcagttccagaagaacaccgacgagcccatgggcatcaccctgaagatgaacgagctgaaccactgcatcgtggccagaatcatgcacggcggcatgatccacagacagggcaccctgcacgtgggcgacgagatcagagagatcaacggcatcagcgtggccaaccagaccgtggagcagctgcagaagatgctgagagagatgagaggcagcatcaccttcaagatcgtgcccagctacagaacccagagcagcagctgcgagagagacagccccagcaccagcagacagagccccgccaacggccacagcagcaccaacaacagcgtgagcgacctgcccagcaccacccagcccaagggcagacagatctacgtgagagcccagttcgagtacgaccccgccaaggacgacctgatcccctgcaaggaggccggcatcagattcagagtgggcgacatcatccagatcatcagcaaggacgaccacaactggtggcagggcaagctggagaacagcaagaacggcaccgccggcctgatccccagccccgagctgcaggagtggagagtggcctgcatcgccatggagaagaccaagcaggagcagcaggccagctgcacctggttcggcaagaagaagaagcagtacaaggacaagtacctggccaagcacaacgccgtgttcgaccagctggacctggtgacctacgaggaggtggtgaagctgcccgccttcaagagaaagaccctggtgctgctgggcgcccacggcgtgggcagaagacacatcaagaacaccctgatcaccaagcaccccgacagattcgcctaccccatcccccacaccaccagaccccccaagaaggacgaggagaacggcaagaactactacttcgtgagccacgaccagatgatgcaggacatcagcaacaacgagtacctggagtacggcagccacgaggacgccatgtacggcaccaagctggagaccatcagaaagatccacgagcagggcctgatcgccatcctggacgtggagccccaggccctgaaggtgctgagaaccgccgagttcgcccccttcgtggtgttcatcgccgcccccaccatcacccccggcctgaacgaggacgagagcctgcagagactgcagaaggagagcgacatcctgcagagaacctacgcccactacttcgacctgaccatcatcaacaacgagatcgacgagaccatcagacacctggaggaggccgtggagctggtgtgcaccgccccccagtgggtgcccgtgagctgggtgtactag

SEQ ID NO: 75132 - DNA, 2766 bp, synthetic construct
  misc_feature 1..2766: note = Description of Artificial Sequence: Synthetic coding sequence
  source 1..2766: mol_type = other DNA
atggccgacgacgacgtgctgttcgaggacgtgtacgagctgtgcgaggtgatcggcaagggccccttcagcgtggtgagaagatgcatcaacagagagaccggccagcagttcgccgtgaagatcgtggacgtggccaagttcaccagcagccccggcctgagcaccgaggacctgaagagagaggccagcatctgccacatgctgaagcacccccacatcgtggagctgctggagacctacagcagcgacggcatgctgtacatggtgttcgagttcatggacggcgccgacctgtgcttcgagatcgtgaagagagccgacgccggcttcgtgtacagcgaggccgtggccagccactacatgagacagatcctggaggccctgagatactgccacgacaacaacatcatccacagagacgtgaagccccactgcgtgctgctggccagcaaggagaacagcgcccccgtgaagctgggcggcttcggcgtggccatccagctgggcgagagcggcctggtggccggcggcagagtgggcaccccccacttcatggcccccgaggtggtgaagagagagccctacggcaagcccgtggacgtgtggggctgcggcgtgatcctgttcatcctgctgagcggctgcctgcccttctacggcaccaaggagagactgttcgagggcatcatcaagggcaagtacaagatgaaccccagacagtggagccacatcagcgagagcgccaaggacctggtgagaagaatgctgatgctggaccccgccgagagaatcaccgtgtacgaggccctgaaccacccctggctgaaggagagagacagatacgcctacaagatccacctgcccgagaccgtggagcagctgagaaagttcaacgccagaagaaagctgaagggcgccgtgctggccgccgtgagcagccacaagttcaacagcttctacggcgacccccccgaggagctgcccgacttcagcgaggaccccaccagcagcggcctgctggccgccgagagagccgtgagccaggtgctggacagcctggaggagatccacgccctgaccgactgcagcgagaaggacctggacttcctgcacagcgtgttccaggaccagcacctgcacaccctgctggacctgtacgacaagatcaacaccaagagcagcccccagatcagaaacccccccagcgacgccgtgcagagagccaaggaggtgctggaggagatcagctgctaccccgagaacaacgacgccaaggagctgaagagaatcctgacccagccccacttcatggccctgctgcagacccacgacgtggtggcccacgaggtgtacagcgacgaggccctgagagtgacccccccccccaccagcccctacctgaacggcgacagccccgagagcgccaacggcgacatggacatggagaacgtgaccagagtgagactggtgcagttccagaagaacaccgacgagcccatgggcatcaccctgaagatgaacgagctgaaccactgcatcgtggccagaatcatgcacggcggcatgatccacagacagggcaccctgcacgtgggcgacgagatcagagagatcaacggcatcagcgtggccaaccagaccgtggagcagctgcagaagatgctgagagagatgagaggcagcatcaccttcaagatcgtgcccagctacagaacccagagcagcagctgcgagagagacagccccagcaccagcagacagagccccgccaacggccacagcagcaccaacaacagcgtgagcgacctgcccagcaccacccagcccaagggcagacagatctacgtgagagcccagttcgagtacgaccccgccaaggacgacctgatcccctgcaaggaggccggcatcagattcagagtgggcgacatcatccagatcatcagcaaggacgaccacaactggtggcagggcaagctggagaacagcaagaacggcaccgccggcctgatccccagccccgagctgcaggagtggagagtggcctgcatcgccatggagaagaccaagcaggagcagcaggccagctgcacctggttcggcaagaagaagaagcagtacaaggacaagtacctggccaagcacaacgccgacctggtgacctacgaggaggtggtgaagctgcccgccttcaagagaaagaccctggtgctgctgggcgcccacggcgtgggcagaagacacatcaagaacaccctgatcaccaagcaccccgacagattcgcctaccccatcccccacaccaccagaccccccaagaaggacgaggagaacggcaagaactactacttcgtgagccacgaccagatgatgcaggacatcagcaacaacgagtacctggagtacggcagccacgaggacgccatgtacggcaccaagctggagaccatcagaaagatccacgagcagggcctgatcgccatcctggacgtggagccccaggccctgaaggtgctgagaaccgccgagttcgcccccttcgtggtgttcatcgccgcccccaccatcacccccggcctgaacgaggacgagagcctgcagagactgcagaaggagagcgacatcctgcagagaacctacgcccactacttcgacctgaccatcatcaacaacgagatcgacgagaccatcagacacctggaggaggccgtggagctggtgtgcaccgccccccagtgggtgcccgtgagctgggtgtactag

SEQ ID NO: 75133 - DNA, 1146 bp, synthetic construct
  misc_feature 1..1146: note = Description of Artificial Sequence: Synthetic coding sequence
  source 1..1146: mol_type = other DNA
gacgagatcagagagatcaacggcatcagcgtggccaaccagaccgtggagcagctgcagaagatgctgagagagatgagaggcagcatcaccttcaagatcgtgcccagctacagaacccagagcagcagctgcgagagagacagccccagcaccagcagacagagccccgccaacggccacagcagcaccaacaacagcgtgagcatctacgtgagagcccagttcgagtacgaccccgccaaggacgacctgatcccctgcaaggaggccggcatcagattcagagtgggcgacatcatccagatcatcagcaaggacgaccacaactggtggcagggcaagctggagaacagcaagaacggcaccgccggcctgatccccagccccgagctgcaggagtggagagtggcctgcatcgccatggagaagaccaagcaggagcagcaggccagctgcacctggttcggcaagaagaagaagcagtacaaggacaagtacctggccaagcacaacgccgtgttcgaccagctggacctggtgacctacgaggaggtggtgaagctgcccgccttcaagagaaagaccctggtgctgctgggcgcccacggcgtgggcagaagacacatcaagaacaccctgatcaccaagcaccccgacagattcgcctaccccatcccccacaccaccagaccccccaagaaggacgaggagaacggcaagaactactacttcgtgagccacgaccagatgatgcaggacatcagcaacaacgagtacctggagtacggcagccacgaggacgccatgtacggcaccaagctggagaccatcagaaagatccacgagcagggcctgatcgccatcctggacgtggagccccaggccctgaaggtgctgagaaccgccgagttcgcccccttcgtggtgttcatcgccgcccccaccatcacccccggcctgaacgaggacgagagcctgcagagactgcagaaggagagcgacatcctgcagagaacctacgcccactacttcgacctgaccatcatcaacaacgagatcgacgagaccatcagacacctggaggaggccgtggagctggtgtgcaccgccccccagtgggtgcccgtgagctgggtgtactag

SEQ ID NO: 75134 - DNA, 1557 bp, synthetic construct
  misc_feature 1..1557: note = Description of Artificial Sequence: Synthetic coding sequence
  source 1..1557: mol_type = other DNA
ctgtacgacaagatcaacaccaagagcagcccccagatcagaaacccccccagcgacgccgtgcagagagccaaggaggtgctggaggagatcagctgctaccccgagaacaacgacgccaaggagctgaagagaatcctgacccagccccacttcatggccctgctgcagacccacgacgtggtggcccacgaggtgtacagcgacgaggccctgagagtgacccccccccccaccagcccctacctgaacggcgacagccccgagagcgccaacggcgacatggacatggagaacgtgaccagagtgagactggtgcagttccagaagaacaccgacgagcccatgggcatcaccctgaagatgaacgagctgaaccactgcatcgtggccagaatcatgcacggcggcatgatccacagacagggcaccctgcacgtgggcgacgagatcagagagatcaacggcatcagcgtggccaaccagaccgtggagcagctgcagaagatgctgagagagatgagaggcagcatcaccttcaagatcgtgcccagctacagaacccagagcagcagctgcgaggacctgcccagcaccacccagcccaagggcagacagatctacgtgagagcccagttcgagtacgaccccgccaaggacgacctgatcccctgcaaggaggccggcatcagattcagagtgggcgacatcatccagatcatcagcaaggacgaccacaactggtggcagggcaagctggagaacagcaagaacggcaccgccggcctgatccccagccccgagctgcaggagtggagagtggcctgcatcgccatggagaagaccaagcaggagcagcaggccagctgcacctggttcggcaagaagaagaagcagtacaaggacaagtacctggccaagcacaacgccgtgttcgaccagctggacctggtgacctacgaggaggtggtgaagctgcccgccttcaagagaaagaccctggtgctgctgggcgcccacggcgtgggcagaagacacatcaagaacaccctgatcaccaagcaccccgacagattcgcctaccccatcccccacaccaccagaccccccaagaaggacgaggagaacggcaagaactactacttcgtgagccacgaccagatgatgcaggacatcagcaacaacgagtacctggagtacggcagccacgaggacgccatgtacggcaccaagctggagaccatcagaaagatccacgagcagggcctgatcgccatcctggacgtggagccccaggccctgaaggtgctgagaaccgccgagttcgcccccttcgtggtgttcatcgccgcccccaccatcacccccggcctgaacgaggacgagagcctgcagagactgcagaaggagagcgacatcctgcagagaacctacgcccactacttcgacctgaccatcatcaacaacgagatcgacgagaccatcagacacctggaggaggccgtggagctggtgtgcaccgccccccagtgggtgcccgtgagctgggtgtactag

SEQ ID NO: 75135 - DNA, 2694 bp, synthetic construct
  misc_feature 1..2694: note = Description of Artificial Sequence: Synthetic coding sequence
  source 1..2694: mol_type = other DNA
atggccgacgacgacgtgctgttcgaggacgtgtacgagctgtgcgaggtgatcggcaagggccccttcagcgtggtgagaagatgcatcaacagagagaccggccagcagttcgccgtgaagatcgtggacgtggccaagttcaccagcagccccggcctgagcaccgaggacctgaagagagaggccagcatctgccacatgctgaagcacccccacatcgtggagctgctggagacctacagcagcgacggcatgctgtacatggtgttcgagttcatggacggcgccgacctgtgcttcgagatcgtgaagagagccgacgccggcttcgtgtacagcgaggccgtggccagccactacatgagacagatcctggaggccctgagatactgccacgacaacaacatcatccacagagacgtgaagccccactgcgtgctgctggccagcaaggagaacagcgcccccgtgaagctgggcggcttcggcgtggccatccagctgggcgagagcggcctggtggccggcggcagagtgggcaccccccacttcatggcccccgaggtggtgaagagagagccctacggcaagcccgtggacgtgtggggctgcggcgtgatcctgttcatcctgctgagcggctgcctgcccttctacggcaccaaggagagactgttcgagggcatcatcaagggcaagtacaagatgaaccccagacagtggagccacatcagcgagagcgccaaggacctggtgagaagaatgctgatgctggaccccgccgagagaatcaccgtgtacgaggccctgaaccacccctggctgaaggagagagacagatacgcctacaagatccacctgcccgagaccgtggagcagctgagaaagttcaacgccagaagaaagctgaagggcgccgtgctggccgccgtgagcagccacaagttcaacagcttctacggcgacccccccgaggagctgcccgacttcagcgaggaccccaccagcagcggcgccgtgagccaggtgctggacagcctggaggagatccacgccctgaccgactgcagcgagaaggacctggacttcctgcacagcgtgttccaggaccagcacctgcacaccctgctggacctgtacgacaagatcaacaccaagagcagcccccagatcagaaacccccccagcgacgccgtgcagagagccaaggaggtgctggaggagatcagctgctaccccgagaacaacgacgccaaggagctgaagagaatcctgacccagccccacttcatggccctgctgcagacccacgacgtggtggcccacgaggtgtacagcgacgaggccctgagagtgacccccccccccaccagcccctacctgaacggcgacagccccgagagcgccaacggcgacatggacatggagaacgtgaccagagtgagactggtgcagttccagaagaacaccgacgagcccatgggcatcaccctgaagatgaacgagctgaaccactgcatcgtggccagaatcatgcacggcggcatgatccacagacagggcaccctgcacgtgggcgacgagatcagagagatcaacggcatcagcgtggccaaccagaccgtggagcagctgcagaagatgctgagagagatgagaggcagcatcaccttcaagatcgtgcccagctacagaacccagagcagcagctgcgaggacctgcccagcaccacccagcccaagggcagacagatctacgtgagagcccagttcgagtacgaccccgccaaggacgacctgatcccctgcaaggaggccggcatcagattcagagtgggcgacatcatccagatcatcagcaaggacgaccacaactggtggcagggcaagctggagaacagcaagaacggcaccgccggcctgatccccagccccgagctgcaggagtggagagtggcctgcatcgccatggagaagaccaagcaggagcagcaggccagctgcacctggttcggcaagaagaagaagcagtacaaggacaagtacctggccaagcacaacgccgtgttcgaccagctggacctggtgacctacgaggaggtggtgaagctgcccgccttcaagagaaagaccctggtgctgctgggcgcccacggcgtgggcagaagacacatcaagaacaccctgatcaccaagcaccccgacagattcgcctaccccatcccccacaccaccagaccccccaagaaggacgaggagaacggcaagaactactacttcgtgagccacgaccagatgatgcaggacatcagcaacaacgagtacctggagtacggcagccacgaggacgccatgtacggcaccaagctggagaccatcagaaagatccacgagcagggcctgatcgccatcctggacgtggagccccaggccctgaaggtgctgagaaccgccgagttcgcccccttcgtggtgttcatcgccgcccccaccatcacccccggcctgaacgaggacgagagcctgcagagactgcagaaggagagcgacatcctgcagagaacctacgcccactacttcgacctgaccatcatcaacaacgagatcgacgagaccatcagacacctggaggaggccgtggagctggtgtgcaccgccccccagtgggtgcccgtgagctgggtgtactag

SEQ ID NO: 75136 - DNA, 2697 bp, synthetic construct
  misc_feature 1..2697: note = Description of Artificial Sequence: Synthetic coding sequence
  source 1..2697: mol_type = other DNA
atggccgacgacgacgtgctgttcgaggacgtgtacgagctgtgcgaggtgatcggcaagggccccttcagcgtggtgagaagatgcatcaacagagagaccggccagcagttcgccgtgaagatcgtggacgtggccaagttcaccagcagccccggcctgagcaccgaggacctgaagagagaggccagcatctgccacatgctgaagcacccccacatcgtggagctgctggagacctacagcagcgacggcatgctgtacatggtgttcgagttcatggacggcgccgacctgtgcttcgagatcgtgaagagagccgacgccggcttcgtgtacagcgaggccgtggccagccactacatgagacagatcctggaggccctgagatactgccacgacaacaacatcatccacagagacgtgaagccccactgcgtgctgctggccagcaaggagaacagcgcccccgtgaagctgggcggcttcggcgtggccatccagctgggcgagagcggcctggtggccggcggcagagtgggcaccccccacttcatggcccccgaggtggtgaagagagagccctacggcaagcccgtggacgtgtggggctgcggcgtgatcctgttcatcctgctgagcggctgcctgcccttctacggcaccaaggagagactgttcgagggcatcatcaagggcaagtacaagatgaaccccagacagtggagccacatcagcgagagcgccaaggacctggtgagaagaatgctgatgctggaccccgccgagagaatcaccgtgtacgaggccctgaaccacccctggctgaaggagagagacagatacgcctacaagatccacctgcccgagaccgtggagcagctgagaaagttcaacgccagaagaaagctgaagggcgccgtgctggccgccgtgagcagccacaagttcaacagcttctacggcgacccccccgaggagctgcccgacttcagcgaggaccccaccagcagcggcctgctggccgccgagagagccgtgagccaggtgctggacagcctggaggagatccacgccctgaccgactgcagcgagaaggacctggacttcctgcacagcgtgttccaggaccagcacctgcacaccctgctggacctgtacgacaagatcaacaccaagagcagcccccagatcagaaacccccccagcgacgccgtgcagagagccaaggaggtgctggaggagatcagctgctaccccgagaacaacgacgccaaggagctgaagagaatcctgacccagccccacttcatggccctgctgcagacccacgacgtggtggcccacgaggtgtacagcgacgaggccctgagagtgacccccccccccaccagcccctacctgaacggcgacagccccgagagcgccaacggcgacatggacatggagaacgtgaccagagtgagactggtgcagttccagaagaacaccgacgagcccatgggcatcaccctgaagatgaacgagctgaaccactgcatcgtggccagaatcatgcacggcggcatgatccacagacagggcaccctgcacgtgggcgacgagatcagagagatcaacggcatcagcgtggccaaccagaccgtggagcagctgcagaagatgctgagagagatgagaggcagcatcaccttcaagatcgtgcccagctacagaacccagagcagcagctgcgaggacctgcccagcaccacccagcccaagggcagacagatctacgtgagagcccagttcgagtacgaccccgccaaggacgacctgatcccctgcaaggaggccggcatcagattcagagtgggcgacatcatccagatcatcagcaaggacgaccacaactggtggcagggcaagctggagaacagcaagaacggcaccgccggcctgatccccagccccgagctgcaggagtggagagtggcctgcatcgccatggagaagaccaagcaggagcagcaggccagctgcacctggttcggcaagaagaagaagcagtacaaggacaagtacctggccaagcacaacgccgacctggtgacctacgaggaggtggtgaagctgcccgccttcaagagaaagaccctggtgctgctgggcgcccacggcgtgggcagaagacacatcaagaacaccctgatcaccaagcaccccgacagattcgcctaccccatcccccacaccaccagaccccccaagaaggacgaggagaacggcaagaactactacttcgtgagccacgaccagatgatgcaggacatcagcaacaacgagtacctggagtacggcagccacgaggacgccatgtacggcaccaagctggagaccatcagaaagatccacgagcagggcctgatcgccatcctggacgtggagccccaggccctgaaggtgctgagaaccgccgagttcgcccccttcgtggtgttcatcgccgcccccaccatcacccccggcctgaacgaggacgagagcctgcagagactgcagaaggagagcgacatcctgcagagaacctacgcccactacttcgacctgaccatcatcaacaacgagatcgacgagaccatcagacacctggaggaggccgtggagctggtgtgcaccgccccccagtgggtgcccgtgagctgggtgtactag

SEQ ID NO: 75137 - DNA, 3237 bp, synthetic construct
  misc_feature 1..3237: note = Description of Artificial Sequence: Synthetic coding sequence
  source 1..3237: mol_type = other DNA
atggccttctacagctgctgctgggtgctgctggccctgacctggcacaccagcgcctacggccccgaccagagagcccagaagaagggcgacatcatcctgggcggcctgttccccatccacttcggcgtggccgccaaggaccaggacctgaagagcagacccgagagcgtggagtgcatcagatacaacttcagaggcttcagatggctgcaggccatgatcttcgccatcgaggagatcaacagcagccccgccctgctgcccaacctgaccctgggctacagaatcttcgacacctgcaacaccgtgagcaaggccctggaggccaccctgagcttcgtggcccagaacaagatcgacagcctgaacctggacgagttctgcaactgcagcgagcacatccccagcaccatcgccgtggtgggcgccaccggcagcggcgtgagcaccgccgtggccaacctgctgggcctgttctacatcccccaggtgagctacgccagcagcagcagactgctgagcaacaagaaccagttcaagagcttcctgagaaccatccccaacgacgagcaccaggccaccgccatggccgacatcatcgagtacttcagatggaactgggtgggcaccatcgccgccgacgacgactacggcagacccggcatcgagaagttcagagaggaggccgaggagagagacatctgcatcgacttcagcgagctgatcagccagtacagcgacgaggaggagatccagcacgtggtggaggtgatccagaacagcaccgccaaggtgatcgtggtgttcagcagcggccccgacctggagcccctgatcaaggagatcgtgagaagaaacatcaccggcaagatctggctggccagcgaggcctgggccagcagcagcctgatcgccatgccccagtacttccacgtggtgggcggcaccatcggcttcgccctgaaggccggccagatccccggcttcagagagttcctgaagaaggtgcaccccagaaagagcgtgcacaacggcttcgccaaggagttctgggaggagaccttcaactgccacctgcaggagggcgccaagggccccctgcccgtggacaccttcctgagaggccacgaggagagcggcgacagattcagcaacagcagcaccgccttcagacccctgtgcaccggcgacgagaacatcagcagcgtggagaccccctacatcgactacacccacctgagaatcagctacaacgtgtacctggccgtgtacagcatcgcccacgccctgcaggacatctacacctgcctgcccggcagaggcctgttcaccaacggcagctgcgccgacatcaagaaggtggaggcctggcaggtgctgaagcacctgagacacctgaacttcaccaacaacatgggcgagcaggtgaccttcgacgagtgcggcgacctggtgggcaactacagcatcatcaactggcacctgagccccgaggacggcagcatcgtgttcaaggaggtgggctactacaacgtgtacgccaagaagggcgagagactgttcatcaacgaggagaagatcctgtggagcggcttcagcagagaggtgcccttcagcaactgcagcagagactgcctggccggcaccagaaagggcatcatcgagggcgagcccacctgctgcttcgagtgcgtggagtgccccgacggcgagtacagcgacgagaccgacgccagcgcctgcaacaagtgccccgacgacttctggagcaacgagaaccacaccagctgcatcgccaaggagatcgagttcctgagctggaccgagcccttcggcatcgccctgaccctgttcgccgtgctgggcatcttcctgaccgccttcgtgctgggcgtgttcatcaagttcagaaacacccccatcgtgaaggccaccaacagagagctgagctacctgctgctgttcagcctgctgtgctgcttcagcagcagcctgttcttcatcggcgagccccaggactggacctgcagactgagacagcccgccttcggcatcagcttcgtgctgtgcatcagctgcatcctggtgaagaccaacagagtgctgctggtgttcgaggccaagatccccaccagcttccacagaaagtggtggggcctgaacctgcagttcctgctggtgttcctgtgcaccttcatgcagatcgtgatctgcgtgatctggctgtacaccgccccccccagcagctacagaaaccaggagctggaggacgagatcatcttcatcacctgccacgagggcagcctgatggccctgggcttcctgatcggctacacctgcctgctggccgccatctgcttcttcttcgccttcaagagcagaaagctgcccgagaacttcaacgaggccaagttcatcaccttcagcatgctgatcttcttcatcgtgtggatcagcttcatccccgcctacgccagcacctacggcaagttcgtgagcgccgtggaggtgatcgccatcctggccgccagcttcggcctgctggcctgcatcttcttcaacaagatctacatcatcctgttcaagcccagcagaaacaccatcgaggaggtgagatgcagcaccgccgcccacgccttcaaggtggccgccagagccaccctgagaagaagcaacgtgagcagaaagagaagcagcagcctgggcggcagcaccggcagcacccccagcagcagcatcagcagcaagagcaacagcgaggaccccttcccccagcccgagagacagaagcagcagcagcccctggccctgacccagcaggagcagcagcagcagcccctgaccctgccccagcagcagagaagccagcagcagcccagatgcaagcagaaggtgatcttcggcagcggcaccgtgaccttcagcctgagcttcgacgagccccagaagaacgccatggcccacagaaacagcacccaccagaacagcctggaggcccagaagagcagcgacaccctgaccagacacgagcccctgctgcccctgcagtgcggcgagaccgacctggacctgaccgtgcaggagaccggcctgcagggccccgtgggcggcgaccagagacccgaggtggaggaccccgaggagctgagccccgccctggtggtgagcagcagccagagcttcgtgatcagcggcggcggcagcaccgtgaccgagaacgtggtgaacagctag

SEQ ID NO: 75138 - DNA, 3237 bp, synthetic construct; identical to SEQ ID NO: 75137
  misc_feature 1..3237: note = Description of Artificial Sequence: Synthetic coding sequence
  source 1..3237: mol_type = other DNA

SEQ ID NO: 75139 - DNA, 3267 bp, synthetic construct
  misc_feature 1..3267: note = Description of Artificial Sequence: Synthetic coding sequence
  source 1..3267: mol_type = other DNA
atggccttctacagctgctgctgggtgctgctggccctgacctggcacaccagcgcctacggccccgaccagagagcccagaagaagggcgacatcatcctgggcggcctgttccccatccacttcggcgtggccgccaaggaccaggacctgaagagcagacccgagagcgtggagtgcatcagatacaacttcagaggcttcagatggctgcaggccatgatcttcgccatcgaggagatcaacagcagccccgccctgctgcccaacctgaccctgggctacagaatcttcgacacctgcaacaccgtgagcaaggccctggaggccaccctgagcttcgtggcccagaacaagatcgacagcctgaacctggacgagttctgcaactgcagcgagcacatccccagcaccatcgccgtggtgggcgccaccggcagcggcgtgagcaccgccgtggccaacctgctgggcctgttctacatcccccaggtgagctacgccagcagcagcagactgctgagcaacaagaaccagttcaagagcttcctgagaaccatccccaacgacgagcaccaggccaccgccatggccgacatcatcgagtacttcagatggaactgggtgggcaccatcgccgccgacgacgactacggcagacccggcatcgagaagttcagagaggaggccgaggagagagacatctgcatcgacttcagcgagctgatcagccagtacagcgacgaggaggagatccagcacgtggtggaggtgatccagaacagcaccgccaaggtgatcgtggtgttcagcagcggccccgacctggagcccctgatcaaggagatcgtgagaagaaacatcaccggcaagatctggctggccagcgaggcctgggccagcagcagcctgatcgccatgccccagtacttccacgtggtgggcggcaccatcggcttcgccctgaaggccggccagatccccggcttcagagagttcctgaagaaggtgcaccccagaaagagcgtgcacaacggcttcgccaaggagttctgggaggagaccttcaactgccacctgcaggagggcgccaagggccccctgcccgtggacaccttcctgagaggccacgaggagagcggcgacagattcagcaacagcagcaccgccttcagacccctgtgcaccggcgacgagaacatcagcagcgtggagaccccctacatcgactacacccacctgagaatcagctacaacgtgtacctggccgtgtacagcatcgcccacgccctgcaggacatctacacctgcctgcccggcagaggcctgttcaccaacggcagctgcgccgacatcaagaaggtggaggcctggcaggtgctgaagcacctgagacacctgaacttcaccaacaacatgggcgagcaggtgaccttcgacgagtgcggcgacctggtgggcaactacagcatcatcaactggcacctgagccccgaggacggcagcatcgtgttcaaggaggtgggctactacaacgtgtacgccaagaagggcgagagactgttcatcaacgaggagaagatcctgtggagcggcttcagcagagagcccctgaccttcgtgctgagcgtgctgcaggtgcccttcagcaactgcagcagagactgcctggccggcaccagaaagggcatcatcgagggcgagcccacctgctgcttcgagtgcgtggagtgccccgacggcgagtacagcgacgagaccgacgccagcgcctgcaacaagtgccccgacgacttctggagcaacgagaaccacaccagctgcatcgccaaggagatcgagttcctgagctggaccgagcccttcggcatcgccctgaccctgttcgccgtgctgggcatcttcctgaccgccttcgtgctgggcgtgttcatcaagttcagaaacacccccatcgtgaaggccaccaacagagagctgagctacctgctgctgttcagcctgctgtgctgcttcagcagcagcctgttcttcatcggcgagccccaggactggacctgcagactgagacagcccgccttcggcatcagcttcgtgctgtgcatcagctgcatcctggtgaagaccaacagagtgctgctggtgttcgaggccaagatccccaccagcttccacagaaagtggtggggcctgaacctgcagttcctgctggtgttcctgtgcaccttcatgcagatcgtgatctgcgtgatctggctgtacaccgccccccccagcagctacagaaaccaggagctggaggacgagatcatcttcatcacctgccacgagggcagcctgatggccctgggcttcctgatcggctacacctgcctgctggccgccatctgcttcttcttcgccttcaagagcagaaagctgcccgagaacttcaacgaggccaagttcatcaccttcagcatgctgatcttcttcatcgtgtggatcagcttcatccccgcctacgccagcacctacggcaagttcgtgagcgccgtggaggtgatcgccatcctggccgccagcttcggcctgctggcctgcatcttcttcaacaagatctacatcatcctgttcaagcccagcagaaacaccatcgaggaggtgagatgcagcaccgccgcccacgccttcaaggtggccgccagagccaccctgagaagaagcaacgtgagcagaaagagaagcagcagcctgggcggcagcaccggcagcacccccagcagcagcatcagcagcaagagcaacagcgaggaccccttcccccagcccgagagacagaagcagcagcagcccctggccctgacccagcaggagcagcagcagcagcccctgaccctgccccagcagcagagaagccagcagcagcccagatgcaagcagaaggtgatcttcggcagcggcaccgtgaccttcagcctgagcttcgacgagccccagaagaacgccatggcccacagaaacagcacccaccagaacagcctggaggcccagaagagcagcgacaccctgaccagacacgagcccctgctgcccctgcagtgcggcgagaccgacctggacctgaccgtgcaggagaccggcctgcagggccccgtgggcggcgaccagagacccgaggtggaggaccccgaggagctgagccccgccctggtggtgagcagcagccagagcttcgtgatcagcggcggcggcagcaccgtgaccgagaacgtggtgaacagctag

SEQ ID NO: 75140 - DNA, 978 bp, synthetic construct
  misc_feature 1..978: note = Description of Artificial Sequence: Synthetic coding sequence
  source 1..978: mol_type = other DNA
atggccagacccgtgagcgacagaacccccgcccccctgctgctgggcggccccgccggcaccccccccggcggcggcgccctgctgggcctgagaagcctgctgcagggcaccagcaagcccaaggagcccgccagctgcctgctgaaggagaaggagagaaaggccgccctgcccgccgccaccacccccggccccggcctggagaccgccggccccgccgacgcccccgccggcgccgtggtgggcggcggcagccccagaggcagacccggccccgtgcccgcccccggcctgctggcccccctgctgtgggagagaaccctgcccttcggcgacgtggagtacgtggacctggacgccttcctgctggagcacggcctgccccccagcccccccccccccggcggccccagccccgagcccagccccgccagaacccccgcccccagccccggccccggcagctgcggcagcgccagccccagaagcagccccggccacgcccccgccagagccgccctgggcaccgccagcggccacagagccggcctgaccagcagagacacccccagccccgtggaccccgacaccgtggaggtgctgatgaccttcgagcccgaccccgccgacctggccctgagcagcatccccggccacgagaccttcgaccccagaagacacagattcagcgaggaggagctgaagccccagcccatcatgaagaaggccagaaagatccaggtgcccgaggagcagaaggacgagaagtactggagcagaagatacaagaacaacgaggccgccaagagaagcagagacgccagaagactgaaggagaaccagatcagcgtgagagccgccttcctggagaaggagaacgccctgctgagacaggaggtggtggccgtgagacaggagctgagccactacagagccgtgctgagcagataccaggcccagcacggcgccctgtag

SEQ ID NO: 75141 - DNA, 969 bp, synthetic construct
  misc_feature 1..969: note = Description of Artificial Sequence: Synthetic coding sequence
  source 1..969: mol_type = other DNA
agccagagaggcaagggcacctgccccggcagccacagaaaccacgccagcagcctgcccagccacggcctggtgagcatccagggcatcagcgcccccgccggccagtggcccgccccccccccctggagccaggagggcatgcagtgccacagagacctggccctgagccaggccctgtggggctggcagctgagcaagcagagcggctgggcccaccccagcctgccccacagccccctgcccagcaccgtgcacagctgcagctgggcccccccccacctgcagagacacctgcccctggccaccgtgagccccggcaccacccagctgacccagggccccgccggcagaaccctgggccagacccaggccagctgccccgagcccagacccagcatggacgccgtggacgccaccatggagaagctgagagcccagtgcctgagcagaggcgccagcggcatccagggcctggccagattcttcagacagctggacagagacggcagcagaagcctggacgccgacgagttcagacagggcctggccaagctgggcctggtgctggaccaggccgaggccgagggcgtgtgcagaaagtgggacagaaacggcagcggcaccctggacctggaggagttcctgagagccctgagaccccccatgagccaggccagagaggccgtgatcgccgccgccttcgccaagctggacagaagcggcgacggcgtggtgaccgtggacgacctgagaggcgtgtacagcggcagagcccaccccaaggtgagaagcggcgagtggaccgaggacgaggtgctgagaagattcctggacaacttcgacagcagcgagaaggacggccaggtgaccctggccgagttccaggactactacagcggcgtgagcgccagcatgaacaccgacgaggagttcgtggccatgatgaccagcgcctggcagctgtag

SEQ ID NO: 75142 - DNA, 489 bp, synthetic construct
  misc_feature 1..489: note = Description of Artificial Sequence: Synthetic coding sequence
  source 1..489: mol_type = other DNA
atggacgccgtggacgccaccatggagaagctgagagcccagtgcctgagcagaggcgccagcggcatccagggcctggccagattcttcagacagctggacagagacggcagcagaagcctggacgccgacgagttcagacagggcctggccaagctgggcctggtgctggaccaggccgaggccgagggcgtgtgcagaaagtgggacagaaacggcagcggcaccctggacctggaggagttcctgagagccctgagaccccccatgagccaggccagagaggccgtgatcgccgccgccttcgccaagctggacagaagcggcgacggcgtggtgaccgtggacgacctgagaggcgtgtacagcggcagagcccaccccaaggtgaccctggccgagttccaggactactacagcggcgtgagcgccagcatgaacaccgacgaggagttcgtggccatgatgaccagcgcctggcagctgtag

SEQ ID NO: 75143 - DNA, 882 bp, synthetic construct
  misc_feature 1..882: note = Description of Artificial Sequence: Synthetic coding sequence
  source 1..882: mol_type = other DNA
ctgatcaacatcctgtacagagccgtgatcagcgaccccgagcagaacctggccatcgagcagaaggagagcgaccacatcctgcccgacagcaagatgacccccctgagattcagaaagagaaccctgcacgagaccaagatcagaacccacagcaccctgaccgagaacgtgctgagccacaagctgcagttcgacggcagaatcgtgagcagaaccaacgtgctgcccttcatccagaagagcatctacagccaccagtgcggcagaagaaagggcaagcagtacagactgggcgacttctacgtgggcgccaccctgaccttcctgagcagcgaccacctgagcctgcccgagagcatcaaggagaacaccctgctgaagctgagaatcaccaacatcgaccagatcgccctggacagcctgaagaccgccagcatggagcaggaggacgacatcatcatccaggagaccaacgacagactggtgttcaaggccatccaggacgtgctgaaggagaagctgcacaagagaggcgtgagaatcctgaccggcctgggcaagtacttccagcagctggacaaggagggcaacggcctgctggacaaggccgacttcaagcaggccctgaaggtgttccacctggaggtgagcgagaaggacttcgagagcgcctggctgatcctgaacgacaacggcaacggcaaggtggactacggcgagttcaagagaggcatcatcggcgagatgaacgagtacagaaagagctacgtgagaaaggccttcatgaagctggacttcaacaagagcggcagcgtgcccatcatcaacatcagaaagtgctactgcgccaagaagcacagccaggtgatcagcggctag

SEQ ID NO: 75144 - DNA, 1149 bp, synthetic construct
  misc_feature 1..1149: note = Description of Artificial Sequence: Synthetic coding sequence
  source 1..1149: mol_type = other DNA
atgatcgaccacctgagcagagccgtgatcagcgaccccgagcagaacctggccatcgagcagaaggagagcgaccacatcctgcccgacagcaagatgacccccctgagattcagaaagagaaccctgcacgagaccaagatcagaacccacagcaccctgaccgagaacgtgctgagccacaagctgcagttcgacggcagaatcgtgagcagaaacggcagagacgcctgcagagagctgatcggcttcttcttcacccacgaccagagcctgaccatctacgagtacagacagttcggcaagaacagaaccaacgtgctgcccttcatccagaagagcatctacagccaccagtgcggcagaagaaagggcaagcagtacagactgggcgacttctacgtgggcgccaccctgaccttcctgagcagcgaccacctgagcctgcccgagagcatcaaggagaacaccctgctgaagctgagaatcaccaacatcgaccagatcgccctggacagcctgaagaccgccagcatggagcaggaggacgacatcatcatccaggagaccaacgacagactggtgttcaaggccatccaggacgtgctgaaggagaagctgcacaagagaggcgtgagaatcctgaccggcctgggcaagtacttccagcagctggacaaggagggcaacggcctgctggacaaggccgacttcaagcaggccctgaaggtgttccacctggaggtgagcgagaaggacttcgagagcgcctggctgatcctgaacgacaacggcaacggcaaggtggactacggcgagttcaagagaggcatcatcggcgagatgaacgagtacagaaagagctacgtgagaaaggccttcatgaagctggacttcaacaagagcggcagcgtgcccatcatcaacatcagaaagtgctactgcgccaagaagcacagccaggtgatcagcggccacagcaccgaggaggagatcaagagcagcttcctggagaccctgaaggtggcctgcagcaagagcgacgaggtgagctacggcgagttcgaggactactacgagggcctgagcatcggcatcgtggacgacgaggacttcgtgaacatcctgagaaccccctggggcatctag

SEQ ID NO: 75145 - DNA, 1674 bp, synthetic construct
  misc_feature 1..1674: note = Description of Artificial Sequence: Synthetic coding sequence
  source 1..1674: mol_type = other DNA
atgggcaacagcttctgctacaccgccgtgtactgcatgatcaacaccggcacccagatggacctggaggtgaagggcgtggccgccaccagcagaagccagatccagcccttcttcggcagaaagaagcccctgcagcagagatggaccagcgagagctggaccaaccagaacagctgcccccccgtggtgcccagactggacctgggcagcctggtggacagcgacgacgaggacaacttcagctacatccccctgagcaccgccaacctgcccaacagcagcagcaccctgggctgggtgaccccctgccagaccccctacacccagtaccacctgaacaagctggaccagaacatcatccccgagaacctgcccgcccccaccgacaagtgcaagctgaagtaccagcagtgcaagaccgagatcaaggagggctacaagcagtacagccagagaaacgccgagaacaccaagagcaacgtgacccacaagcagagccccagaaacaagatcgacgagaagtgcgtgcaggacgaggaggccaacaccgacgacctgaccaccctggacagaaaggccatcctgcagcagggctacgccgacaacagctgcgacaagcagcagagagccagaaagctggacgccgagatcgtggccgccgagaagaagaagcagatcgtggccgagcaggtgatgatcgaccacctgagcagagccgtgatcagcgaccccgagcagaacctggccatcgagcagaaggagagcgaccacatcctgcccgacagcaagatgacccccctgagattcagaaagagaaccctgcacgagaccaagatcagaacccacagcaccctgaccgagaacgtgctgagccacaagctgcagttcgacggcagaatcgtgagcagaaacggcagagacgcctgcagagagctgatcggcttcttcttcacccacgaccagagcctgaccatctacgagtacagacagttcggcaagaacagaaccaacgtgctgcccttcatccagaagagcatctacagccaccagtgcggcagaagaaagggcaagcagtacagactgggcgacttctacgtgggcgccaccctgaccttcctgagcagcgaccacctgagcctgcccgagagcatcaaggagaacaccctgctgaagctgagaatcaccaacatcgaccagatcgccctggacagcctgaagaccgccagcatggagcaggaggacgacatcatcatccaggagaccaacgacagactggtgttcaaggccatccaggacgtgctgaaggagaagctgcacaagagaggcgtgagaatcctgaccggcctgggcaagtacttccagcagctggacaaggagggcaacggcctgctggacaaggccgacttcaagcaggccctgaaggtgttccacctggaggtgagcgagaaggacttcgagagcgcctggctgatcctgaacgacaacggcaacggcaaggtggactacggcgagttcaagagaggcatcatcggcgagatgaacgagtacagaaagagctacgtgagaaaggccttcatgaagctggacttcaacaagagcggcagcgtgcccatcatcaacatcagaaagtgctactgcgccaagaagcacagccaggtgatcagcggctag

SEQ ID NO: 75146 - DNA, 615 bp, synthetic construct
  misc_feature 1..615: note = Description of Artificial Sequence: Synthetic coding sequence
  source 1..615: mol_type = other DNA
atggagcaggaggacgacatcatcatccaggagaccaacgacagactggtgttcaaggccatccaggacgtgctgaaggagaagctgcacaagagaggcgtgagaatcctgaccggcctgggcaagtacttccagcagctggacaaggagggcaacggcctgctggacaaggccgacttcaagcaggccctgaaggtgttccacctggaggtgagcgagaaggacttcgagagcgcctggctgatcctgaacgacaacggcaacggcaaggtggactacggcgagttcaagagaggcatcatcggcgagatgaacgagtacagaaagagctacgtgagaaaggccttcatgaagctggacttcaacaagagcggcagcgtgcccatcatcaacatcagaaagtgctactgcgccaagaagcacagccaggtgatcagcggccacagcaccgaggaggagatcaagagcagcttcctggagaccctgaaggtggcctgcagcaagagcgacgaggtgagctacggcgagttcgaggactactacgagggcctgagcatcggcatcgtggacgacgaggacttcgtgaacatcctgagaaccccctggggcatctag

SEQ ID NO: 75147 - DNA, 3009 bp, synthetic construct
  misc_feature 1..3009: note = Description of Artificial Sequence: Synthetic coding sequence
  source 1..3009: mol_type = other DNA
atggccgcccacgagtgggactggttccagagagaggagctgatcggccagatcagcgacatcagagtgcagaacctgcaggtggagagagagaacgtgcagaagagaaccttcaccagatggatcaacctgcacctggagaagtgcaacccccccctggaggtgaaggacctgttcgtggacatccaggacggcaagatcctgatggccctgctggaggtgctgagcggcagaaacctgctgcacgagtacaagagcagcagccacagaatcttcagactgaacaacatcgccaaggccctgaagttcctggaggacagcaacgtgaagctggtgagcatcgacgccgccgagatcgccgacggcaaccccagcctggtgctgggcctgatctggaacatcatcctgttcttccagatcaaggagctgaccggcaacctgagcagaaacagccccagcagcagcctgagccccggcagcggcggcaccgacagcgacagcagcttcccccccacccccaccgccgagagaagcgtggccatcagcgtgaaggaccagagaaaggccatcaaggccctgctggcctgggtgcagagaaagaccagaaagtacggcgtggccgtgcaggacttcgccggcagctggagaagcggcctggccttcctggccgtgatcaaggccatcgaccccagcctggtggacatgaagcaggccctggagaacagcaccagagagaacctggagaaggccttcagcatcgcccaggacgccctgcacatccccagactgctggagcccgaggacatcatggtggacacccccgacgagcagagcatcatgacctacgtggcccagttcctggagagattccccgagctggaggccgaggacatcttcgacagcgacaaggaggtgcccatcgagagcaccttcgtgagaatcaaggagacccccagcgagcaggagagcaaggtgttcgtgctgaccgagaacggcgagagaacctacaccgtgaaccacgagaccagccaccccccccccagcaaggtgttcgtgtgcgacaagcccgagagcatgaaggagttcagactggacggcgtgagcagccacgccctgagcgacagcagcaccgagttcatgcaccagatcatcgaccaggtgctgcagggcggccccggcaagaccagcgacatcagcgagcccagccccgagagcagcatcctgagcagcagaaaggagaacggcagaagcaacagcctgcccatcaagaagaccgtgcacttcgaggccgacacctacaaggaccccttctgcagcaagaacctgagcctgtgcttcgagggcagccccagagtggccaaggagagcctgagacaggacggccacgtgctggccgtggaggtggccgaggagaaggagcagaagcaggagagcagcaagatccccgagagcagcagcgacaaggtggccggcgacatcttcctggtggagggcaccaacaacaacagccagagcagcagctgcaacggcgccctggagagcaccgccagacacgacgaggagagccacagcctgagcccccccggcgagaacaccgtgatggccgacagcttccagatcaaggtgaacctgatgaccgtggaggccctggaggagggcgactacttcgaggccatccccctgaaggccagcaagttcaacagcgacctgatcgacttcgccagcaccagccaggccttcaacaaggtgcccagcccccacgagaccaagcccgacgaggacgccgaggccttcgagaaccacgccgagaagctgggcaagagaagcatcaagagcgcccacaagaagaaggacagccccgagccccaggtgaagatggacaagcacgagccccaccaggacagcggcgaggaggccgagggctgccccagcgcccccgaggagacccccgtggacaagaagcccgaggtgcacgagaaggccaagagaaagagcaccagaccccactacgaggaggagggcgaggacgacgacctgcagggcgtgggcgaggagctgagcagcagcccccccagcagctgcgtgagcctggagaccctgggcagccacagcgaggagggcctggacttcaagcccagcccccccctgagcaaggtgagcgtgatcccccacgacctgttctacttcccccactacgaggtgcccctggccgccgtgctggaggcctacgtggaggaccccgaggacctgaagaacgaggagatggacctggaggagcccgagggctacatgcccgacctggacagcagagaggaggaggccgacggcagccagagcagcagcagcagcagcgtgcccggcgagagcctgcccagcgccagcgaccaggtgctgtacctgagcagaggcggcgtgggcaccacccccgccagcgagcccgcccccctggccccccacgaggaccaccagcagagagagaccaaggagaacgaccccatggacagccaccagagccaggagagccccaacctggagaacatcgccaaccccctggaggagaacgtgaccaaggagagcatcagcagcaagaagaaggagaagagaaagcacgtggaccacgtggagagcagcctgttcgtggcccccggcagcgtgcagagcagcgacgacctggaggaggacagcagcgactacagcatccccagcagaaccagccacagcgacagcagcatctacctgagaagacacacccacagaagcagcgagagcgaccacttcagctacgtgcagctgagaaacgccgccgacctggacgacagaagaaacagaatcctgaccagaaaggccaacagcagcggcgaggccatgagcctgggcagccacagcccccagagcgacagcctgacccagctggtgcagcagcccgacatgatgtacttcatcctgttcctgtggctgctggtgtactgcctgctgctgttcccccagctggacgtgagcagactgtag

SEQ ID NO: 75148 - DNA, 450 bp, synthetic construct
  misc_feature 1..450: note = Description of Artificial Sequence: Synthetic coding sequence
  source 1..450: mol_type = other DNA
atggccgaccagctgaccgaggagcagatcgccgagttcaaggaggccttcagcctgttcgacaaggacggcgacggcaccatcaccaccaaggagctgggcaccgtgatgagaagcctgggccagaaccccaccgaggccgagctgcaggacatgatcaacgaggtggacgccgacggcaacggcaccatcgacttccccgagttcctgaccatgatggccagaaagatgaaggacaccgacagcgaggaggagatcagagaggccttcagagtgttcgacaaggacggcaacggctacatcagcgccgccgagctgagacacgtgatgaccaacctgggcgagaagctgaccgacgaggaggtggacgagatgatcagagaggccgacatcgacggcgacggccaggtgaactacgaggagttcgtgcagatgatgaccgccaagtag

SEQ ID NO: 75149 - DNA, 450 bp, synthetic construct; identical to SEQ ID NO: 75148
  misc_feature 1..450: note = Description of Artificial Sequence: Synthetic coding sequence
  source 1..450: mol_type = other DNA

SEQ ID NO: 75150 - DNA, 450 bp, synthetic construct; identical to SEQ ID NO: 75148
  misc_feature 1..450: note = Description of Artificial Sequence: Synthetic coding sequence
  source 1..450: mol_type = other DNA

SEQ ID NO: 75151 - DNA, 450 bp, synthetic construct; identical to SEQ ID NO: 75148
  misc_feature 1..450: note = Description of Artificial Sequence: Synthetic coding sequence
  source 1..450: mol_type = other DNA

SEQ ID NO: 75152 - DNA, 5022 bp, synthetic construct
  misc_feature 1..5022: note = Description of Artificial Sequence: Synthetic coding sequence
  source 1..5022: mol_type = other DNA
atgtggagagccgagggcaagtggctgcccaagaccagcagaaagagcgtgagccagagcgtgttctgcggcaccagcacctactgcgtgctgaacaccgtgccccccatcgaggacgaccacggcaacagcaacagcagccacgtgaagatcttcctgcccaagaagctgctggagtgcctgcccaagtgcagcagcctgcccaaggagagacacagatggaacaccaacgaggagatcgccgcctacctgatcaccttcgagaagcacgaggagtggctgaccaccagccccaagaccagaccccagaacggcagcatgatcctgtacaacagaaagaaggtgaagtacagaaaggacggctactgctggaagaagagaaaggacggcaagaccaccagagaggaccacatgaagctgaaggtgcagggcgtggagtgcctgtacggctgctacgtgcacagcagcatcatccccaccttccacagaagatgctactggctgctgcagaaccccgacatcgtgctggtgcactacctgaacgtgcccgccatcgaggactgcggcaagccctgcggccccatcctgtgcagcatcaacaccgacaagaaggagtgggccaagtggaccaaggaggagctgatcggccagctgaagcccatgttccacggcatcaagtggacctgcagcaacggcaacagcagcagcggcttcagcgtggagcagctggtgcagcagatcctggacagccaccagaccaagccccagcccagaacccacaactgcctgtgcaccggcagcctgggcgccggcggcagcgtgcaccacaagtgcaacagcgccaagcacagaatcatcagccccaaggtggagcccagaaccggcggctacggcagccacagcgaggtgcagcacaacgacgtgagcgagggcaagcacgagcacagccacagcaagggcagcagcagagagaagagaaacggcaaggtggccaagcccgtgctgctgcaccagagcagcaccgaggtgagcagcaccaaccaggtggaggtgcccgacaccacccagagcagccccgtgagcatcagcagcggcctgaacagcgaccccgacatggtggacagccccgtggtgaccggcgtgagcggcatggccgtggccagcgtgatgggcagcctgagccagagcgccaccgtgttcatgagcgaggtgaccaacgaggccgtgtacaccatgagccccaccgccggccccaaccaccacctgctgagccccgacgccagccagggcctggtgctggccgtgagcagcgacggccacaagttcgccttccccaccaccggcagcagcgagagcctgagcatgctgcccaccaacgtgagcgaggagctggtgctgagcaccaccctggacggcggcagaaagatccccgagaccaccatgaacttcgaccccgactgcttcctgaacaaccccaagcagggccagacctacggcggcggcggcctgaaggccgagatggtgagcagcaacatcagacacagcccccccggcgagagaagcttcagcttcaccaccgtgctgaccaaggagatcaagaccgaggacaccagcttcgagcagcagatggccaaggaggcctacagcagcagcgccgccgccgtggccgccagcagcctgaccctgaccgccggcagcagcctgctgcccagcggcggcggcctgagccccagcaccaccctggagcagatggacttcagcgccatcgacagcaacaaggactacaccagcagcttcagccagaccggccacagcccccacatccaccagacccccagccccagcttcttcctgcaggacgccagcaagcccctgcccgtggagcagaacacccacagcagcctgagcgacagcggcggcaccttcgtgatgcccaccgtgaagaccgaggccagcagccagaccagcagctgcagcggccacgtggagaccagaatcgagagcaccagcagcctgcacctgatgcagttccaggccaacttccaggccatgaccgccgagggcgaggtgaccatggagaccagccaggccgccgagggcagcgaggtgctgctgaagagcggcgagctgcaggcctgcagcagcgagcactacctgcagcccgagaccaacggcgtgatcagaagcgccggcggcgtgcccatcctgcccggcaacgtggtgcagggcctgtaccccgtggcccagcccagcctgggcaacgccagcaacatggagctgagcctggaccacttcgacatcagcttcagcaaccagttcagcgacctgatcaacgacttcatcagcgtggagggcggcagcagcaccatctacggccaccagctggtgagcggcgacagcaccgccctgagccagagcgaggacggcgccagagcccccttcacccaggccgagatgtgcctgccctgctgcagcccccagcagggcagcctgcagctgagcagcagcgagggcggcgccagcaccatggcctacatgcacgtggccgaggtggtgagcgccgccagcgcccagggcaccctgggcatgctgcagcagagcggcagagtgttcatggtgaccgactacagccccgagtggagctaccccgagggcggcgtgaaggtgctgatcaccggcccctggcaggaggccagcaacaactacagctgcctgttcgaccagatcagcgtgcccgccagcctgatccagcccggcgtgctgagatgctactgccccgcccacgacaccggcctggtgaccctgcaggtggccttcaacaaccagatcatcagcaacagcgtggtgttcgagtacaaggccagagccctgcccaccctgcccagcagccagcacgactggctgagcctggacgacaaccagttcagaatgagcatcctggagagactggagcagatggagagaagaatggccgagatgaccggcagccagcagcacaagcaggccagcggcggcggcagcagcggcggcggcagcggcagcggcaacggcggcagccaggcccagtgcgccagcggcaccggcgccctgggcagctgcttcgagagcagagtggtggtggtgtgcgagaagatgatgagcagagcctgctgggccaagagcaagcacctgatccacagcaagaccttcagaggcatgaccctgctgcacctggccgccgcccagggctacgccaccctgatccagaccctgatcaagtggagaaccaagcacgccgacagcatcgacctggagctggaggtggaccccctgaacgtggaccacttcagctgcacccccctgatgtgggcctgcgccctgggccacctggaggccgccgtggtgctgtacaagtgggacagaagagccatcagcatccccgacagcctgggcagactgcccctgggcatcgccagaagcagaggccacgtgaagctggccgagtgcctggagcacctgcagagagacgagcaggcccagctgggccagaaccccagaatccactgccccgccagcgaggagcccagcaccgagagctggatggcccagtggcacagcgaggccatcagcagccccgagatccccaagggcgtgaccgtgatcgccagcaccaaccccgagctgagaagacccagaagcgagcccagcaactactacagcagcgagagccacaaggactaccccgcccccaagaagcacaagctgaaccccgagtacttccagaccagacaggagaagctgctgcccaccgccctgagcctggaggagcccaacatcagaaagcagagccccagcagcaagcagagcgtgcccgagaccctgagccccagcgagggcgtgagagacttcagcagagagctgagcccccccacccccgagaccgccgccttccaggccagcggcagccagcccgtgggcaagtggaacagcaaggacctgtacatcggcgtgagcaccgtgcaggtgaccggcaaccccaagggcaccagcgtgggcaaggaggccgcccccagccaggtgagacccagagagcccatgagcgtgctgatgatggccaacagagaggtggtgaacaccgagctgggcagctacagagacagcgccgagaacgaggagtgcggccagcccatggacgacatccaggtgaacatgatgaccctggccgagcacatcatcgaggccacccccgacagaatcaagcaggagaacttcgtgcccatggagagcagcggcctggagagaaccgaccccgccaccatcagcagcaccatgagctggctggccagctacctggccgacgccgactgcctgcccagcgccgcccagatcagaagcgcctacaacgagcccctgacccccagcagcaacaccagcctgagccccgtgggcagccccgtgagcgagatcgccttcgagaagcccaacctgcccagcgccgccgactggagcgagttcctgagcgccagcaccagcgagaaggtggagaacgagttcgcccagctgaccctgagcgaccacgagcagagagagctgtacgaggccgccagactggtgcagaccgccttcagaaagtacaagggcagacccctgagagagcagcaggaggtggccgccgccgtgatccagagatgctacagaaagtacaagcagtacgccctgtacaagaagatgacccaggccgccatcctgatccagagcaagttcagaagctactacgagcagaagaagttccagcagagcagaagagccgccgtgctgatccagaagtactacagaagctacaagaagtgcggcaagagaagacaggccagaagaaccgccgtgatcgtgcagcagaagctgagaagcagcctgctgaccaagaagcaggaccaggccgccagaaagatcatgagattcctgagaagatgcagacacagccccctggtggaccacagactgtacaagagaagcgagagaatcgagaagggccagggcacctag

SEQ ID NO: 75153 - DNA, 1911 bp, synthetic construct
  misc_feature 1..1911: note = Description of Artificial Sequence: Synthetic coding sequence
  source 1..1911: mol_type = other DNA
atgatgagcagagcctgctgggccaagagcaagcacctgatccacagcaagaccttcagaggcatgaccctgctgcacctggccgccgcccagggctacgccaccctgatccagaccctgatcaagtggagaaccaagcacgccgacagcatcgacctggagctggaggtggaccccctgaacgtggaccacttcagctgcacccccctgatgtgggcctgcgccctgggccacctggaggccgccgtggtgctgtacaagtgggacagaagagccatcagcatccccgacagcctgggcagactgcccctgggcatcgccagaagcagaggccacgtgaagctggccgagtgcctggagcacctgcagagagacgagcaggcccagctgggccagaaccccagaatccactgccccgccagcgaggagcccagcaccgagagctggatggcccagtggcacagcgaggccatcagcagccccgagatccccaagggcgtgaccgtgatcgccagcaccaaccccgagctgagaagacccagaagcgagcccagcaactactacagcagcgagagccacaaggactaccccgcccccaagaagcacaagctgaaccccgagtacttccagaccagacaggagaagctgctgcccaccgccctgagcctggaggagcccaacatcagaaagcagagccccagcagcaagcagagcgtgcccgagaccctgagccccagcgagggcgtgagagacttcagcagagagctgagcccccccacccccgagaccgccgccttccaggccagcggcagccagcccgtgggcaagtggaacagcaaggacctgtacatcggcgtgagcaccgtgcaggtgaccggcaaccccaagggcaccagcgtgggcaaggaggccgcccccagccaggtgagacccagagagcccatgagcgtgctgatgatggccaacagagaggtggtgaacaccgagctgggcagctacagagacagcgccgagaacgaggagtgcggccagcccatggacgacatccaggtgaacatgatgaccctggccgagcacatcatcgaggccacccccgacagaatcaagcaggagaacttcgtgcccatggagagcagcggcctggagagaaccgaccccgccaccatcagcagcaccatgagctggctggccagctacctggccgacgccgactgcctgcccagcgccgcccagatcagaagcgcctacaacgagcccctgacccccagcagcaacaccagcctgagccccgtgggcagccccgtgagcgagatcgccttcgagaagcccaacctgcccagcgccgccgactggagcgagttcctgagcgccagcaccagcgagaaggtggagaacgagttcgcccagctgaccctgagcgaccacgagcagagagagctgtacgaggccgccagactggtgcagaccgccttcagaaagtacaagggcagacccctgagagagcagcaggaggtggccgccgccgtgatccagagatgctacagaaagtacaagcagggcaagaacatctgcctgaagtacgccctgtacaagaagatgacccaggccgccatcctgatccagagcaagttcagaagctactacgagcagaagaagttccagcagagcagaagagccgccgtgctgatccagaagtactacagaagctacaagaagtgcggcaagagaagacaggccagaagaaccgccgtgatcgtgcagcagaagctgagaagcagcctgctgaccaagaagcaggaccaggccgccagaaagatcatgagattcctgagaagatgcagacacagagtgaaggagctgaagaaggccaaggagctggaggacatccagcagcaccccctggccatgtag

SEQ ID NO: 75154 - DNA, 2151 bp, synthetic construct
  misc_feature 1..2151: note = Description of Artificial Sequence: Synthetic coding sequence
  source 1..2151: mol_type = other DNA
atggcctgccccgtgagccccgaccacaagcaggagggcgcccacgacaccggcctggtgaccctgcaggtggccttcaacaaccagatcatcagcaacagcgtggtgttcgagtacaaggccagagccctgcccaccctgcccagcagccagcacgactggctgagcctggacgacaaccagttcagaatgagcatcctggagagactggagcagatggagagaagaatggccgagatgaccggcagccagcagcacaagcaggccagcggcggcggcagcagcggcggcggcagcggcagcggcaacggcggcagccaggcccagtgcgccagcggcaccggcgccctgggcagctgcttcgagagcagagtggtggtggtgtgcgagaagatgatgagcagagcctgctgggccaagagcaagcacctgatccacagcaagaccttcagaggcatgaccctgctgcacctggccgccgcccagggctacgccaccctgatccagaccctgatcaagtggagaaccaagcacgccgacagcatcgacctggagctggaggtggaccccctgaacgtggaccacttcagctgcacccccctgatgtgggcctgcgccctgggccacctggaggccgccgtggtgctgtacaagtgggacagaagagccatcagcatccccgacagcctgggcagactgcccctgggcatcgccagaagcagaggccacgtgaagctggccgagtgcctggagcacctgcagagagacgagcaggcccagctgggccagaaccccagaatccactgccccgccagcgaggagcccagcaccgagagctggatggcccagtggcacagcgaggccatcagcagccccgagatccccaagggcgtgaccgtgatcgccagcaccaaccccgagctgagaagacccagaagcgagcccagcaactactacagcagcgagagccacaaggactaccccgcccccaagaagcacaagctgaaccccgagtacttccagaccagacaggagaagctgctgcccaccgccctgagcctggaggagcccaacatcagaaagcagagccccagcagcaagcagagcgtgcccgagaccctgagccccagcgagggcgtgagagacttcagcagagagctgagcccccccacccccgagaccgccgccttccaggccagcggcagccagcccgtgggcaagtggaacagcaaggacctgtacatcggcgtgagcaccgtgcaggtgaccggcaaccccaagggcaccagcgtgggcaaggaggccgcccccagccaggtgagacccagagagcccatgagcgtgctgatgatggccaacagagaggtggtgaacaccgagctgggcagctacagagacagcgccgagaacgaggagtgcggccagcccatggacgacatccaggtgaacatgatgaccctggccgagcacatcatcgaggccaccctgagcagcaccatgagctggctggccagctacctggccgacgccgactgcctgcccagcgccgcccagatcagaagcgcctacaacgagcccctgacccccagcagcaacaccagcctgagccccgtgggcagccccgtgagcgagatcgccttcgagaaggtggagaacgagttcgcccagctgaccctgagcgaccacgagcagagagagctgtacgaggccgccagactggtgcagaccgccttcagaaagtacaagggcagacccctgagagagcagcaggaggtggccgccgccgtgatccagagatgctacagaaagtacaagcagtacgccctgtacaagaagatgacccaggccgccatcctgatccagagcaagttcagaagctactacgagcagaagaagttccagcagagcagaagagccgccgtgctgatccagaagtactacagaagctacaagaagtgcggcaagagaagacaggccagaagaaccgccgtgatcgtgcagcagaagctgagaagcagcctgctgaccaagaagcaggaccaggccgccagaaagatcatgagattcctgagaagatgcagacacagagtgaaggagctgaagaaggccaaggagctggaggacatccagcagcaccccctggccatgtag

SEQ ID NO: 75155 - DNA, 4980 bp, synthetic construct
  misc_feature 1..4980: note = Description of Artificial Sequence: Synthetic coding sequence
  source 1..4980: mol_type = other DNA
atgtggagagccgagggcaagtggctgcccaagaccagcagaaagagcgtgagccagagcgtgttctgcggcaccagcacctactgcgtgctgaacaccgtgccccccatcgaggacgaccacggcaacagcaacagcagccacgtgaagatcttcctgcccaagaagctgctggagtgcctgcccaagtgcagcagcctgcccaaggagagacacagatggaacaccaacgaggagatcgccgcctacctgatcaccttcgagaagcacgaggagtggctgaccaccagccccaagaccagaccccagaacggcagcatgatcctgtacaacagaaagaaggtgaagtacagaaaggacggctactgctggaagaagagaaaggacggcaagaccaccagagaggaccacatgaagctgaaggtgcagggcgtggagtgcctgtacggctgctacgtgcacagcagcatcatccccaccttccacagaagatgctactggctgctgcagaaccccgacatcgtgctggtgcactacctgaacgtgcccgccatcgaggactgcggcaagccctgcggccccatcctgtgcagcatcaacaccgacaagaaggagtgggccaagtggaccaaggaggagctgatcggccagctgaagcccatgttccacggcatcaagtggacctgcagcaacggcaacagcagcagcggcttcagcgtggagcagctggtgcagcagatcctggacagccaccagaccaagccccagcccagaacccacaactgcctgtgcaccggcagcctgggcgccggcggcagcgtgcaccacaagtgcaacagcgccaagcacagaatcatcagccccaaggtggagcccagaaccggcggctacggcagccacagcgaggtgcagcacaacgacgtgagcgagggcaagcacgagcacagccacagcaagggcagcagcagagagaagagaaacggcaaggtggccaagcccgtgctgctgcaccagagcagcaccgaggtgagcagcaccaaccaggtggaggtgcccgacaccacccagagcagccccgtgagcatcagcagcggcctgaacagcgaccccgacatggtggacagccccgtggtgaccggcgtgagcggcatggccgtggccagcgtgatgggcagcctgagccagagcgccaccgtgttcatgagcgaggtgaccaacgaggccgtgtacaccatgagccccaccgccggccccaaccaccacctgctgagccccgacgccagccagggcctggtgctggccgtgagcagcgacggccacaagttcgccttccccaccaccggcagcagcgagagcctgagcatgctgcccaccaacgtgagcgaggagctggtgctgagcaccaccctggacggcggcagaaagatccccgagaccaccatgaacttcgaccccgactgcttcctgaacaaccccaagcagggccagacctacggcggcggcggcctgaaggccgagatggtgagcagcaacatcagacacagcccccccggcgagagaagcttcagcttcaccaccgtgctgaccaaggagatcaagaccgaggacaccagcttcgagcagcagatggccaaggaggcctacagcagcagcgccgccgccgtggccgccagcagcctgaccctgaccgccggcagcagcctgctgcccagcggcggcggcctgagccccagcaccaccctggagcagatggacttcagcgccatcgacagcaacaaggactacaccagcagcttcagccagaccggccacagcccccacatccaccagacccccagccccagcttcttcctgcaggacgccagcaagcccctgcccgtggagcagaacacccacagcagcctgagcgacagcggcggcaccttcgtgatgcccaccgtgaagaccgaggccagcagccagaccagcagctgcagcggccacgtggagaccagaatcgagagcaccagcagcctgcacctgatgcagttccaggccaacttccaggccatgaccgccgagggcgaggtgaccatggagaccagccaggccgccgagggcagcgaggtgctgctgaagagcggcgagctgcaggcctgcagcagcgagcactacctgcagcccgagaccaacggcgtgatcagaagcgccggcggcgtgcccatcctgcccggcaacgtggtgcagggcctgtaccccgtggcccagcccagcctgggcaacgccagcaacatggagctgagcctggaccacttcgacatcagcttcagcaaccagttcagcgacctgatcaacgacttcatcagcgtggagggcggcagcagcaccatctacggccaccagctggtgagcggcgacagcaccgccctgagccagagcgaggacggcgccagagcccccttcacccaggccgagatgtgcctgccctgctgcagcccccagcagggcagcctgcagctgagcagcagcgagggcggcgccagcaccatggcctacatgcacgtggccgaggtggtgagcgccgccagcgcccagggcaccctgggcatgctgcagcagagcggcagagtgttcatggtgaccgactacagccccgagtggagctaccccgagggcggcgtgaaggtgctgatcaccggcccctggcaggaggccagcaacaactacagctgcctgttcgaccagatcagcgtgcccgccagcctgatccagcccggcgtgctgagatgctactgccccgcccacgacaccggcctggtgaccctgcaggtggccttcaacaaccagatcatcagcaacagcgtggtgttcgagtacaaggccagagccctgcccaccctgcccagcagccagcacgactggctgagcctggacgacaaccagttcagaatgagcatcctggagagactggagcagatggagagaagaatggccgagatgaccggcagccagcagcacaagcaggccagcggcggcggcagcagcggcggcggcagcggcagcggcaacggcggcagccaggcccagtgcgccagcggcaccggcgccctgggcagctgcttcgagagcagagtggtggtggtgtgcgagaagatgatgagcagagcctgctgggccaagagcaagcacctgatccacagcaagaccttcagaggcatgaccctgctgcacctggccgccgcccagggctacgccaccctgatccagaccctgatcaagtggagaaccaagcacgccgacagcatcgacctggagctggaggtggaccccctgaacgtggaccacttcagctgcacccccctgatgtgggcctgcgccctgggccacctggaggccgccgtggtgctgtacaagtgggacagaagagccatcagcatccccgacagcctgggcagactgcccctgggcatcgccagaagcagaggccacgtgaagctggccgagtgcctggagcacctgcagagagacgagcaggcccagctgggccagaaccccagaatccactgccccgccagcgaggagcccagcaccgagagctggatggcccagtggcacagcgaggccatcagcagccccgagatccccaagggcgtgaccgtgatcgccagcaccaaccccgagctgagaagacccagaagcgagcccagcaactactacagcagcgagagccacaaggactaccccgcccccaagaagcacaagctgaaccccgagtacttccagaccagacaggagaagctgctgcccaccgccctgagcctggaggagcccaacatcagaaagcagagccccagcagcaagcagagcgtgcccgagaccctgagccccagcgagggcgtgagagacttcagcagagagctgagcccccccacccccgagaccgccgccttccaggccagcggcagccagcccgtgggcaagtggaacagcaaggacctgtacatcggcgtgagcaccgtgcaggtgaccggcaaccccaagggcaccagcgtgggcaaggaggccgcccccagccaggtgagacccagagagcccatgagcgtgctgatgatggccaacagagaggtggtgaacaccgagctgggcagctacagagacagcgccgagaacgaggagtgcggccagcccatggacgacatccaggtgaacatgatgaccctggccgagcacatcatcgaggccacccccgacagaatcaagcaggagaacttcgtgcccatggagagcagcggcctggagagaaccgaccccgccaccatcagcagcaccatgagctggctggccagctacctggccgacgccgactgcctgcccagcgccgcccagatcagactgagccccgtgggcagccccgtgagcgagatcgccttcgagaagcccaacctgcccagcgccgccgactggagcgagttcctgagcgccagcaccagcgagaaggtggagaacgagttcgcccagctgaccctgagcgaccacgagcagagagagctgtacgaggccgccagactggtgcagaccgccttcagaaagtacaagggcagacccctgagagagcagcaggaggtggccgccgccgtgatccagagatgctacagaaagtacaagcagtacgccctgtacaagaagatgacccaggccgccatcctgatccagagcaagttcagaagctactacgagcagaagaagttccagcagagcagaagagccgccgtgctgatccagaagtactacagaagctacaagaagtgcggcaagagaagacaggccagaagaaccgccgtgatcgtgcagcagaagctgagaagcagcctgctgaccaagaagcaggaccaggccgccagaaagatcatgagattcctgagaagatgcagacacagagtgaaggagctgaagaaggccaaggagctggaggacatccagcagcaccccctggccatgtag

SEQ ID NO: 75156 - DNA, 243 bp, synthetic construct
  misc_feature 1..243: note = Description of Artificial Sequence: Synthetic coding sequence
  source 1..243: mol_type = other DNA
atgtggagagccgagggcaagtggctgcccaagaccagcagaaagagcgtgagccagagcgtgttctgcggcaccagcacctactgcgtgctgaacaccgtgccccccatcgaggacgaccacggcaacagcaacagcagccacgtgaagatcttcctgcccaagaagctgctggagtgcctgcccaagtgcagcagcctgcccaaggagagacacagatggaacaccaacgagagaagctag

SEQ ID NO: 75157 - DNA, 306 bp, synthetic construct
  misc_feature 1..306: note = Description of Artificial Sequence: Synthetic coding sequence
  source 1..306: mol_type = other DNA
atgtggagagccgagggcaagtggctgcccaagaccagcagaaagagcgtgagccagagcgtgttctgcggcaccagcacctactgcgtgctgaacaccgtgccccccatcgaggacgaccacggcaacagcaacagcagccacgtgaagatcttcctgcccaagaagctgctggagtgcctgcccaagtgcagcagcctgcccaaggagagacacagatggaacaccaacgaggccctgaccacccacctgttcatgggcgccgccaagaagagagacccccagagctggagccacgagggctag

SEQ ID NO: 75158 - DNA, 3609 bp, synthetic construct
  misc_feature 1..3609: note = Description of Artificial Sequence: Synthetic coding sequence
  source 1..3609: mol_type = other DNA
atgaacaccaaggacaccaccgaggtggccgagaacagccaccacctgaagatcttcctgcccaagaagctgctggagtgcctgcccagatgccccctgctgccccccgagagactgagatggaacaccaacgaggagatcgccagctacctgatcaccttcgagaagcacgacgagtggctgagctgcgcccccaagaccagaccccagaacggcagcatcatcctgtacaacagaaagaaggtgaagtacagaaaggacggctacctgtggaagaagagaaaggacggcaagaccaccagagaggaccacatgaagctgaaggtgcagggcatggagtgcctgtacggctgctacgtgcacagcagcatcgtgcccaccttccacagaagatgctactggctgctgcagaaccccgacatcgtgctggtgcactacctgaacgtgcccgccctggaggactgcggcaagggctgcagccccatcttctgcagcatcagcagcgacagaagagagtggctgaagtggagcagagaggagctgctgggccagctgaagcccatgttccacggcatcaagtggagctgcggcaacggcaccgaggagttcagcgtggagcacctggtgcagcagatcctggacacccaccccaccaagcccgcccccagaacccacgcctgcctgtgcagcggcggcctgggcagcggcagcctgacccacaagtgcagcagcaccaagcacagaatcatcagccccaaggtggagcccagagccctgaccctgaccagcatcccccacgcccacccccccgagcccccccccctgatcgcccccctgccccccgagctgcccaaggcccacaccagccccagcagcagcagcagcagcagcagcagcggcttcgccgagcccctggagatcagacccagcccccccaccagcagaggcggcagcagcagaggcggcaccgccatcctgctgctgaccggcctggagcagagagccggcggcctgacccccaccagacacctggccccccaggccgaccccagacccagcatgagcctggccgtggtggtgggcaccgagcccagcgccccccccgccccccccagccccgccttcgaccccgacagattcctgaacagcccccagagaggccagacctacggcggcggccagggcgtgagccccgacttccccgaggccgaggccgcccacaccccctgcagcgccctggagcccgccgccgccctggagccccaggccgccgccagaggcccccccccccagagcgtggccggcggcagaagaggcaactgcttcttcatccaggacgacgacagcggcgaggagctgaagggccacggcgccgccccccccatccccagccccccccccagccccccccccagccccgcccccctggagcccagcagcagagtgggcagaggcgaggccctgttcggcggccccgtgggcgccagcgagctggagcccttcagcctgagcagcttccccgacctgatgggcgagctgatcagcgacgaggcccccagcatccccgcccccaccccccagctgagccccgccctgagcaccatcaccgacttcagccccgagtggagctaccccgagggcggcgtgaaggtgctgatcaccggcccctggaccgaggccgccgagcactacagctgcgtgttcgaccacatcgccgtgcccgccagcctggtgcagcccggcgtgctgagatgctactgccccgcccacgaggtgggcctggtgagcctgcaggtggccggcagagagggccccctgagcgccagcgtgctgttcgagtacagagccagaagattcctgagcctgcccagcacccagctggactggctgagcctggacgacaaccagttcagaatgagcatcctggagagactggagcagatggagaagagaatggccgagatcgccgccgccggccaggtgccctgccagggccccgacgccccccccgtgcaggacgagggccagggccccggcttcgaggccagagtggtggtgctggtggagagcatgatccccagaagcacctggaagggccccgagagactggcccacggcagccccttcagaggcatgagcctgctgcacctggccgccgcccagggctacgccagactgatcgagaccctgagccagtggagaagcgtggagaccggcagcctggacctggagcaggaggtggaccccctgaacgtggaccacttcagctgcacccccctgatgtgggcctgcgccctgggccacctggaggccgccgtgctgctgttcagatggaacagacaggccctgagcatccccgacagcctgggcagactgcccctgagcgtggcccacagcagaggccacgtgagactggccagatgcctggaggagctgcagagacaggagcccagcgtggagccccccttcgccctgagcccccccagcagcagccccgacaccggcctgagcagcgtgagcagccccagcgagctgagcgacggcaccttcagcgtgaccagcgcctacagcagcgcccccgacggcagccccccccccgcccccctgcccgccagcgagatgaccatggaggacatggcccccggccagctgagcagcggcgtgcccgaggcccccctgctgctgatggactacgaggccaccaacagcaagggccccctgagcagcctgcccgccctgccccccgccagcgacgacggcgccgcccccgaggacgccgacagcccccaggccgtggacgtgatccccgtggacatgatcagcctggccaagcagatcatcgaggccacccccgagagaatcaagagagaggacttcgtgggcctgcccgaggccggcgccagcatgagagagagaaccggcgccgtgggcctgagcgagaccatgagctggctggccagctacctggagaacgtggaccacttccccagcagcaccccccccagcgagctgcccttcgagagaggcagactggccgtgcccagcgcccccagctgggccgagttcctgagcgccagcaccagcggcaagatggagagcgacttcgccctgctgaccctgagcgaccacgagcagagagagctgtacgaggccgccagagtgatccagaccgccttcagaaagtacaagggcagaagactgaaggagcagcaggaggtggccgccgccgtgatccagagatgctacagaaagtacaagcagctgacctggatcgccctgaagttcgccctgtacaagaagatgacccaggccgccatcctgatccagagcaagttcagaagctactacgagcagaagagattccagcagagcagaagagccgccgtgctgatccagcagcactacagaagctacagaagaagacccggccccccccacagaaccagcgccaccctgcccgccagaaacaagggcagcttcctgaccaagaagcaggaccaggccgccagaaagatcatgagattcctgagaagatgcagacacagaatgagagagctgaagcagaaccaggagctggagggcctgccccagcccggcctggccacctag

SEQ ID NO: 75159 - DNA, 3588 bp, synthetic construct
  misc_feature 1..3588: note = Description of Artificial Sequence: Synthetic coding sequence
  source 1..3588: mol_type = other DNA
atgaacaccaaggacaccaccgaggtggccgagaacagccaccacctgaagatcttcctgcccaagaagctgctggagtgcctgcccagatgccccctgctgccccccgagagactgagatggaacaccaacgaggagatcgccagctacctgatcaccttcgagaagcacgacgagtggctgagctgcgcccccaagaccagaccccagaacggcagcatcatcctgtacaacagaaagaaggtgaagtacagaaaggacggctacctgtggaagaagagaaaggacggcaagaccaccagagaggaccacatgaagctgaaggtgcagggcatggagtgcctgtacggctgctacgtgcacagcagcatcgtgcccaccttccacagaagatgctactggctgctgcagaaccccgacatcgtgctggtgcactacctgaacgtgcccgccctggaggactgcggcaagggctgcagccccatcttctgcagcatcagcagcgacagaagagagtggctgaagtggagcagagaggagctgctgggccagctgaagcccatgttccacggcatcaagtggagctgcggcaacggcaccgaggagttcagcgtggagcacctggtgcagcagatcctggacacccaccccaccaagcccgcccccagaacccacgcctgcctgtgcagcggcggcctgggcagcggcagcctgacccacaagtgcagcagcaccaagcacagaatcatcagccccaaggtggagcccagagccctgaccctgaccagcatcccccacgcccacccccccgagcccccccccctgatcgcccccctgccccccgagctgcccaaggcccacaccagccccagcagcagcagcagcagcagcagcagcggcttcgccgagcccctggagatcagacccagcccccccaccagcagaggcggcagcagcagaggcggcaccgccatcctgctgctgaccggcctggagcagagagccggcggcctgacccccaccagacacctggccccccaggccgaccccagacccagcatgagcctggccgtggtggtgggcaccgagcccagcgccccccccgccccccccagccccgccttcgaccccgacagattcctgaacagcccccagagaggccagacctacggcggcggccagggcgtgagccccgacttccccgaggccgaggccgcccacaccccctgcagcgccctggagcccgccgccgccctggagccccaggccgccgccagaggcccccccccccagagcgtggccggcggcagaagaggcaactgcttcttcatccaggacgacgacagcggcgaggagctgaagggccacggcgccgccccccccatccccagccccccccccagccccccccccagccccgcccccctggagcccagcagcagagtgggcagaggcgaggccctgttcggcggccccgtgggcgccagcgagctggagcccttcagcctgagcagcttccccgacctgatgggcgagctgatcagcgacgaggcccccagcatccccgcccccaccccccagctgagccccgccctgagcaccatcaccgacttcagccccgagtggagctaccccgagggcggcgtgaaggtgctgatcaccggcccctggaccgaggccgccgagcactacagctgcgtgttcgaccacatcgccgtgcccgccagcctggtgcagcccggcgtgctgagatgctactgccccgcccacgaggtgggcctggtgagcctgcaggtggccggcagagagggccccctgagcgccagcgtgctgttcgagtacagagccagaagattcctgagcctgcccagcacccagctggactggctgagcctggacgacaaccagttcagaatgagcatcctggagagactggagcagatggagaagagaatggccgagatcgccgccgccggccaggtgccctgccagggccccgacgccccccccgtgcaggacgagggccagggccccggcttcgaggccagagtggtggtgctggtggagagcatgatccccagaagcacctggaagggccccgagagactggcccacggcagccccttcagaggcatgagcctgctgcacctggccgccgcccagggctacgccagactgatcgagaccctgagccagtggagaagcgtggagaccggcagcctggacctggagcaggaggtggaccccctgaacgtggaccacttcagctgcacccccctgatgtgggcctgcgccctgggccacctggaggccgccgtgctgctgttcagatggaacagacaggccctgagcatccccgacagcctgggcagactgcccctgagcgtggcccacagcagaggccacgtgagactggccagatgcctggaggagctgcagagacaggagcccagcgtggagccccccttcgccctgagcccccccagcagcagccccgacaccggcctgagcagcgtgagcagccccagcgagctgagcgacggcaccttcagcgtgaccagcgcctacagcagcgcccccgacggcagccccccccccgcccccctgcccgccagcgagatgaccatggaggacatggcccccggccagctgagcagcggcgtgcccgaggcccccctgctgctgatggactacgaggccaccaacagcaagggccccctgagcagcctgcccgccctgccccccgccagcgacgacggcgccgcccccgaggacgccgacagcccccaggccgtggacgtgatccccgtggacatgatcagcctggccaagcagatcatcgaggccacccccgagagaatcaagagagaggacttcgtgggcctgcccgaggccggcgccagcatgagagagagaaccggcgccgtgggcctgagcgagaccatgagctggctggccagctacctggagaacgtggaccacttccccagcagcaccccccccagcgagctgcccttcgagagaggcagactggccgtgcccagcgcccccagctgggccgagttcctgagcgccagcaccagcggcaagatggagagcgacttcgccctgctgaccctgagcgaccacgagcagagagagctgtacgaggccgccagagtgatccagaccgccttcagaaagtacaagggcagaagactgaaggagcagcaggaggtggccgccgccgtgatccagagatgctacagaaagtacaagcagttcgccctgtacaagaagatgacccaggccgccatcctgatccagagcaagttcagaagctactacgagcagaagagattccagcagagcagaagagccgccgtgctgatccagcagcactacagaagctacagaagaagacccggccccccccacagaaccagcgccaccctgcccgccagaaacaagggcagcttcctgaccaagaagcaggaccaggccgccagaaagatcatgagattcctgagaagatgcagacacagaatgagagagctgaagcagaaccaggagctggagggcctgccccagcccggcctggccacctag

SEQ ID NO: 75160 - DNA, 3606 bp, synthetic construct
  misc_feature 1..3606: note = Description of Artificial Sequence: Synthetic coding sequence
  source 1..3606: mol_type = other DNA
atgggcaccgacagccccagccccagacccctgagacccggcgtgaccctgccccccggcgccctgaccatgaacaccaaggacaccaccgaggtggccgagaacagccaccacctgaagatcttcctgcccaagaagctgctggagtgcctgcccagatgccccctgctgccccccgagagactgagatggaacaccaacgaggagatcgccagctacctgatcaccttcgagaagcacgacgagtggctgagctgcgcccccaagaccagaccccagaacggcagcatcatcctgtacaacagaaagaaggtgaagtacagaaaggacggctacctgtggaagaagagaaaggacggcaagaccaccagagaggaccacatgaagctgaaggtgcagggcatggagaaccccgacatcgtgctggtgcactacctgaacgtgcccgccctggaggactgcggcaagggctgcagccccatcttctgcagcatcagcagcgacagaagagagtggctgaagtggagcagagaggagctgctgggccagctgaagcccatgttccacggcatcaagtggagctgcggcaacggcaccgaggagttcagcgtggagcacctggtgcagcagatcctggacacccaccccaccaagcccgcccccagaacccacgcctgcctgtgcagcggcggcctgggcagcggcagcctgacccacaagtgcagcagcaccaagcacagaatcatcagccccaaggtggagcccagagccctgaccctgaccagcatcccccacgcccacccccccgagcccccccccctgatcgcccccctgccccccgagctgcccaaggcccacaccagccccagcagcagcagcagcagcagcagcagcggcttcgccgagcccctggagatcagacccagcccccccaccagcagaggcggcagcagcagaggcggcaccgccatcctgctgctgaccggcctggagcagagagccggcggcctgacccccaccagacacctggccccccaggccgaccccagacccagcatgagcctggccgtggtggtgggcaccgagcccagcgccccccccgccccccccagccccgccttcgaccccgacagattcctgaacagcccccagagaggccagacctacggcggcggccagggcgtgagccccgacttccccgaggccgaggccgcccacaccccctgcagcgccctggagcccgccgccgccctggagccccaggccgccgccagaggcccccccccccagagcgtggccggcggcagaagaggcaactgcttcttcatccaggacgacgacagcggcgaggagctgaagggccacggcgccgccccccccatccccagccccccccccagccccccccccagccccgcccccctggagcccagcagcagagtgggcagaggcgaggccctgttcggcggccccgtgggcgccagcgagctggagcccttcagcctgagcagcttccccgacctgatgggcgagctgatcagcgacgaggcccccagcatccccgcccccaccccccagctgagccccgccctgagcaccatcaccgacttcagccccgagtggagctaccccgagggcggcgtgaaggtgctgatcaccggcccctggaccgaggccgccgagcactacagctgcgtgttcgaccacatcgccgtgcccgccagcctggtgcagcccggcgtgctgagatgctactgccccgcccacgaggtgggcctggtgagcctgcaggtggccggcagagagggccccctgagcgccagcgtgctgttcgagtacagagccagaagattcctgagcctgcccagcacccagctggactggctgagcctggacgacaaccagttcagaatgagcatcctggagagactggagcagatggagaagagaatggccgagatcgccgccgccggccaggtgccctgccagggccccgacgccccccccgtgcaggacgagggccagggccccggcttcgaggccagagtggtggtgctggtggagagcatgatccccagaagcacctggaagggccccgagagactggcccacggcagccccttcagaggcatgagcctgctgcacctggccgccgcccagggctacgccagactgatcgagaccctgagccagtggagaagcgtggagaccggcagcctggacctggagcaggaggtggaccccctgaacgtggaccacttcagctgcacccccctgatgtgggcctgcgccctgggccacctggaggccgccgtgctgctgttcagatggaacagacaggccctgagcatccccgacagcctgggcagactgcccctgagcgtggcccacagcagaggccacgtgagactggccagatgcctggaggagctgcagagacaggagcccagcgtggagccccccttcgccctgagcccccccagcagcagccccgacaccggcctgagcagcgtgagcagccccagcgagctgagcgacggcaccttcagcgtgaccagcgcctacagcagcgcccccgacggcagccccccccccgcccccctgcccgccagcgagatgaccatggaggacatggcccccggccagctgagcagcggcgtgcccgaggcccccctgctgctgatggactacgaggccaccaacagcaagggccccctgagcagcctgcccgccctgccccccgccagcgacgacggcgccgcccccgaggacgccgacagcccccaggccgtggacgtgatccccgtggacatgatcagcctggccaagcagatcatcgaggccacccccgagagaatcaagagagaggacttcgtgggcctgcccgaggccggcgccagcatgagagagagaaccggcgccgtgggcctgagcgagaccatgagctggctggccagctacctggagaacgtggaccacttccccagcagcaccccccccagcgagctgcccttcgagagaggcagactggccgtgcccagcgcccccagctgggccgagttcctgagcgccagcaccagcggcaagatggagagcgacttcgccctgctgaccctgagcgaccacgagcagagagagctgtacgaggccgccagagtgatccagaccgccttcagaaagtacaagggcagaagactgaaggagcagcaggaggtggccgccgccgtgatccagagatgctacagaaagtacaagcagctgacctggatcgccctgaagttcgccctgtacaagaagatgacccaggccgccatcctgatccagagcaagttcagaagctactacgagcagaagagattccagcagagcagaagagccgccgtgctgatccagcagcactacagaagctacagaagaagacccggccccccccacagaaccagcgccaccctgcccgccagaaacaagggcagcttcctgaccaagaagcaggaccaggccgccagaaagatcatgagattcctgagaagatgcagacacagaatgagagagctgaagcagaaccaggagctggagggcctgccccagcccggcctggccacctag

SEQ ID NO: 75161 - DNA, 3594 bp, synthetic construct
  misc_feature 1..3594: note = Description of Artificial Sequence: Synthetic coding sequence
  source 1..3594: mol_type = other DNA
atggccgccgccgccgtgaccagaggcacccccggcgagaacagccaccacctgaagatcttcctgcccaagaagctgctggagtgcctgcccagatgccccctgctgccccccgagagactgagatggaacaccaacgaggagatcgccagctacctgatcaccttcgagaagcacgacgagtggctgagctgcgcccccaagaccagaccccagaacggcagcatcatcctgtacaacagaaagaaggtgaagtacagaaaggacggctacctgtggaagaagagaaaggacggcaagaccaccagagaggaccacatgaagctgaaggtgcagggcatggagtgcctgtacggctgctacgtgcacagcagcatcgtgcccaccttccacagaagatgctactggctgctgcagaaccccgacatcgtgctggtgcactacctgaacgtgcccgccctggaggactgcggcaagggctgcagccccatcttctgcagcatcagcagcgacagaagagagtggctgaagtggagcagagaggagctgctgggccagctgaagcccatgttccacggcatcaagtggagctgcggcaacggcaccgaggagttcagcgtggagcacctggtgcagcagatcctggacacccaccccaccaagcccgcccccagaacccacgcctgcctgtgcagcggcggcctgggcagcggcagcctgacccacaagtgcagcagcaccaagcacagaatcatcagccccaaggtggagcccagagccctgaccctgaccagcatcccccacgcccacccccccgagcccccccccctgatcgcccccctgccccccgagctgcccaaggcccacaccagccccagcagcagcagcagcagcagcagcagcggcttcgccgagcccctggagatcagacccagcccccccaccagcagaggcggcagcagcagaggcggcaccgccatcctgctgctgaccggcctggagcagagagccggcggcctgacccccaccagacacctggccccccaggccgaccccagacccagcatgagcctggccgtggtggtgggcaccgagcccagcgccccccccgccccccccagccccgccttcgaccccgacagattcctgaacagcccccagagaggccagacctacggcggcggccagggcgtgagccccgacttccccgaggccgaggccgcccacaccccctgcagcgccctggagcccgccgccgccctggagccccaggccgccgccagaggcccccccccccagagcgtggccggcggcagaagaggcaactgcttcttcatccaggacgacgacagcggcgaggagctgaagggccacggcgccgccccccccatccccagccccccccccagccccccccccagccccgcccccctggagcccagcagcagagtgggcagaggcgaggccctgttcggcggccccgtgggcgccagcgagctggagcccttcagcctgagcagcttccccgacctgatgggcgagctgatcagcgacgaggcccccagcatccccgcccccaccccccagctgagccccgccctgagcaccatcaccgacttcagccccgagtggagctaccccgagggcggcgtgaaggtgctgatcaccggcccctggaccgaggccgccgagcactacagctgcgtgttcgaccacatcgccgtgcccgccagcctggtgcagcccggcgtgctgagatgctactgccccgcccacgaggtgggcctggtgagcctgcaggtggccggcagagagggccccctgagcgccagcgtgctgttcgagtacagagccagaagattcctgagcctgcccagcacccagctggactggctgagcctggacgacaaccagttcagaatgagcatcctggagagactggagcagatggagaagagaatggccgagatcgccgccgccggccaggtgccctgccagggccccgacgccccccccgtgcaggacgagggccagggccccggcttcgaggccagagtggtggtgctggtggagagcatgatccccagaagcacctggaagggccccgagagactggcccacggcagccccttcagaggcatgagcctgctgcacctggccgccgcccagggctacgccagactgatcgagaccctgagccagtggagaagcgtggagaccggcagcctggacctggagcaggaggtggaccccctgaacgtggaccacttcagctgcacccccctgatgtgggcctgcgccctgggccacctggaggccgccgtgctgctgttcagatggaacagacaggccctgagcatccccgacagcctgggcagactgcccctgagcgtggcccacagcagaggccacgtgagactggccagatgcctggaggagctgcagagacaggagcccagcgtggagccccccttcgccctgagcccccccagcagcagccccgacaccggcctgagcagcgtgagcagccccagcgagctgagcgacggcaccttcagcgtgaccagcgcctacagcagcgcccccgacggcagccccccccccgcccccctgcccgccagcgagatgaccatggaggacatggcccccggccagctgagcagcggcgtgcccgaggcccccctgctgctgatggactacgaggccaccaacagcaagggccccctgagcagcctgcccgccctgccccccgccagcgacgacggcgccgcccccgaggacgccgacagcccccaggccgtggacgtgatccccgtggacatgatcagcctggccaagcagatcatcgaggccacccccgagagaatcaagagagaggacttcgtgggcctgcccgaggccggcgccagcatgagagagagaaccggcgccgtgggcctgagcgagaccatgagctggctggccagctacctggagaacgtggaccacttccccagcagcaccccccccagcgagctgcccttcgagagaggcagactggccgtgcccagcgcccccagctgggccgagttcctgagcgccagcaccagcggcaagatggagagcgacttcgccctgctgaccctgagcgaccacgagcagagagagctgtacgaggccgccagagtgatccagaccgccttcagaaagtacaagggcagaagactgaaggagcagcaggaggtggccgccgccgtgatccagagatgctacagaaagtacaagcagttcgccctgtacaagaagatgacccaggccgccatcctgatccagagcaagttcagaagctactacgagcagaagagattccagcagagcagaagagccgccgtgctgatccagcagcactacagaagctacagaagaagacccggccccccccacagaaccagcgccaccctgcccgccagaaacaagggcagcttcctgaccaagaagcaggaccaggccgccagaaagatcatgagattcctgagaagatgcagacacagaatgagagagctgaagcagaaccaggagctggagggcctgccccagcccggcctggccacctag

SEQ ID NO: 75162 - DNA, 3726 bp, synthetic construct
  misc_feature 1..3726: note = Description of Artificial Sequence: Synthetic coding sequence
  source 1..3726: mol_type = other DNA
atgggcaccgacagccccagccccagacccctgagacccggcgtgaccctgccccccggcgccctgaccatgaacaccaaggacaccaccgaggtggccgagaacagccaccacctgaagatcttcctgcccaagaagctgctggagtgcctgcccagatgccccctgctgccccccgagagactgagatggaacaccaacgaggagatcgccagctacctgatcaccttcgagaagcacgacgagtggctgagctgcgcccccaagaccagaccccagaacggcagcatcatcctgtacaacagaaagaaggtgaagtacagaaaggacggctacctgtggaagaagagaaaggacggcaagaccaccagagaggaccacatgaagctgaaggtgcagggcatggagtgcctgtacggctgctacgtgcacagcagcatcgtgcccaccttccacagaagatgctactggctgctgcagaaccccgacatcgtgctggtgcactacctgaacgtgcccgccctggaggactgcggcaagggctgcagccccatcttctgcagcatcagcagcgacagaagagagtggctgaagtggagcagagaggagctgctgggccagctgaagcccatgttccacggcatcaagtggagctgcggcaacggcaccgaggagttcagcgtggagcacctggtgcagcagatcctggacacccaccccaccaagcccgcccccagaacccacgcctgcctgtgcagcggcggcctgggcagcggcagcctgacccacaagtgcagcagcaccaagcacagaatcatcagccccaaggtggagcccagagccctgaccctgaccagcatcccccacgcccacccccccgagcccccccccctgatcgcccccctgccccccgagctgcccaaggcccacaccagccccagcagcagcagcagcagcagcagcagcggcttcgccgagcccctggagatcagacccagcccccccaccagcagaggcggcagcagcagaggcggcaccgccatcctgctgctgaccggcctggagcagagagccggcggcctgacccccaccagacacctggccccccaggccgaccccagacccagcatgagcctggccgtggtggtgggcaccgagcccagcgccccccccgccccccccagccccgccttcgaccccgacagattcctgaacagcccccagagaggccagacctacggcggcggccagggcgtgagccccgacttccccgaggccgaggccgcccacaccccctgcagcgccctggagcccgccgccgccctggagccccaggccgccgccagaggcccccccccccagagcgtggccggcggcagaagaggcaactgcttcttcatccaggacgacgacagcggcgaggagctgaagggccacggcgccgccccccccatccccagccccccccccagccccccccccagccccgcccccctggagcccagcagcagagtgggcagaggcgaggccctgttcggcggccccgtgggcgccagcgagctggagcccttcagcctgagcagcttccccgacctgatgggcgagctgatcagcgacgaggcccccagcatccccgcccccaccccccagctgagccccgccctgagcaccatcaccgacttcagccccgagtggagctaccccgagggcggcgtgaaggtgctgatcaccggcccctggaccgaggccgccgagcactacagctgcgtgttcgaccacatcgccgtgcccgccagcctggtgcagcccggcgtgctgagatgctactgccccgcccacgaggtgggcctggtgagcctgcaggtggccggcagagagggccccctgagcgccagcgtgctgttcgagtacagagccagaagattcctgagcctgcccagcacccagctggactggctgagcctggacgacaaccagttcagaatgagcatcctggagagactggagcagatggagaagagaatggccgagatcgccgccgccggccaggtgccctgccagggccccgacgccccccccgtgcaggacgagggccagggccccggcttcgaggccagagtggtggtgctggtggagagcatgatccccagaagcacctggaagggccccgagagactggcccacggcagccccttcagaggcatgagcctgctgcacctggccgccgcccagggctacgccagactgatcgagaccctgagccagtggagaagcgtggagaccggcagcctggacctggagcaggaggtggaccccctgaacgtggaccacttcagctgcacccccctgatgtgggcctgcgccctgggccacctggaggccgccgtgctgctgttcagatggaacagacaggccctgagcatccccgacagcctgggcagactgcccctgagcgtggcccacagcagaggccacgtgagactggccagatgcctggaggagctgcagagacaggagcccagcgtggagccccccttcgccctgagcccccccagcagcagccccgacaccggcctgagcagcgtgagcagccccagcgagctgagcgacggcaccttcagcgtgaccagcgcctacagcagcgcccccgacggcagccccccccccgcccccctgcccgccagcgagatgaccatggaggacatggcccccggccagctgagcagcggcgtgcccgaggcccccctgctgctgatggactacgaggccaccaacagcaagggccccctgagcagcctgcccgccctgccccccgccagcgacgacggcgccgcccccgaggacgccgacagcccccaggccgtggacgtgatccccgtggacatgatcagcctggccaagcagatcatcgaggccacccccgagagaatcaagagagaggacttcgtgggcctgcccgaggccggcgccagcatgagagagagaaccggcgccgtgggcctgagcgagaccatgagctggctggccagctacctggagaacgtggaccacttccccagcagcaccccccccagcgagctgcccttcgagagaggcagactggccgtgcccagcgcccccagctgggccgagttcctgagcgccagcaccagcggcaagatggagagcgacttcgccctgctgaccctgagcgaccacgagcagagagagctgtacgaggccgccagagtgatccagaccgccttcagaaagtacaagggcagaagactgaaggagcagcaggaggtggccgccgccgtgatccagagatgctacagaaagtacaagcagctgacctggatcgccctgaagttcgccctgtacaagaagatgacccaggccgccatcctgatccagagcaagttcagaagctactacgagcagaagagattccagcagagcagaagagccgccgtgctgatccagcagcactacagaagctacagaagaagacccggccccccccacagaaccagcgccaccctgcccgccagaaacaagctgctgagccaccaggaggccggccccggcagccccgaggaccacgagatccccgccgccctgcccacccaggacgagggcaccgaggccgagcccggcgccggcagagccagccccgccggcaccggccacatgacctggcccccccccttcagccccccctggggcagactggtgcagagctag

SEQ ID NO: 75163 - DNA, 4470 bp, synthetic construct
  misc_feature 1..4470: note = Description of Artificial Sequence: Synthetic coding sequence
  source 1..4470: mol_type = other DNA
atgggcgacgccgccgaccccagagagatgagaaagaccttcatcgtgcccgccatcaagcccttcgaccactacgacttcagcagagccaagatcgcctgcaacctggcctggctggtggccaaggccttcggcaccgagaacgtgcccgaggagctgcaggagcccttctacaccgaccagtacgaccaggagcacatcaagccccccgtggtgaacctgctgctgagcgccgagctgtactgcagagccggcagcctgatcctgaagagcgacgccgccaagcccctgctgggccacgacgccgtgatccaggccctggcccagaagggcctgtacgtgaccgaccaggagaagctggtgaccgagagagacctgcacaagaagcccatccagatgagcgcccacctggccatgatcgacaccctgatgatggcctacaccgtggagatggtgagcatcgagaaggtgatcgcctgcgcccagcagtacagcgccttcttccaggccaccgacctgccctacgacatcgaggacgccgtgatgtactggatcaacaaggtgaacgagcacctgaaggacatcatggagcaggagcagaagctgaaggagcaccacaccgtggaggcccccggcggccagaagagccccagcaagtggttctggaagctggtgcccgccagatacagaaaggagcagaccctgctgaagcagctgccctgcatccccctggtggagaacctgctgaaggacggcaccgacggctgcgccctggccgccctgatccacttctactgccccgacgtggtgagactggaggacatctgcctgaaggagaccatgagcctggccgacagcctgtacaacctgcagctgatccaggagttctgccaggagtacctgaaccagtgctgccacttcaccctggaggacatgctgtacgccgccagcagcatcaagagcaactacctggtgttcatggccgagctgttctggtggttcgaggtggtgaagcccagcttcgtgcagcccagagtggtgagaccccagggcgccgagcccgtgaaggacatgcccagcatccccgtgctgaacgccgccaagagaaacgtgctggacagcagcagcgacttccccagcagcggcgagggcgccaccttcacccagagccaccaccacctgcccagcagatacagcagaccccaggcccacagcagcgccagcggcggcatcagaagaagcagcagcatgagctacgtggacggcttcatcggcacctggcccaaggagaagagaagcagcgtgcacggcgtgagcttcgacatcagcttcgacaaggaggacagcgtgcagagaagcacccccaacagaggcatcaccagaagcatcagcaacgagggcctgaccctgaacaacagccacgtgagcaagcacatcagaaagaacctgagcttcaagcccatcaacggcgaggaggaggccgagagcatcgaggaggagctgaacatcgacagccacagcgacctgaagagctgcgtgcccctgaacaccaacgagctgaacagcaacgagaacatccactacaagctgcccaacggcgccctgcagaacagaatcctgctggacgagttcggcaaccagatcgagacccccagcatcgaggaggccctgcagatcatccacgacaccgagaagagcccccacaccccccagcccgaccagatcgccaacggcttcttcctgcacagccaggagatgagcatcctgaacagcaacatcaagctgaaccagagcagccccgacaacgtgaccgacaccaagggcgccctgagccccatcaccgacaacaccgaggtggacaccggcatccacgtgcccagcgaggacatccccgagaccatggacgaggacagcagcctgagagactacaccgtgagcctggacagcgacatggacgacgccagcaagttcctgcaggactacgacatcagaaccggcaacaccagagaggccctgagcccctgccccagcaccgtgagcaccaagagccagcccggcagcagcgccagcagcagcagcggcgtgaagatgaccagcttcgccgagcagaagttcagaaagctgaaccacaccgacggcaagagcagcggcagcagcagccagaagaccacccccgagggcagcgagctgaacatcccccacgtggtggcctgggcccagatccccgaggagaccggcctgccccagggcagagacaccacccagctgctggccagcgagatggtgcacctgagaatgaagctggaggagaagagaagagccatcgaggcccagaagaagaagatggaggccgccttcaccaagcagagacagaagatgggcagaaccgccttcctgaccgtggtgaagaagaagggcgacggcatcagccccctgagagaggaggccgccggcgccgaggacgagaaggtgtacaccgacagagccaaggagaaggagagccagaagaccgacggccagagaagcaagagcctggccgacatcaaggagagcatggagaacccccaggccaagtggctgaagagccccaccacccccatcgaccccgagaagcagtggaacctggccagccccagcgaggagaccctgaacgagggcgagatcctggagtacaccaagagcatcgagaagctgaacagcagcctgcacttcctgcagcaggagatgcagagactgagcctgcagcaggagatgctgatgcagatgagagagcagcagagctgggtgatcagccccccccagcccagcccccagaagcagatcagagacttcaagcccagcaagcaggccggcctgagcagcgccatcgcccccttcagcagcgacagccccagacccacccaccccagcccccagagcagcaacagaaagagcgccagcttcagcgtgaagagccagagaacccccagacccaacgagctgaagatcacccccctgaacagaaccctgaccccccccagaagcgtggacagcctgcccagactgagaagattcagccccagccaggtgcccatccagaccagaagcttcgtgtgcttcggcgacgacggcgagccccagctgaaggagagcaagcccaaggaggaggtgaagaaggaggagctggagagcaagggcaccctggagcagagaggccacaaccccgaggagaaggagatcaagcccttcgagagcaccgtgagcgaggtgctgagcctgcccgtgaccgagaccgtgtgcctgacccccaacgaggaccagctgaaccagcccaccgagcccccccccaagcccgtgttcccccccaccgcccccaagaacgtgaacctgatcgaggtgagcctgagcgacctgaagccccccgagaaggccgacgtgcccgtggagaagtacgacggcgagagcgacaaggagcagttcgacgacgaccagaaggtgtgctgcggcttcttcttcaaggacgaccagaaggccgagaacgacatggccatgaagagagccgccctgctggagaagagactgagaagagagaaggagacccagctgagaaagcagcagctggaggccgagatggagcacaagaaggaggagaccagaagaaagaccgaggaggagagacagaagaaggaggacgagagagccagaagagagttcatcagacaggagtacatgagaagaaagcagctgaagctgatggaggacatggacaccgtgatcaagcccagaccccaggtggtgaagcagaagaagcagagacccaagagcatccacagagaccacatcgagagccccaagacccccatcaagggcccccccgtgagcagcctgagcctggccagcctgaacaccggcgacaacgagagcgtgcacagcggcaagagaacccccagaagcgagagcgtggagggcttcctgagccccagcagatgcggcagcagaaacggcgagaaggactgggagaacgccagcaccaccagcagcgtggccagcggcaccgagtacaccggccccaagctgtacaaggagcccagcgccaagagcaacaagcacatcatccagaacgccctggcccactgctgcctggccggcaaggtgaacgagggccagaagaagaagatcctggaggagatggagaagagcgacgccaacaacttcctgatcctgttcagagacagcggctgccagttcagaagcctgtacacctactgccccgagaccgaggagatcaacaagctgaccggcatcggccccaagagcatcaccaagaagatgatcgagggcctgtacaagtacaacagcgacagaaagcagttcagccacatccccgccaagaccctgagcgccagcgtggacgccatcaccatccacagccacctgtggcagaccaagagacccgtgacccccaagaagctgctgcccaccaaggcctag

SEQ ID NO: 75164 - DNA, 4437 bp, synthetic construct
  misc_feature 1..4437: note = Description of Artificial Sequence: Synthetic coding sequence
  source 1..4437: mol_type = other DNA
atgggcgacgccgccgaccccagagagatgagaaagaccttcatcgtgcccgccatcaagcccttcgaccactacgacttcagcagagccaagatcgcctgcaacctggcctggctggtggccaaggccttcggcaccgagaacgtgcccgaggagctgcaggagcccttctacaccgaccagtacgaccaggagcacatcaagccccccgtggtgaacctgctgctgagcgccgagctgtactgcagagccggcagcctgatcctgaagagcgacgccgccaagcccctgctgggccacgacgccgtgatccaggccctggcccagaagggcctgtacgtgaccgaccaggagaagctggtgaccgagagagacctgcacaagaagcccatccagatgagcgcccacctggccatgatcgacaccctgatgatggcctacaccgtggagatggtgagcatcgagaaggtgatcgcctgcgcccagcagtacagcgccttcttccaggccaccgacctgccctacgacatcgaggacgccgtgatgtactggatcaacaaggtgaacgagcacctgaaggacatcatggagcaggagcagaagctgaaggagcaccacaccgtggaggcccccggcggccagaaggccagatacagaaaggagcagaccctgctgaagcagctgccctgcatccccctggtggagaacctgctgaaggacggcaccgacggctgcgccctggccgccctgatccacttctactgccccgacgtggtgagactggaggacatctgcctgaaggagaccatgagcctggccgacagcctgtacaacctgcagctgatccaggagttctgccaggagtacctgaaccagtgctgccacttcaccctggaggacatgctgtacgccgccagcagcatcaagagcaactacctggtgttcatggccgagctgttctggtggttcgaggtggtgaagcccagcttcgtgcagcccagagtggtgagaccccagggcgccgagcccgtgaaggacatgcccagcatccccgtgctgaacgccgccaagagaaacgtgctggacagcagcagcgacttccccagcagcggcgagggcgccaccttcacccagagccaccaccacctgcccagcagatacagcagaccccaggcccacagcagcgccagcggcggcatcagaagaagcagcagcatgagctacgtggacggcttcatcggcacctggcccaaggagaagagaagcagcgtgcacggcgtgagcttcgacatcagcttcgacaaggaggacagcgtgcagagaagcacccccaacagaggcatcaccagaagcatcagcaacgagggcctgaccctgaacaacagccacgtgagcaagcacatcagaaagaacctgagcttcaagcccatcaacggcgaggaggaggccgagagcatcgaggaggagctgaacatcgacagccacagcgacctgaagagctgcgtgcccctgaacaccaacgagctgaacagcaacgagaacatccactacaagctgcccaacggcgccctgcagaacagaatcctgctggacgagttcggcaaccagatcgagacccccagcatcgaggaggccctgcagatcatccacgacaccgagaagagcccccacaccccccagcccgaccagatcgccaacggcttcttcctgcacagccaggagatgagcatcctgaacagcaacatcaagctgaaccagagcagccccgacaacgtgaccgacaccaagggcgccctgagccccatcaccgacaacaccgaggtggacaccggcatccacgtgcccagcgaggacatccccgagaccatggacgaggacagcagcctgagagactacaccgtgagcctggacagcgacatggacgacgccagcaagttcctgcaggactacgacatcagaaccggcaacaccagagaggccctgagcccctgccccagcaccgtgagcaccaagagccagcccggcagcagcgccagcagcagcagcggcgtgaagatgaccagcttcgccgagcagaagttcagaaagctgaaccacaccgacggcaagagcagcggcagcagcagccagaagaccacccccgagggcagcgagctgaacatcccccacgtggtggcctgggcccagatccccgaggagaccggcctgccccagggcagagacaccacccagctgctggccagcgagatggtgcacctgagaatgaagctggaggagaagagaagagccatcgaggcccagaagaagaagatggaggccgccttcaccaagcagagacagaagatgggcagaaccgccttcctgaccgtggtgaagaagaagggcgacggcatcagccccctgagagaggaggccgccggcgccgaggacgagaaggtgtacaccgacagagccaaggagaaggagagccagaagaccgacggccagagaagcaagagcctggccgacatcaaggagagcatggagaacccccaggccaagtggctgaagagccccaccacccccatcgaccccgagaagcagtggaacctggccagccccagcgaggagaccctgaacgagggcgagatcctggagtacaccaagagcatcgagaagctgaacagcagcctgcacttcctgcagcaggagatgcagagactgagcctgcagcaggagatgctgatgcagatgagagagcagcagagctgggtgatcagccccccccagcccagcccccagaagcagatcagagacttcaagcccagcaagcaggccggcctgagcagcgccatcgcccccttcagcagcgacagccccagacccacccaccccagcccccagagcagcaacagaaagagcgccagcttcagcgtgaagagccagagaacccccagacccaacgagctgaagatcacccccctgaacagaaccctgaccccccccagaagcgtggacagcctgcccagactgagaagattcagccccagccaggtgcccatccagaccagaagcttcgtgtgcttcggcgacgacggcgagccccagctgaaggagagcaagcccaaggaggaggtgaagaaggaggagctggagagcaagggcaccctggagcagagaggccacaaccccgaggagaaggagatcaagcccttcgagagcaccgtgagcgaggtgctgagcctgcccgtgaccgagaccgtgtgcctgacccccaacgaggaccagctgaaccagcccaccgagcccccccccaagcccgtgttcccccccaccgcccccaagaacgtgaacctgatcgaggtgagcctgagcgacctgaagccccccgagaaggccgacgtgcccgtggagaagtacgacggcgagagcgacaaggagcagttcgacgacgaccagaaggtgtgctgcggcttcttcttcaaggacgaccagaaggccgagaacgacatggccatgaagagagccgccctgctggagaagagactgagaagagagaaggagacccagctgagaaagcagcagctggaggccgagatggagcacaagaaggaggagaccagaagaaagaccgaggaggagagacagaagaaggaggacgagagagccagaagagagttcatcagacaggagtacatgagaagaaagcagctgaagctgatggaggacatggacaccgtgatcaagcccagaccccaggtggtgaagcagaagaagcagagacccaagagcatccacagagaccacatcgagagccccaagacccccatcaagggcccccccgtgagcagcctgagcctggccagcctgaacaccggcgacaacgagagcgtgcacagcggcaagagaacccccagaagcgagagcgtggagggcttcctgagccccagcagatgcggcagcagaaacggcgagaaggactgggagaacgccagcaccaccagcagcgtggccagcggcaccgagtacaccggccccaagctgtacaaggagcccagcgccaagagcaacaagcacatcatccagaacgccctggcccactgctgcctggccggcaaggtgaacgagggccagaagaagaagatcctggaggagatggagaagagcgacgccaacaacttcctgatcctgttcagagacagcggctgccagttcagaagcctgtacacctactgccccgagaccgaggagatcaacaagctgaccggcatcggccccaagagcatcaccaagaagatgatcgagggcctgtacaagtacaacagcgacagaaagcagttcagccacatccccgccaagaccctgagcgccagcgtggacgccatcaccatccacagccacctgtggcagaccaagagacccgtgacccccaagaagctgctgcccaccaaggcctag

SEQ ID NO: 75165 - DNA, 4389 bp, synthetic construct
  misc_feature 1..4389: note = Description of Artificial Sequence: Synthetic coding sequence
  source 1..4389: mol_type = other DNA
atgggcgacgccgccgaccccagagagatgagaaagaccttcatcgtgcccgccatcaagcccttcgaccactacgacttcagcagagccaagatcgcctgcaacctggcctggctggtggccaaggccttcggcaccgagaacgtgcccgaggagctgcaggagcccttctacaccgaccagtacgaccaggagcacatcaagccccccgtggtgaacctgctgctgagcgccgagctgtactgcagagccggcagcctgatcctgaagagcgacgccgccaagcccctgctgggccacgacgccgtgatccaggccctggcccagaagggcctgtacgtgaccgaccaggagaagctggtgaccgagagagacctgcacaagaagcccatccagatgagcgcccacctggccatgatcgacaccctgatgatggcctacaccgtggagatggtgagcatcgagaaggtgatcgcctgcgcccagcagtacagcgccttcttccaggccaccgacctgccctacgacatcgaggacgccgtgatgtactggatcaacaaggtgaacgagcacctgaaggacatcatggagcaggagcagaagctgaaggagcaccacaccgtggaggcccccggcggccagaaggccagatacagaaaggagcagaccctgctgaagcagctgccctgcatccccctggtggagaacctgctgaaggacggcaccgacggctgcgccctggccgccctgatccacttctactgccccgacgtggtgagactggaggacatctgcctgaaggagaccatgagcctggccgacagcctgtacaacctgcagctgatccaggagttctgccaggagtacctgaaccagtgctgccacttcaccctggaggacatgctgtacgccgccagcagcatcaagagcaactacctggtgttcatggccgagctgttctggtggttcgaggtggtgaagcccagcttcgtgcagcccagagtggtgagaccccagggcgccgagcccgtgaaggacatgcccagcatccccgtgctgaacgccgccaagagaaacgtgctggacagcagcagcgacttccccagcagatacagcagaccccaggcccacagcagcgccagcggcggcatcagaagaagcagcagcatgagctacgtggacggcttcatcggcacctggcccaaggagaagagaagcagcgtgcacggcgtgagcttcgacatcagcttcgacaaggaggacagcgtgcagagaagcacccccaacagaggcatcaccagaagcatcagcaacgagggcctgaccctgaacaacagccacgtgagcaagcacatcagaaagaacctgagcttcaagcccatcaacggcgaggaggaggccgagagcatcgaggaggagctgaacatcgacagccacagcgacctgaagagctgcgtgcccctgaacaccaacgagctgaacagcaacgagaacatccactacaagctgcccaacggcgccctgcagaacagaatcctgctggacgagttcggcaaccagatcgagacccccagcatcgaggaggccctgcagatcatccacgacaccgagaagagcccccacaccccccagcccgaccagatcgccaacggcttcttcctgcacagccaggagatgagcatcctgaacagcaacatcaagctgaaccagagcagccccgacaacgtgaccgacaccaagggcgccctgagccccatcaccgacaacaccgaggtggacaccggcatccacgtgcccagcgaggacatccccgagaccatggacgaggacagcagcctgagagactacaccgtgagcctggacagcgacatggacgacgccagcaagttcctgcaggactacgacatcagaaccggcaacaccagagaggccctgagcccctgccccagcaccgtgagcaccaagagccagcccggcagcagcgccagcagcagcagcggcgtgaagatgaccagcttcgccgagcagaagttcagaaagctgaaccacaccgacggcaagagcagcggcagcagcagccagaagaccacccccgagggcagcgagctgaacatcccccacgtggtggcctgggcccagatccccgaggagaccggcctgccccagggcagagacaccacccagctgctggccagcgagatggtgcacctgagaatgaagctggaggagaagagaagagccatcgaggcccagaagaagaagatggaggccgccttcaccaagcagagacagaagatgggcagaaccgccttcctgaccgtggtgaagaagaagggcgacggcatcagccccctgagagaggaggccgccggcgccgaggacgagaaggtgtacaccgacagagccaaggagaaggagagccagaagaccgacggccagagaagcaagagcctggccgacatcaaggagagcatggagaacccccaggccaagtggctgaagagccccaccacccccatcgaccccgagaagcagtggaacctggccagccccagcgaggagaccctgaacgagggcgagatcctggagtacaccaagagcatcgagaagctgaacagcagcctgcacttcctgcagcaggagatgcagagactgagcctgcagcaggagatgctgatgcagatgagagagcagcagagctgggtgatcagccccccccagcccagcccccagaagcagatcagagacttcaagcccagcaagcaggccggcctgagcagcgccatcgcccccttcagcagcgacagccccagacccacccaccccagcccccagagcagcaacagaaagagcgccagcttcagcgtgaagagccagagaacccccagacccaacgagctgaagatcacccccctgaacagaaccctgaccccccccagaagcgtggacagcctgcccagactgagaagattcagccccagccaggtgcccatccagaccagaagcttcgtgtgcttcggcgacgacggcgagccccagctgaaggagagcaagcccaaggaggaggtgaagaaggaggagctggagagcaagggcaccctggagcagagaggccacaaccccgaggagaaggagatcaagcccttcgagagcaccgtgagcgaggtgctgagcctgcccgtgaccgagaccgtgtgcctgacccccaacgaggaccagctgaaccagcccaccgagcccccccccaagcccgtgttcccccccaccgcccccaagaacgtgaacctgatcgaggtgagcctgagcgacctgaagccccccgagaaggccgacgtgcccgtggagaagtacgacggcgagagcgacaaggagcagttcgacgacgaccagaaggtgtgctgcggcttcttcttcaaggacgaccagaaggccgagaacgacatggccatgaagagagccgccctgctggagaagagactgagaagagagaaggagacccagctgagaaagcagcagctggaggccgagatggagcacaagaaggaggagaccagaagaaagaccgaggaggagagacagaagaaggaggacgagagagccagaagagagttcatcagacaggagtacatgagaagaaagcagctgaagctgatggaggacatggacaccgtgatcaagcccagaccccaggtggtgaagcagaagaagcagagacccaagagcatccacagagaccacatcgagagccccaagacccccatcaagggcccccccgtgagcagcctgagcctggccagcctgaacaccggcgacaacgagagcgtgcacagcggcaagagaacccccagaagcgagagcgtggagggcttcctgagccccagcagatgcggcagcagaaacggcgagaaggactgggagaacgccagcaccaccagcagcgtggccagcggcaccgagtacaccggccccaagctgtacaaggagcccagcgccaagagcaacaagcacatcatccagaacgccctggcccactgctgcctggccggcaaggtgaacgagggccagaagaagaagatcctggaggagatggagaagagcgacgccaacaacttcctgatcctgttcagagacagcggctgccagttcagaagcctgtacacctactgccccgagaccgaggagatcaacaagctgaccggcatcggccccaagagcatcaccaagaagatgatcgagggcctgtacaagtacaacagcgacagaaagcagttcagccacatccccgccaagaccctgagcgccagcgtggacgccatcaccatccacagccacctgtggcagaccaagagacccgtgacccccaagaagctgctgcccaccaaggcctag

SEQ ID NO: 75166 - DNA, 450 bp, synthetic construct
  misc_feature 1..450: note = Description of Artificial Sequence: Synthetic coding sequence
  source 1..450: mol_type = other DNA
atggccgaccagctgaccgaggagcaggtgaccgagttcaaggaggccttcagcctgttcgacaaggacggcgacggctgcatcaccaccagagagctgggcaccgtgatgagaagcctgggccagaaccccaccgaggccgagctgagagacatgatgagcgagatcgacagagacggcaacggcaccgtggacttccccgagttcctgggcatgatggccagaaagatgaaggacaccgacaacgaggaggagatcagagaggccttcagagtgttcgacaaggacggcaacggcttcgtgagcgccgccgagctgagacacgtgatgaccagactgggcgagaagctgagcgacgaggaggtggacgagatgatcagagccgccgacaccgacggcgacggccaggtgaactacgaggagttcgtgagagtgctggtgagcaagtag

SEQ ID NO: 75167 - DNA, 546 bp, synthetic construct
  misc_feature 1..546: note = Description of Artificial Sequence: Synthetic coding sequence
  source 1..546: mol_type = other DNA
atgggcctgcagcaggagatcagcctgcagccctggtgccaccaccccgccgagagctgccagaccaccaccgacatgaccgagagactgagcgccgagcagatcaaggagtacaagggcgtgttcgagatgttcgacgaggagggcaacggcgaggtgaagaccggcgagctggagtggctgatgagcctgctgggcatcaaccccaccaagagcgagctggccagcatggccaaggacgtggacagagacaacaagggcttcttcaactgcgacggcttcctggccctgatgggcgtgtaccacgagaaggcccagaaccaggagagcgagctgagagccgccttcagagtgttcgacaaggagggcaagggctacatcgactggaacaccctgaagtacgtgctgatgaacgccggcgagcccctgaacgaggtggaggccgagcagatgatgaaggaggccgacaaggacggcgacagaaccatcgactacgaggagttcgtggccatgatgaccggcgagagcttcaagctgatccagtag

SEQ ID NO: 75168 - DNA, 495 bp, synthetic construct
  misc_feature 1..495: note = Description of Artificial Sequence: Synthetic coding sequence
  source 1..495: mol_type = other DNA
atgggcctgcagcaggagatcagcctgaccgagagactgagcgccgagcagatcaaggagtacaagggcgtgttcgagatgttcgacgaggagggcaacggcgaggtgaagaccggcgagctggagtggctgatgagcctgctgggcatcaaccccaccaagagcgagctggccagcatggccaaggacgtggacagagacaacaagggcttcttcaactgcgacggcttcctggccctgatgggcgtgtaccacgagaaggcccagaaccaggagagcgagctgagagccgccttcagagtgttcgacaaggagggcaagggctacatcgactggaacaccctgaagtacgtgctgatgaacgccggcgagcccctgaacgaggtggaggccgagcagatgatgaaggaggccgacaaggacggcgacagaaccatcgactacgaggagttcgtggccatgatgaccggcgagagcttcaagctgatccagtag

SEQ ID NO: 75169 - DNA, 1779 bp, synthetic construct
  misc_feature 1..1779: note = Description of Artificial Sequence: Synthetic coding sequence
  source 1..1779: mol_type = other DNA
atggagggcaagtggctgctgtgcatgctgctggtgctgggcaccgccatcgtggaggcccacgacggccacgacgacgacgtgatcgacatcgaggacgacctggacgacgtgatcgaggaggtggaggacagcaagcccgacaccaccgccccccccagcagccccaaggtgacctacaaggcccccgtgcccaccggcgaggtgtacttcgccgacagcttcgacagaggcaccctgagcggctggatcctgagcaaggccaagaaggacgacaccgacgacgagatcgccaagtacgacggcaagtgggaggtggaggagatgaaggagagcaagctgcccggcgacaagggcctggtgctgatgagcagagccaagcaccacgccatcagcgccaagctgaacaagcccttcctgttcgacaccaagcccctgatcgtgcagtacgaggtgaacttccagaacggcatcgagtgcggcggcgcctacgtgaagctgctgagcaagacccccgagctgaacctggaccagttccacgacaagaccccctacaccatcatgttcggccccgacaagtgcggcgaggactacaagctgcacttcatcttcagacacaagaaccccaagaccggcatctacgaggagaagcacgccaagagacccgacgccgacctgaagacctacttcaccgacaagaagacccacctgtacaccctgatcctgaaccccgacaacagcttcgagatcctggtggaccagagcgtggtgaacagcggcaacctgctgaacgacatgaccccccccgtgaaccccagcagagagatcgaggaccccgaggacagaaagcccgaggactgggacgagagacccaagatccccgaccccgaggccgtgaagcccgacgactgggacgaggacgcccccgccaagatccccgacgaggaggccaccaagcccgagggctggctggacgacgagcccgagtacgtgcccgaccccgacgccgagaagcccgaggactgggacgaggacatggacggcgagtgggaggccccccagatcgccaaccccagatgcgagagcgcccccggctgcggcgtgtggcagagacccgtgatcgacaaccccaactacaagggcaagtggaagccccccatgatcgacaaccccagctaccagggcatctggaagcccagaaagatccccaaccccgacttcttcgaggacctggagcccttcagaatgacccccttcagcgccatcggcctggagctgtggagcatgaccagcgacatcttcttcgacaacttcatcatctgcgccgacagaagaatcgtggacgactgggccaacgacggctggggcctgaagaaggccgccgacggcgccgccgagcccggcgtggtgggccagatgatcgaggccgccgaggagagaccctggctgtgggtggtgtacatcctgaccgtggccctgcccgtgttcctggtgatcctgttctgctgcagcggcaagaagcagaccagcggcatggagtacaagaagaccgacgccccccagcccgacgtgaaggaggaggaggaggagaaggaggaggagaaggacaagggcgacgaggaggaggagggcgaggagaagctggaggagaagcagaagagcgacgccgaggaggacggcggcaccgtgagccaggaggaggaggacagaaagcccaaggccgaggaggacgagatcctgaacagaagccccagaaacagaaagcccagaagagagtag

SEQ ID NO: 75170 - DNA, 852 bp, synthetic construct
  misc_feature 1..852: note = Description of Artificial Sequence: Synthetic coding sequence
  source 1..852: mol_type = other DNA
atgctgctggtgctgggcaccgccatcgtggaggcccacgacggccacgacgacgacgtgatcgacatcgaggacgacctggacgacgtgatcgaggaggtggaggacagcaagcccgacaccaccgccccccccagcagccccaaggtgacctacaaggcccccgtgcccaccggcgaggtgtacttcgccgacagcttcgacagaggcaccctgagcggctggatcctgagcaaggccaagaaggacgacaccgacgacgagatcgccaagtacgacggcaagtgggaggtggaggagatgaaggagagcaagctgcccggcgacaagggcctggtgctgatgagcagagccaagcaccacgccatcagcgccaagctgaacaagcccttcctgttcgacaccaagcccctgatcgtgcagtacgaggtgaacttccagaacggcatcgagtgcggcggcgcctacaactgcttcctgaagcaccagaacagcacctgggaccagttccacgacaagaccccctacaccatcatgttcggccccgacaagtgcggcgaggactacaagctgcacttcatcttcagacacaagaaccccaagaccggcatctacgaggagaagcacgccaagagacccgacgccgacctgaagacctacttcaccgacaagaagacccacctgtacaccctgatcctgaaccccgacaacagcttcgagatcctggtggaccagagcgtgccccccgtgaaccccagcagagagatcgaggaccccgaggacagaaagcccgaggactgggacgagagacccaagatccccgaccccgaggccgtgaagcccgacgactag

SEQ ID NO: 75171 - DNA, 984 bp, synthetic construct
  misc_feature 1..984: note = Description of Artificial Sequence: Synthetic coding sequence
  source 1..984: mol_type = other DNA
atggagggcaagtggctgctgtgcatgctgctggtgctgggcaccgccatcgtggaggcccacgacggccacgacgacgacgtgatcgacatcgaggacgacctggacgacgtgatcgaggaggtggaggagatgaaggagagcaagctgcccggcgacaagggcctggtgctgatgagcagagccaagcaccacgccatcagcgccaagctgaacaagcccttcctgttcgacaccaagcccctgatcgtgcagtacgaggtgaacttccagaacggcatcgagtgcggcggcgcctacgtgaagctgctgagcaagacccccgagctgaacctggaccagttccacgacaagaccccctacaccatcatgttcggccccgacaagtgcggcgaggactacaagctgcacttcatcttcagacacaagaaccccaagaccggcatctacgaggagaagcacgccaagagacccgacgccgacctgaagacctacttcaccgacaagaagacccacctgtacaccctgatcctgaaccccgacaacagcttcgagatcctggtggaccagagcgtggtgaacagcggcaacctgctgaacgacatgaccccccccgtgaaccccagcagagagatcgaggaccccgaggacagaaagcccgaggactgggacgagagacccaagatccccgaccccgaggccgtgaagcccgacgactgggacgaggacgcccccgccaagatccccgacgaggaggccaccaagcccgagggctggctggacgacgagcccgagtacgtgcccgaccccgacgccgagaagcccgaggactgggacgaggacatggacggcgagtgggaggccccccagatcgccaaccccagatgcgagagcgcccccggctgcggcgtgtggcagagacccgtggtggacatccagaagaccagcagacaccaccaccagcaggcccccgtggagcactag

SEQ ID NO: 75172 - DNA, 1884 bp, synthetic construct
  misc_feature 1..1884: note = Description of Artificial Sequence: Synthetic coding sequence
  source 1..1884: mol_type = other DNA
atggccgacagaagaacccccacccccttcgccggctgcagactgcccagacagagaagagccagagacgccagccaggtgagcgcccccggcaccagaagaatcatggagggcaagtggctgctgtgcatgctgctggtgctgggcaccgccatcgtggaggcccacgacggccacgacgacgacgtgatcgacatcgaggacgacctggacgacgtgatcgaggaggtggaggacagcaagcccgacaccaccgccccccccagcagccccaaggtgacctacaaggcccccgtgcccaccggcgaggtgtacttcgccgacagcttcgacagaggcaccctgagcggctggatcctgagcaaggccaagaaggacgacaccgacgacgagatcgccaagtacgacggcaagtgggaggtggaggagatgaaggagagcaagctgcccggcgacaagggcctggtgctgatgagcagagccaagcaccacgccatcagcgccaagctgaacaagcccttcctgttcgacaccaagcccctgatcgtgcagtacgaggtgaacttccagaacggcatcgagtgcggcggcgcctacgtgaagctgctgagcaagacccccgagctgaacctggaccagttccacgacaagaccccctacaccatcatgttcggccccgacaagtgcggcgaggactacaagctgcacttcatcttcagacacaagaaccccaagaccggcatctacgaggagaagcacgccaagagacccgacgccgacctgaagacctacttcaccgacaagaagacccacctgtacaccctgatcctgaaccccgacaacagcttcgagatcctggtggaccagagcgtggtgaacagcggcaacctgctgaacgacatgaccccccccgtgaaccccagcagagagatcgaggaccccgaggacagaaagcccgaggactgggacgagagacccaagatccccgaccccgaggccgtgaagcccgacgactgggacgaggacgcccccgccaagatccccgacgaggaggccaccaagcccgagggctggctggacgacgagcccgagtacgtgcccgaccccgacgccgagaagcccgaggactgggacgaggacatggacggcgagtgggaggccccccagatcgccaaccccagatgcgagagcgcccccggctgcggcgtgtggcagagacccgtgatcgacaaccccaactacaagggcaagtggaagccccccatgatcgacaaccccagctaccagggcatctggaagcccagaaagatccccaaccccgacttcttcgaggacctggagcccttcagaatgacccccttcagcgccatcggcctggagctgtggagcatgaccagcgacatcttcttcgacaacttcatcatctgcgccgacagaagaatcgtggacgactgggccaacgacggctggggcctgaagaaggccgccgacggcgccgccgagcccggcgtggtgggccagatgatcgaggccgccgaggagagaccctggctgtgggtggtgtacatcctgaccgtggccctgcccgtgttcctggtgatcctgttctgctgcagcggcaagaagcagaccagcggcatggagtacaagaagaccgacgccccccagcccgacgtgaaggaggaggaggaggagaaggaggaggagaaggacaagggcgacgaggaggaggagggcgaggagaagctggaggagaagcagaagagcgacgccgaggaggacggcggcaccgtgagccaggaggaggaggacagaaagcccaaggccgaggaggacgagatcctgaacagaagccccagaaacagaaagcccagaagagagtag

SEQ ID NO: 75173 - DNA, 1779 bp, synthetic construct; identical to SEQ ID NO: 75169
  misc_feature 1..1779: note = Description of Artificial Sequence: Synthetic coding sequence
  source 1..1779: mol_type = other DNA

SEQ ID NO: 75174 - DNA, 405 bp, synthetic construct
  misc_feature 1..405: note = Description of Artificial Sequence: Synthetic coding sequence
  source 1..405: mol_type = other DNA
atggagggcaagtggctgctgtgcatgctgctggtgctgggcaccgccatcgtggaggcccacgacggccacgacgacgacgtgatcgacatcgaggacgacctggacgacgtgatcgaggaggtggaggacagcaagcccgacaccaccgccccccccagcagccccaaggtgacctacaaggcccccgtgcccaccggcgaggtgtacttcgccgacagcttcgacagaggcaccctgagcggctggatcctgagcaaggccaagaaggacgacaccgacgacgagatcgccaagtacgacggcaagtgggaggtggaggagatgaaggagagcaagctgcccggcgacaagggcctggtgctgatgagcagagccaagcaccacgccatcagcgccaagtag

SEQ ID NO: 75175 - DNA, 507 bp, synthetic construct
  misc_feature 1..507: note = Description of Artificial Sequence: Synthetic coding sequence
  source 1..507: mol_type = other DNA
atggagggcaagtggctgctgtgcatgctgctggtgctgggcaccgccatcgtggaggcccacgacggccacgacgacgacgtgatcgacatcgaggacgacctggacgacgtgatcgaggaggtggaggacagcaagcccgacaccaccgccccccccagcagccccaaggtgacctacaaggcccccgtgcccaccggcgaggtgtacttcgccgacagcttcgacagaggcaccctgagcggctggatcctgagcaaggccaagaaggacgacaccgacgacgagatcgccaagtacgacggcaagtgggaggtggaggagatgaaggagagcaagctgcccggcgacaagggcctggtgctgatgagcagagccaagcaccacgccatcagcgccaagctgaacaagcccttcctgttcgacaccaagcccctgatcgtgcagtacgaggtgaacttccagaacggcatcgagtgcggcggcgcctacgtgaagctgctgtag

SEQ ID NO: 75176 - DNA, 1779 bp, synthetic construct; identical to SEQ ID NO: 75169
  misc_feature 1..1779: note = Description of Artificial Sequence: Synthetic coding sequence
  source 1..1779: mol_type = other DNA

SEQ ID NO: 75177 - DNA, 240 bp, synthetic construct
  misc_feature 1..240: note = Description of Artificial Sequence: Synthetic coding sequence
  source 1..240: mol_type = other DNA
atggagggcaagtggctgctgtgcatgctgctggtgctgggcaccgccatcgtggaggcccacgacggccacgacgacgacgtgatcgacatcgaggacgacctggacgacgtgatcgaggaggtggaggacagcaagcccgacaccaccgccccccccagcagccccaaggtgacctacaaggcccccgtgcccaccggcgaggtgtacttcgccgacagcttcgacagaggcacctag

SEQ ID NO: 75178 - DNA, 99 bp, synthetic construct
  misc_feature 1..99: note = Description of Artificial Sequence: Synthetic coding sequence
  source 1..99: mol_type = other DNA
atggagggcaagtggctgctgtgcatgctgctggtgctgggcaccgccatcgtggaggcccacgacggccacgacgacgacgtgatcgacatcgagtag

SEQ ID NO: 75179 - DNA, 1455 bp, synthetic construct
  misc_feature 1..1455: note = Description of Artificial Sequence: Synthetic coding sequence
  source 1..1455: mol_type = other DNA
atgaaggagagcaagctgcccggcgacaagggcctggtgctgatgagcagagccaagcaccacgccatcagcgccaagctgaacaagcccttcctgttcgacaccaagcccctgatcgtgcagtacgaggtgaacttccagaacggcatcgagtgcggcggcgcctacgtgaagctgctgagcaagacccccgagctgaacctggaccagttccacgacaagaccccctacaccatcatgttcggccccgacaagtgcggcgaggactacaagctgcacttcatcttcagacacaagaaccccaagaccggcatctacgaggagaagcacgccaagagacccgacgccgacctgaagacctacttcaccgacaagaagacccacctgtacaccctgatcctgaaccccgacaacagcttcgagatcctggtggaccagagcgtggtgaacagcggcaacctgctgaacgacatgaccccccccgtgaaccccagcagagagatcgaggaccccgaggacagaaagcccgaggactgggacgagagacccaagatccccgaccccgaggccgtgaagcccgacgactgggacgaggacgcccccgccaagatccccgacgaggaggccaccaagcccgagggctggctggacgacgagcccgagtacgtgcccgaccccgacgccgagaagcccgaggactgggacgaggacatggacggcgagtgggaggccccccagatcgccaaccccagatgcgagagcgcccccggctgcggcgtgtggcagagacccgtgatcgacaaccccaactacaagggcaagtggaagccccccatgatcgacaaccccagctaccagggcatctggaagcccagaaagatccccaaccccgacttcttcgaggacctggagcccttcagaatgacccccttcagcgccatcggcctggagctgtggagcatgaccagcgacatcttcttcgacaacttcatcatctgcgccgacagaagaatcgtggacgactgggccaacgacggctggggcctgaagaaggccgccgacggcgccgccgagcccggcgtggtgggccagatgatcgaggccgccgaggagagaccctggctgtgggtggtgtacatcctgaccgtggccctgcccgtgttcctggtgatcctgttctgctgcagcggcaagaagcagaccagcggcatggagtacaagaagaccgacgccccccagcccgacgtgaaggaggaggaggaggagaaggaggaggagaaggacaagggcgacgaggaggaggagggcgaggagaagctggaggagaagcagaagagcgacgccgaggaggacggcggcaccgtgagccaggaggaggaggacagaaagcccaaggccgaggaggacgagatcctgaacagaagccccagaaacagaaagcccagaagagagtag

SEQ ID NO: 75180 - DNA, 324 bp, synthetic construct
  misc_feature 1..324: note = Description of Artificial Sequence: Synthetic coding sequence
  source 1..324: mol_type = other DNA
atggagggcaagtggctgctgtgcatgctgctggtgctgggcaccgccatcgtggaggcccacgacggccacgacgacgacgtgatcgacatcgaggacgacctggacgacgtgatcgaggaggtggaggacagcaagcccgacaccaccgccccccccagcagccccaaggtgacctacaaggcccccgtgcccaccggcgaggtgtacttcgccgacagcttcgacagaggcaccctgagcggctggatcctgagcaaggccaagaaggacgacaccgacgacgagatcgccaagtacgacggcaagtgggaggtggagtag

SEQ ID NO: 75181 - DNA, 435 bp, synthetic construct
  misc_feature 1..435: note = Description of Artificial Sequence: Synthetic coding sequence
  source 1..435: mol_type = other DNA
atggagggcaagtggctgctgtgcatgctgctggtgctgggcaccgccatcgtggaggcccacgacggccacgacgacgacgtgatcgacatcgaggacgacctggacgacgtgatcgaggaggtggaggacagcaagcccgacaccaccgccccccccagcagccccaaggtgacctacaaggcccccgtgcccaccggcgaggtgtacttcgccgacagcttcgacagaggcaccctgagcggctggatcctgagcaaggccaagaaggacgacaccgacgacgagatcgccaagtacgacggcaagtgggaggtggaggagatgaaggagagcaagctgcccggcgacaagggcctggtgctgatgagcagagccaagcaccacgccatcagcgccaagctgaacaagcccttcctgttcgacaccaagtag

SEQ ID NO: 75182 - DNA, 420 bp, synthetic construct
  misc_feature 1..420: note = Description of Artificial Sequence: Synthetic coding sequence
  source 1..420: mol_type = other DNA
atgagagccggcagaggcgccacccccgccagagagctgttcagagacgccgccttccccgccgccgacagcagcctgttctgcgacctgagcacccccctggcccagttcagagaggacatcacctggagaagaccccaggagatctgcgccacccccagactgttccccgacgaccccagagagggccaggtgaagcagggcctgctgggcgactgctggttcctgtgcgcctgcgccgccctgcagaagagcagacacctgctggaccaggtgagctgccccgtgcagctgcccgccgactggacctgcaaggtgcagcccgtgtggctggagttcccctgcctgcccatcagctgcagactgagagtgagcagcgacaccagccccgacagcgccacctggggcagctggaagtag

SEQ ID NO: 75183 - DNA, 417 bp, synthetic construct
  misc_feature 1..417: note = Description of Artificial Sequence: Synthetic coding sequence
  source 1..417: mol_type = other DNA
atgagagccggcagaggcgccacccccgccagagagctgttcagagacgccgccttccccgccgccgacagcagcctgttctgcgacctgagcacccccctggcccagttcagagaggacatcacctggagaagaccccaggtgcccgagggcggcagaagccaggacgccccccccctgctgctgcaggagcccctgctgagctgcgtgccccacagatacgcccaggaggtgagcagactgtgcctgctgcccgccggcacctacaaggtggtgcccagcacctacctgcccgacaccgagggcgccttcaccgtgaccatcgccaccagaatcgacagacccagcatccacagccaggagatgctgggccagttcctgcaggaggtgagcatcatggccgtgatgaagacctag

SEQ ID NO: 75184 - DNA, 1554 bp, synthetic construct
  misc_feature 1..1554: note = Description of Artificial Sequence: Synthetic coding sequence
  source 1..1554: mol_type = other DNA
atgagagccggcagaggcgccacccccgccagagagctgttcagagacgccgccttccccgccgccgacagcagcctgttctgcgacctgagcacccccctggcccagttcagagaggacatcacctggagaagaccccaggagatctgcgccacccccagactgttccccgacgaccccagagagggccaggtgaagcagggcctgctgggcgactgctggttcctgtgcgcctgcgccgccctgcagaagagcagacacctgctggaccaggtgatcccccccggccagcccagctgggccgaccaggagtacagaggcagcttcacctgcagaatctggcagttcggcagatgggtggaggtgaccaccgacgacagactgccctgcctggccggcagactgtgcttcagcagatgccagagagaggacgtgttctggctgcccctgctggagaaggtgtacgccaaggtgcacggcagctacgagcacctgtgggccggccaggtggccgacgccctggtggacctgaccggcggcctggccgagagatggaacctgaagggcgtggccggcagcggcggccagcaggacagacccggcagatgggagcacagaacctgcagacagctgctgcacctgaaggaccagtgcctgatcagctgctgcgtgctgagccccagagccggcgccagagagctgggcgagttccacgccttcatcgtgagcgacctgagagagctgcagggccaggccggccagtgcatcctgctgctgagaatccagaacccctggggcagaagatgctggcagggcctgtggagagagggcggcgagggctggagccaggtggacgccgccgtggccagcgagctgctgagccagctgcaggagggcgagttctgggtggaggaggaggagttcctgagagagttcgacgagctgaccgtgggctaccccgtgaccgaggccggccacctgcagagcctgtacaccgagagactgctgtgccacaccagagccctgcccggcgcctgggtgaagggccagagcgccggcggctgcagaaacaacagcggcttccccagcaaccccaagttctggctgagagtgagcgagcccagcgaggtgtacatcgccgtgctgcagagaagcagactgcacgccgccgactgggccggcagagccagagccctggtgggcgacagccacaccagctggagccccgccagcatccccggcaagcactaccaggccgtgggcctgcacctgtggaaggtgcccgagggcggcagaagccaggacgccccccccctgctgctgcaggagcccctgctgagctgcgtgccccacagatacgcccaggaggtgagcagactgtgcctgctgcccgccggcacctacaaggtggtgcccagcacctacctgcccgacaccgagggcgccttcaccgtgaccatcgccaccagaatcgacagacccagcatccacagccaggagatgctgggccagttcctgcaggaggtgagcatcatggccgtgatgaagacctag

SEQ ID NO: 75185 - DNA, 1335 bp, synthetic construct
  misc_feature 1..1335: note = Description of Artificial Sequence: Synthetic coding sequence
  source 1..1335: mol_type = other DNA
atgagagccggcagaggcgccacccccgccagagagctgttcagagacgccgccttccccgccgccgacagcagcctgttctgcgacctgagcacccccctggcccagttcagagaggacatcacctggagaagaccccaggagatctgcgccacccccagactgttccccgacgaccccagagagggccaggtgaagcagggcctgctgggcgactgctggttcctgtgcgcctgcgccgccctgcagaagagcagacacctgctggaccaggtgatcccccccggccagcccagctgggccgaccaggagtacagaggcagcttcacctgcagaatctggcagttcggcagatgggtggaggtgaccaccgacgacagactgccctgcctggccggcagactgtgcttcagcagatgccagagagaggacgtgttctggctgcccctgctggagaaggtgtacgccaaggtgcacggcagctacgagcacctgtgggccggccaggtggccgacgccctggtggacctgaccggcggcctggccgagagatggaacctgaagggcgtggccggcagcggcggccagcaggacagacccggcagatgggagcacagaacctgcagacagctgctgcacctgaaggaccagtgcctgatcagctgctgcgtgctgagccccagagccggcgccagagagctgggcgagttccacgccttcatcgtgagcgacctgagagagctgcagggccaggccggccagtgcatcctgctgctgagaatccagaacccctggggcagaagatgctggcagggcctgtggagagagggcggcgagggctggagccaggtggacgccgccgtggccagcgagctgctgagccagctgcaggagggcgagttctgggtggaggaggaggagttcctgagagagttcgacgagctgaccgtgggctaccccgtgaccgaggccggccacctgcagagcctgtacaccgagagactgctgtgccacaccagagccctgcccggcgcctgggtgaagggccagagcgccggcggctgcagaaacaacagcggcttccccagcaaccccaagttctggctgagagtgagcgagcccagcgaggtgtacatcgccgtgctgcagagaagcagactgcacgccgccgactgggccggcagagccagagccctggtgggcgacagccacaccagctggagccccgccagcatccccggcaagcactaccaggccgtgggcctgcacctgtggaagggcgtgaccctgggcaccaccctgttccccgtgcccagctggatgtggcccacctag

SEQ ID NO: 75186 - DNA, 2019 bp, synthetic construct
  misc_feature 1..2019: note = Description of Artificial Sequence: Synthetic coding sequence
  source 1..2019: mol_type = other DNA
atgagagccggcagaggcgccacccccgccagagagctgttcagagacgccgccttccccgccgccgacagcagcctgttctgcgacctgagcacccccctggcccagttcagagaggacatcacctggagaagaccccaggagatctgcgccacccccagactgttccccgacgaccccagagagggccaggtgaagcagggcctgctgggcgactgctggttcctgtgcgcctgcgccgccctgcagaagagcagacacctgctggaccaggtgatcccccccggccagcccagctgggccgaccaggagtacagaggcagcttcacctgcagaatctggcagttcggcagatgggtggaggtgaccaccgacgacagactgccctgcctggccggcagactgtgcttcagcagatgccagagagaggacgtgttctggctgcccctgctggagaaggtgtacgccaaggtgcacggcagctacgagcacctgtgggccggccaggtggccgacgccctggtggacctgaccggcggcctggccgagagatggaacctgaagggcgtggccggcagcggcggccagcaggacagacccggcagatgggagcacagaacctgcagacagctgctgcacctgaaggaccagtgcctgatcagctgctgcgtgctgagccccagagccggcgccagagagctgggcgagttccacgccttcatcgtgagcgacctgagagagctgcagggccaggccggccagtgcatcctgctgctgagaatccagaacccctggggcagaagatgctggcagggcctgtggagagagggcggcgagggctggagccaggtggacgccgccgtggccagcgagctgctgagccagctgcaggagggcgagttctgggtggaggaggaggagttcctgagagagttcgacgagctgaccgtgggctaccccgtgaccgaggccggccacctgcagagcctgtacaccgagagactgctgtgccacaccagagccctgcccggcgcctgggtgaagggccagagcgccggcggctgcagaaacaacagcggcttccccagcaaccccaagttctggctgagagtgagcgagcccagcgaggtgtacatcgccgtgctgcagagaagcagactgcacgccgccgactgggccggcagagccagagccctggtgggcgacagccacaccagctggagccccgccagcatccccggcaagcactaccaggccgtgggcctgcacctgtggaaggtggagaagagaagagtgaacctgcccagagtgctgagcatgccccccgtggccggcaccgcctgccacgcctacgacagagaggtgcacctgagatgcgagctgagccccggctactacctggccgtgcccagcaccttcctgaaggacgcccccggcgagttcctgctgagagtgttcagcaccggcagagtgagcctgagcgccatcagagccgtggccaagaacaccacccccggcgccgccctgcccgccggcgagtggggcaccgtgcagctgagaggcagctggagagtgggccagaccgccggcggcagcagaaacttcgccagctaccccaccaacccctgcttccccttcagcgtgcccgagggccccggccccagatgcgtgagaatcaccctgcaccagcactgcagacccagcgacaccgagttccaccccatcggcttccacatcttccaggtgcccgagggcggcagaagccaggacgccccccccctgctgctgcaggagcccctgctgagctgcgtgccccacagatacgcccaggaggtgagcagactgtgcctgctgcccgccggcacctacaaggtggtgcccagcacctacctgcccgacaccgagggcgccttcaccgtgaccatcgccaccagaatcgacagacccagcatccacagccaggagatgctgggccagttcctgcaggaggtgagcatcatggccgtgatgaagacctag

SEQ ID NO: 75187 - DNA, 2220 bp, synthetic construct
  misc_feature 1..2220: note = Description of Artificial Sequence: Synthetic coding sequence
  source 1..2220: mol_type = other DNA
atgctgtacagccccggccccagcctgcccgagagcgccgagagcctggacggcagccaggaggacaagcccagaggcagctgcgccgagcccaccttcaccgacaccggcatggtggcccacatcaacaacagcagactgaaggccaagggcgtgggccagcacgacaacgcccagaacttcggcaaccagagcttcgaggagctgagagccgcctgcctgagaaagggcgagctgttcgaggaccccctgttccccgccgagcccagcagcctgggcttcaaggacctgggccccaacagcaagaacgtgcagaacatcagctggcagagacccaaggacatcatcaacaaccccctgttcatcatggacggcatcagccccaccgacatctgccagggcatcctgggcgactgctggctgctggccgccatcggcagcctgaccacctgccccaagctgctgtacagagtggtgcccagaggccagagcttcaagaagaactacgccggcatcttccacttccagatctggcagttcggccagtgggtgaacgtggtggtggacgacagactgcccaccaagaacgacaagctggtgttcgtgcacagcaccgagagaagcgagttctggagcgccctgctggagaaggcctacgccaagctgagcggcagctacgaggccctgagcggcggcagcaccatggagggcctggaggacttcaccggcggcgtggcccagagcttccagctgcagagacccccccagaacctgctgagactgctgagaaaggccgtggagagaagcagcctgatgggctgcagcatcgaggtgaccagcgacagcgagctggagagcatgaccgacaagatgctggtgagaggccacgcctacagcgtgaccggcctgcaggacgtgcactacagaggcaagatggagaccctgatcagagtgagaaacccctggggcagaatcgagtggaacggcgcctggagcgacagcgccagagagtgggaggaggtggccagcgacatccagatgcagctgctgcacaagaccgaggacggcgagttctggatgagctaccaggacttcctgaacaacttcaccctgctggagatctgcaacctgacccccgacaccctgagcggcgactacaagagctactggcacaccaccttctacgagggcagctggagaagaggcagcagcgccggcggctgcagaaaccaccccggcaccttctggaccaacccccagttcaagatcagcctgcccgagggcgacgaccccgaggacgacgccgagggcaacgtggtggtgtgcacctgcctggtggccctgatgcagaagaactggagacacgccagacagcagggcgcccagctgcagaccatcggcttcgtgctgtacgccgtgcccaaggagttccagaacatccaggacgtgcacctgaagaaggagttcttcaccaagtaccaggaccacggcttcagcgagatcttcaccaacagcagagaggtgagcagccagctgagactgccccccggcgagtacatcatcatccccagcaccttcgagccccacagagacgccgacttcctgctgagagtgttcaccgagaagcacagcgagagctgggagctggacgaggtgaactacgccgagcagctgcaggaggagaaggtgagcgaggacgacatggaccaggacttcctgcacctgttcaagatcgtggccggcgagggcaaggagatcggcgtgtacgagctgcagagactgctgaacagaatggccatcaagttcaagagcttcaagaccaagggcttcggcctggacgcctgcagatgcatgatcaacctgatggacaaggacggcagcggcaagctgggcctgctggagttcaagatcctgtggaagaagctgaagaagtggatggacatcttcagagagtgcgaccaggaccacagcggcaccctgaacagctacgagatgagactggtgatcgagaaggccggcatcaagctgaacaacaaggtgatgcaggtgctggtggccagatacgccgacgacgacctgatcatcgacttcgacagcttcatcagctgcttcctgagactgaagaccatgttcaccttcttcctgaccatggaccccaagaacaccggccacatctgcctgagcctggagcagtggctgcagatgaccatgtggggctag

SEQ ID NO: 75188 - DNA, 2220 bp, synthetic construct
  misc_feature 1..2220: note = Description of Artificial Sequence: Synthetic coding sequence
  source 1..2220: mol_type = other DNA
atgctgtacagccccggccccagcctgcccgagagcgccgagagcctggacggcagccaggaggacaagcccagaggcagctgcgccgagcccaccttcaccgacaccggcatggtggcccacatcaacaacagcagactgaaggccaagggcgtgggccagcacgacaacgcccagaacttcggcaaccagagcttcgaggagctgagagccgcctgcctgagaaagggcgagctgttcgaggaccccctgttccccgccgagcccagcagcctgggcttcaaggacctgggccccaacagcaagaacgtgcagaacatcagctggcagagacccaaggacatcatcaacaaccccctgttcatcatggacggcatcagccccaccgacatctgccagggcatcctgggcgactgctggctgctggccgccatcggcagcctgaccacctgccccaagctgctgtacagagtggtgcccagaggccagagcttcaagaagaactacgccggcatcttccacttccagatctggcagttcggccagtgggtgaacgtggtggtggacgacagactgcccaccaagaacgacaagctggtgttcgtgcacagcaccgagagaagcgagttctggagcgccctgctggagaaggcctacgccaagctgagcggcagctacgaggccctgagcggcggcagcaccatggagggcctggaggacttcaccggcggcgtggcccagagcttccagctgcagagacccccccagaacctgctgagactgctgagaaaggccgtggagagaagcagcctgatgggctgcagcatcgaggtgaccagcgacagcgagctggagagcatgaccgacaagatgctggtgagaggccacgcctacagcgtgaccggcctgcaggacgtgcactacagaggcaagatggagaccctgatcagagtgagaaacccctggggcagaatcgagtggaacggcgcctggagcgacagcgccagagagtgggaggaggtggccagcgacatccagatgcagctgctgcacaagaccgaggacggcgagttctggatgagctaccaggacttcctgaacaacttcaccctgctggagatctgcaacctgacccccgacaccctgagcggcgactacaagagctactggcacaccaccttctacgagggcagctggagaagaggcagcagcgccggcggctgcagaaaccaccccggcaccttctggaccaacccccagttcaagatcagcctgcccgagggcgacgaccccgaggacgacgccgagggcaacgtggtggtgtgcacctgcctggtggccctgatgcagaagaactggagacacgccagacagcagggcgcccagctgcagaccatcggcttcgtgctgtacgccgtggccagccccttccagaacatccaggacgtgcacctgaagaaggagttcttcaccaagtaccaggaccacggcttcagcgagatcttcaccaacagcagagaggtgagcagccagctgagactgccccccggcgagtacatcatcatccccagcaccttcgagccccacagagacgccgacttcctgctgagagtgttcaccgagaagcacagcgagagctgggagctggacgaggtgaactacgccgagcagctgcaggaggagaaggtgagcgaggacgacatggaccaggacttcctgcacctgttcaagatcgtggccggcgagggcaaggagatcggcgtgtacgagctgcagagactgctgaacagaatggccatcaagttcaagagcttcaagaccaagggcttcggcctggacgcctgcagatgcatgatcaacctgatggacaaggacggcagcggcaagctgggcctgctggagttcaagatcctgtggaagaagctgaagaagtggatggacatcttcagagagtgcgaccaggaccacagcggcaccctgaacagctacgagatgagactggtgatcgagaaggccggcatcaagctgaacaacaaggtgatgcaggtgctggtggccagatacgccgacgacgacctgatcatcgacttcgacagcttcatcagctgcttcctgagactgaagaccatgttcaccttcttcctgaccatggaccccaagaacaccggccacatctgcctgagcctggagcagtggctgcagatgaccatgtggggctag

SEQ ID NO: 75189 - DNA, 2160 bp, synthetic construct
  misc_feature 1..2160: note = Description of Artificial Sequence: Synthetic coding sequence
  source 1..2160: mol_type = other DNA
atggccagcagcagcggcagagtgaccatccagctggtggacgaggaggccggcgtgggcgccggcagactgcagctgttcagaggccagagctacgaggccatcagagccgcctgcctggacagcggcatcctgttcagagacccctacttccccgccggccccgacgccctgggctacgaccagctgggccccgacagcgagaaggccaagggcgtgaagtggatgagaccccacgagttctgcgccgagcccaagttcatctgcgaggacatgagcagaaccgacgtgtgccagggcagcctgggcaactgctggttcctggccgccgccgccagcctgaccctgtaccccagactgctgagaagagtggtgccccccggccaggacttccagcacggctacgccggcgtgttccacttccagctgtggcagttcggcagatggatggacgtggtggtggacgacagactgcccgtgagagagggcaagctgatgttcgtgagaagcgagcagagaaacgagttctgggcccccctgctggagaaggcctacgccaagctgcacggcagctacgaggtgatgagaggcggccacatgaacgaggccttcgtggacttcaccggcggcgtgggcgaggtgctgtacctgagacagaacagcatgggcctgttcagcgccctgagacacgccctggccaaggagagcctggtgggcgccaccgccctgagcgacagaggcgagtacagaaccgaggagggcctggtgaagggccacgcctacagcatcaccggcacccacaaggtgttcctgggcttcaccaaggtgagactgctgagactgagaaacccctggggctgcgtggagtggaccggcgcctggagcgacagctgccccagatgggacaccctgcccaccgagtgcagagacgccctgctggtgaagaaggaggacggcgagttctggatggagctgagagacttcctgctgcacttcgacaccgtgcagatctgcagcctgagccccgaggtgctgggccccagccccgagggcggcggctggcacgtgcacaccttccagggcagatgggtgagaggcttcaacagcggcggcagccagcccaacgccgagaccttctggaccaacccccagttcagactgaccctgctggagcccgacgaggaggacgacgaggacgaggagggcccctggggcggctggggcgccgccggcgccagaggccccgccagaggcggcagaacccccaagtgcaccgtgctgctgagcctgatccagagaaacagaagaagactgagagccaagggcctgacctacctgaccgtgggcttccacgtgttccagatccccgaggagctgctgggcctgtgggacagccccagaagccacgccctgctgcccagactgctgagagccgacagaagccccctgagcgccagaagagacgtgaccagaagatgctgcctgagacccggccactacctggtggtgcccagcaccgcccacgccggcgacgaggccgacttcaccctgagagtgttcagcgagagaagacacaccgccgtggagatcgacgacgtgatcagcgccgacctgcagagcctgcagggcccctacctgcccctggagctgggcctggagcagctgttccaggagctggccggcgaggaggaggagctgaacgccagccagctgcaggccctgctgagcatcgccctggagcccgccagagcccacaccagcacccccagagagatcggcctgagaacctgcgagcagctgctgcagtgcttcggccacggccagagcctggccctgcaccacttccagcagctgtggggctacctgctggagtggcaggccatcttcaacaagttcgacgaggacaccagcggcaccatgaacagctacgagctgagactggccctgaacgccgccggcttccacctgaacaaccagctgacccagaccctgaccagcagatacagagacagcagactgagagtggacttcgagagattcgtgagctgcgtggcccacctgacctgcatcttctgccactgcagccagcacctggacggcggcgagggcgtgatctgcctgacccacagacagtggatggaggtggccaccttcagctag

SEQ ID NO: 75190 - DNA, 2448 bp, synthetic construct
  misc_feature 1..2448: note = Description of Artificial Sequence: Synthetic coding sequence
  source 1..2448: mol_type = other DNA
atgcccaccgtgatcagcgccagcgtggcccccagaaccgccgccgagcccagaagccccggccccgtgccccaccccgcccagagcaaggccaccgaggccggcggcggcaaccccagcggcatctacagcgccatcatcagcagaaacttccccatcatcggcgtgaaggagaagaccttcgagcagctgcacaagaagtgcctggagaagaaggtgctgtacgtggaccccgagttcccccccgacgagaccagcctgttctacagccagaagttccccatccagttcgtgtggaagagaccccccgagatctgcgagaaccccagattcatcatcgacggcgccaacagaaccgacatctgccagggcgagctgggcgactgctggttcctggccgccatcgcctgcctgaccctgaaccagcacctgctgttcagagtgatcccccacgaccagagcttcatcgagaactacgccggcatcttccacttccagttctggagatacggcgagtgggtggacgtggtgatcgacgactgcctgcccacctacaacaaccagctggtgttcaccaagagcaaccacagaaacgagttctggagcgccctgctggagaaggcctacgccaagctgcacggcagctacgaggccctgaagggcggcaacaccaccgaggccatggaggacttcaccggcggcgtggccgagttcttcgagatcagagacgcccccagcgacatgtacaagatcatgaagaaggccatcgagagaggcagcctgatgggctgcagcatcgacgacggcaccaacatgacctacggcaccagccccagcggcctgaacatgggcgagctgatcgccagaatggtgagaaacatggacaacagcctgctgcaggacagcgacctggaccccagaggcagcgacgagagacccaccagaaccatcatccccgtgcagtacgagaccagaatggcctgcggcctggtgagaggccacgcctacagcgtgaccggcctggacgaggtgcccttcaagggcgagaaggtgaagctggtgagactgagaaacccctggggccaggtggagtggaacggcagctggagcgacagatggaaggactggagcttcgtggacaaggacgagaaggccagactgcagcaccaggtgaccgaggacggcgagttctggatgagctacgaggacttcatctaccacttcaccaagctggagatctgcaacctgaccgccgacgccctgcagagcgacaagctgcagacctggaccgtgagcgtgaacgagggcagatgggtgagaggctgcagcgccggcggctgcagaaacttccccgacaccttctggaccaacccccagtacagactgaagctgctggaggaggacgacgaccccgacgacagcgaggtgatctgcagcttcctggtggccctgatgcagaagaacagaagaaaggacagaaagctgggcgccagcctgttcaccatcggcttcgccatctacgaggtgccccaccagatgcacggcaacaagcagcacctgcagaaggacttcttcctgtacaacgccagcaaggccagaagcaagacctacatcaacatgagagaggtgagccagagattcagactgccccccagcgagtacgtgatcgtgcccagcacctacgagccccaccaggagggcgagttcatcctgagagtgttcagcgagaagagaaacctgagcgaggaggtggagaacaccatcagcgtggacagacccgtgcccatcatcttcgtgagcgacagagccaacagcaacaaggagctgggcgtggaccaggagagcgaggagggcaagggcaagaccagccccgacaagcagaagcagagcccccagccccagcccggcagcagcgaccaggagagcgaggagcagcagcagttcagaaacatcttcaagcagatcgccggcgacgacatggagatctgcgccgacgagctgaagaaggtgctgaacaccgtggtgaacaagcacaaggacctgaagacccacggcttcaccctggagagctgcagaagcatgatcgccctgatggacaccgacggcagcggcaagctgaacctgcaggagttccaccacctgtggaacaagatcaaggcctggcagaagatcttcaagcactacgacaccgaccagagcggcaccatcaacagctacgagatgagaaacgccgtgaacgacgccggcttccacctgaacaaccagctgtacgacatcatcaccatgagatacgccgacaagcacatgaacatcgacttcgacagcttcatctgctgcttcgtgagactggagggcatgttcagagccttccacgccttcgacaaggacggcgacggcatcatcaagctgaacgtgctggagtggctgcagctgaccatgtacgcctag

SEQ ID NO: 75191 - DNA, 930 bp, synthetic construct
  misc_feature 1..930: note = Description of Artificial Sequence: Synthetic coding sequence
  source 1..930: mol_type = other DNA
atgcacggcaacaagcagcacctgcagaaggacttcttcctgtacaacgccagcaaggccagaagcaagacctacatcaacatgagagaggtgagccagagattcagactgccccccagcgagtacgtgatcgtgcccagcacctacgagccccaccaggagggcgagttcatcctgagagtgttcagcgagaagagaaacctgagcgaggaggtggagaacaccatcagcgtggacagacccgtgagaaaggagacctacaagcccatcatcttcgtgagcgacagagccaacagcaacaaggagctgggcgtggaccaggagagcgaggagggcaagggcaagaccagccccgacaagcagaagcagagcccccagccccagcccggcagcagcgaccaggagagcgaggagcagcagcagttcagaaacatcttcaagcagatcgccggcgacgacatggagatctgcgccgacgagctgaagaaggtgctgaacaccgtggtgaacaagcacaaggacctgaagacccacggcttcaccctggagagctgcagaagcatgatcgccctgatggacaccgacggcagcggcaagctgaacctgcaggagttccaccacctgtggaacaagatcaaggcctggcagaagatcttcaagcactacgacaccgaccagagcggcaccatcaacagctacgagatgagaaacgccgtgaacgacgccggcttccacctgaacaaccagctgtacgacatcatcaccatgagatacgccgacaagcacatgaacatcgacttcgacagcttcatctgctgcttcgtgagactggagggcatgttcagagccttccacgccttcgacaaggacggcgacggcatcatcaagctgaacgtgctggagtggctgcagctgaccatgtacgcctag

SEQ ID NO: 75192 - DNA, 471 bp, synthetic construct
  misc_feature 1..471: note = Description of Artificial Sequence: Synthetic coding sequence
  source 1..471: mol_type = other DNA
atggagatctgcgccgacgagctgaagaaggtgctgaacaccgtggtgaacaagcacaaggacctgaagacccacggcttcaccctggagagctgcagaagcatgatcgccctgatggacaccgacggcagcggcaagctgaacctgcaggagttccaccacctgtggaacaagatcaaggcctggcagaagatcttcaagcactacgacaccgaccagagcggcaccatcaacagctacgagatgagaaacgccgtgaacgacgccggcttccacctgaacaaccagctgtacgacatcatcaccatgagatacgccgacaagcacatgaacatcgacttcgacagcttcatctgctgcttcgtgagactggagggcatgttcagagccttccacgccttcgacaaggacggcgacggcatcatcaagctgaacgtgctggagtggctgcagctgaccatgtacgcctag

SEQ ID NO: 75193 - DNA, 2190 bp, synthetic construct
  misc_feature 1..2190: note = Description of Artificial Sequence: Synthetic coding sequence
  source 1..2190: mol_type = other DNA
atgcccaccgtgatcagcgccagcgtggcccccagaaccgccgccgagcccagaagccccggccccgtgccccaccccgcccagagcaaggccaccgaggccggcggcggcaaccccagcggcatctacagcgccatcatcagcagaaacttccccatcatcggcgtgaaggagaagaccttcgagcagctgcacaagaagtgcctggagaagaaggtgctgtacgtggaccccgagttcccccccgacgagaccagcctgttctacagccagaagttccccatccagttcgtgtggaagagaccccccgagatctgcgagaaccccagattcatcatcgacggcgccaacagaaccgacatctgccagggcgagctgggcgactgctggttcctggccgccatcgcctgcctgaccctgaaccagcacctgctgttcagagtgatcccccacgaccagagcttcatcgagaactacgccggcatcttccacttccagttctggagatacggcgagtgggtggacgtggtgatcgacgactgcctgcccacctacaacaaccagctggtgttcaccaagagcaaccacagaaacgagttctggagcgccctgctggagaaggcctacgccaagctgcacggcagctacgaggccctgaagggcggcaacaccaccgaggccatggaggacttcaccggcggcgtggccgagttcttcgagatcagagacgcccccagcgacatgtacaagatcatgaagaaggccatcgagagaggcagcctgatgggctgcagcatcgacaccatcatccccgtgcagtacgagaccagaatggcctgcggcctggtgagaggccacgcctacagcgtgaccggcctggacgaggtgcccttcaagggcgagaaggtgaagctggtgagactgagaaacccctggggccaggtggagtggaacggcagctggagcgacagatggaaggactggagcttcgtggacaaggacgagaaggccagactgcagcaccaggtgaccgaggacggcgagttctggatgagctacgaggacttcatctaccacttcaccaagctggagatctgcaacctgaccgccgacgccctgcagagcgacaagctgcagacctggaccgtgagcgtgaacgagggcagatgggtgagaggctgcagcgccggcggctgcagaaacttccccgacaccttctggaccaacccccagtacagactgaagctgctggaggaggacgacgaccccgacgacagcgaggtgatctgcagcttcctggtggccctgatgcagaagaacagaagaaaggacagaaagctgggcgccagcctgttcaccatcggcttcgccatctacgaggtgcccaaggagatgcacggcaacaagcagcacctgcagaaggacttcttcctgtacaacgccagcaaggccagaagcaagacctacatcaacatgagagaggtgagccagagattcagactgccccccagcgagtacgtgatcgtgcccagcacctacgagccccaccaggagggcgagttcatcctgagagtgttcagcgagaagagaaacctgagcgaggaggtggagaacaccatcagcgtggacagacccgtgccccagcccggcagcagcgaccaggagagcgaggagcagcagcagttcagaaacatcttcaagcagatcgccggcgacgacatggagatctgcgccgacgagctgaagaaggtgctgaacaccgtggtgaacaagcacaaggacctgaagacccacggcttcaccctggagagctgcagaagcatgatcgccctgatggacaccgacggcagcggcaagctgaacctgcaggagttccaccacctgtggaacaagatcaaggcctggcagaagatcttcaagcactacgacaccgaccagagcggcaccatcaacagctacgagatgagaaacgccgtgaacgacgccggcttccacctgaacaaccagctgtacgacatcatcaccatgagatacgccgacaagcacatgaacatcgacttcgacagcttcatctgctgcttcgtgagactggagggcatgttcagagccttccacgccttcgacaaggacggcgacggcatcatcaagctgaacgtgctggagtggctgcagctgaccatgtacgcctag

SEQ ID NO: 75194 - DNA, 2187 bp, synthetic construct
  misc_feature 1..2187: note = Description of Artificial Sequence: Synthetic coding sequence
  source 1..2187: mol_type = other DNA
atgagctggcagatcagcctgaagacccagaccacccagcagaagaacgagatctgcgagaaccccagattcatcatcgacggcgccaacagaaccgacatctgccagggcgagctgggcgactgctggttcctggccgccatcgcctgcctgaccctgaaccagcacctgctgttcagagtgatcccccacgaccagagcttcatcgagaactacgccggcatcttccacttccagttctggagatacggcgagtgggtggacgtggtgatcgacgactgcctgcccacctacaacaaccagctggtgttcaccaagagcaaccacagaaacgagttctggagcgccctgctggagaaggcctacgccaagctgcacggcagctacgaggccctgaagggcggcaacaccaccgaggccatggaggacttcaccggcggcgtggccgagttcttcgagatcagagacgcccccagcgacatgtacaagatcatgaagaaggccatcgagagaggcagcctgatgggctgcagcatcgacgacggcaccaacatgacctacggcaccagccccagcggcctgaacatgggcgagctgatcgccagaatggtgagaaacatggacaacagcctgctgcaggacagcgacctggaccccagaggcagcgacgagagacccaccagaaccatcatccccgtgcagtacgagaccagaatggcctgcggcctggtgagaggccacgcctacagcgtgaccggcctggacgaggtgcccttcaagggcgagaaggtgaagctggtgagactgagaaacccctggggccaggtggagtggaacggcagctggagcgacagatggaaggactggagcttcgtggacaaggacgagaaggccagactgcagcaccaggtgaccgaggacggcgagttctggatgagctacgaggacttcatctaccacttcaccaagctggagatctgcaacctgaccgccgacgccctgcagagcgacaagctgcagacctggaccgtgagcgtgaacgagggcagatgggtgagaggctgcagcgccggcggctgcagaaacttccccgacaccttctggaccaacccccagtacagactgaagctgctggaggaggacgacgaccccgacgacagcgaggtgatctgcagcttcctggtggccctgatgcagaagaacagaagaaaggacagaaagctgggcgccagcctgttcaccatcggcttcgccatctacgaggtgcccaaggagatgcacggcaacaagcagcacctgcagaaggacttcttcctgtacaacgccagcaaggccagaagcaagacctacatcaacatgagagaggtgagccagagattcagactgccccccagcgagtacgtgatcgtgcccagcacctacgagccccaccaggagggcgagttcatcctgagagtgttcagcgagaagagaaacctgagcgaggaggtggagaacaccatcagcgtggacagacccgtgcccatcatcttcgtgagcgacagagccaacagcaacaaggagctgggcgtggaccaggagagcgaggagggcaagggcaagaccagccccgacaagcagaagcagagcccccagccccagcccggcagcagcgaccaggagagcgaggagcagcagcagttcagaaacatcttcaagcagatcgccggcgacgacatggagatctgcgccgacgagctgaagaaggtgctgaacaccgtggtgaacaagcacaaggacctgaagacccacggcttcaccctggagagctgcagaagcatgatcgccctgatggacaccgacggcagcggcaagctgaacctgcaggagttccaccacctgtggaacaagatcaaggcctggcagaagatcttcaagcactacgacaccgaccagagcggcaccatcaacagctacgagatgagaaacgccgtgaacgacgccggcttccacctgaacaaccagctgtacgacatcatcaccatgagatacgccgacaagcacatgaacatcgacttcgacagcttcatctgctgcttcgtgagactggagggcatgttcagagccttccacgccttcgacaaggacggcgacggcatcatcaagctgaacgtgctggagtggctgcagctgaccatgtacgcctag

SEQ ID NO: 75195 - DNA, 2448 bp, synthetic construct
  misc_feature 1..2448: note = Description of Artificial Sequence: Synthetic coding sequence
  source 1..2448: mol_type = other DNA
atgcccaccgtgatcagcgccagcgtggcccccagaaccgccgccgagcccagaagccccggccccgtgccccaccccgcccagagcaaggccaccgaggccggcggcggcaaccccagcggcatctacagcgccatcatcagcagaaacttccccatcatcggcgtgaaggagaagaccttcgagcagctgcacaagaagtgcctggagaagaaggtgctgtacgtggaccccgagttcccccccgacgagaccagcctgttctacagccagaagttccccatccagttcgtgtggaagagaccccccgagatctgcgagaaccccagattcatcatcgacggcgccaacagaaccgacatctgccagggcgagctgggcgactgctggttcctggccgccatcgcctgcctgaccctgaaccagcacctgctgttcagagtgatcccccacgaccagagcttcatcgagaactacgccggcatcttccacttccagttctggagatacggcgagtgggtggacgtggtgatcgacgactgcctgcccacctacaacaaccagctggtgttcaccaagagcaaccacagaaacgagttctggagcgccctgctggagaaggcctacgccaagctgcacggcagctacgaggccctgaagggcggcaacaccaccgaggccatggaggacttcaccggcggcgtggccgagttcttcgagatcagagacgcccccagcgacatgtacaagatcatgaagaaggccatcgagagaggcagcctgatgggctgcagcatcgacgacggcaccaacatgacctacggcaccagccccagcggcctgaacatgggcgagctgatcgccagaatggtgagaaacatggacaacagcctgctgcaggacagcgacctggaccccagaggcagcgacgagagacccaccagaaccatcatccccgtgcagtacgagaccagaatggcctgcggcctggtgagaggccacgcctacagcgtgaccggcctggacgaggtgcccttcaagggcgagaaggtgaagctggtgagactgagaaacccctggggccaggtggagtggaacggcagctggagcgacagatggaaggactggagcttcgtggacaaggacgagaaggccagactgcagcaccaggtgaccgaggacggcgagttctggatgagctacgaggacttcatctaccacttcaccaagctggagatctgcaacctgaccgccgacgccctgcagagcgacaagctgcagacctggaccgtgagcgtgaacgagggcagatgggtgagaggctgcagcgccggcggctgcagaaacttccccgacaccttctggaccaacccccagtacagactgaagctgctggaggaggacgacgaccccgacgacagcgaggtgatctgcagcttcctggtggccctgatgcagaagaacagaagaaaggacagaaagctgggcgccagcctgttcaccatcggcttcgccatctacgaggtgcccaaggagatgcacggcaacaagcagcacctgcagaaggacttcttcctgtacaacgccagcaaggccagaagcaagacctacatcaacatgagagaggtgagccagagattcagactgccccccagcgagtacgtgatcgtgcccagcacctacgagccccaccaggagggcgagttcatcctgagagtgttcagcgagaagagaaacctgagcgaggaggtggagaacaccatcagcgtggacagacccgtgcccatcatcttcgtgagcgacagagccaacagcaacaaggagctgggcgtggaccaggagagcgaggagggcaagggcaagaccagccccgacaagcagaagcagagcccccagccccagcccggcagcagcgaccaggagagcgaggagcagcagcagttcagaaacatcttcaagcagatcgccggcgacgacatggagatctgcgccgacgagctgaagaaggtgctgaacaccgtggtgaacaagcacaaggacctgaagacccacggcttcaccctggagagctgcagaagcatgatcgccctgatggacaccgacggcagcggcaagctgaacctgcaggagttccaccacctgtggaacaagatcaaggcctggcagaagatcttcaagcactacgacaccgaccagagcggcaccatcaacagctacgagatgagaaacgccgtgaacgacgccggcttccacctgaacaaccagctgtacgacatcatcaccatgagatacgccgacaagcacatgaacatcgacttcgacagcttcatctgctgcttcgtgagactggagggcatgttcagagccttccacgccttcgacaaggacggcgacggcatcatcaagctgaacgtgctggagtggctgcagctgaccatgtacgcctag

SEQ ID NO: 75196 - DNA, 2466 bp, synthetic construct
  misc_feature 1..2466: note = Description of Artificial Sequence: Synthetic coding sequence
  source 1..2466: mol_type = other DNA
atgcccaccgtgatcagcgccagcgtggcccccagaaccgccgccgagcccagaagccccggccccgtgccccaccccgcccagagcaaggccaccgaggccggcggcggcaaccccagcggcatctacagcgccatcatcagcagaaacttccccatcatcggcgtgaaggagaagaccttcgagcagctgcacaagaagtgcctggagaagaaggtgctgtacgtggaccccgagttcccccccgacgagaccagcctgttctacagccagaagttccccatccagttcgtgtggaagagaccccccgagatctgcgagaaccccagattcatcatcgacggcgccaacagaaccgacatctgccagggcgagctgggcgactgctggttcctggccgccatcgcctgcctgaccctgaaccagcacctgctgttcagagtgatcccccacgaccagagcttcatcgagaactacgccggcatcttccacttccagttctggagatacggcgagtgggtggacgtggtgatcgacgactgcctgcccacctacaacaaccagctggtgttcaccaagagcaaccacagaaacgagttctggagcgccctgctggagaaggcctacgccaagctgcacggcagctacgaggccctgaagggcggcaacaccaccgaggccatggaggacttcaccggcggcgtggccgagttcttcgagatcagagacgcccccagcgacatgtacaagatcatgaagaaggccatcgagagaggcagcctgatgggctgcagcatcgacgacggcaccaacatgacctacggcaccagccccagcggcctgaacatgggcgagctgatcgccagaatggtgagaaacatggacaacagcctgctgcaggacagcgacctggaccccagaggcagcgacgagagacccaccagaaccatcatccccgtgcagtacgagaccagaatggcctgcggcctggtgagaggccacgcctacagcgtgaccggcctggacgaggtgcccttcaagggcgagaaggtgaagctggtgagactgagaaacccctggggccaggtggagtggaacggcagctggagcgacagatggaaggactggagcttcgtggacaaggacgagaaggccagactgcagcaccaggtgaccgaggacggcgagttctggatgagctacgaggacttcatctaccacttcaccaagctggagatctgcaacctgaccgccgacgccctgcagagcgacaagctgcagacctggaccgtgagcgtgaacgagggcagatgggtgagaggctgcagcgccggcggctgcagaaacttccccgacaccttctggaccaacccccagtacagactgaagctgctggaggaggacgacgaccccgacgacagcgaggtgatctgcagcttcctggtggccctgatgcagaagaacagaagaaaggacagaaagctgggcgccagcctgttcaccatcggcttcgccatctacgaggtgcccaaggagatgcacggcaacaagcagcacctgcagaaggacttcttcctgtacaacgccagcaaggccagaagcaagacctacatcaacatgagagaggtgagccagagattcagactgccccccagcgagtacgtgatcgtgcccagcacctacgagccccaccaggagggcgagttcatcctgagagtgttcagcgagaagagaaacctgagcgaggaggtggagaacaccatcagcgtggacagacccgtgaagaagaagaagaccaagcccatcatcttcgtgagcgacagagccaacagcaacaaggagctgggcgtggaccaggagagcgaggagggcaagggcaagaccagccccgacaagcagaagcagagcccccagccccagcccggcagcagcgaccaggagagcgaggagcagcagcagttcagaaacatcttcaagcagatcgccggcgacgacatggagatctgcgccgacgagctgaagaaggtgctgaacaccgtggtgaacaagcacaaggacctgaagacccacggcttcaccctggagagctgcagaagcatgatcgccctgatggacaccgacggcagcggcaagctgaacctgcaggagttccaccacctgtggaacaagatcaaggcctggcagaagatcttcaagcactacgacaccgaccagagcggcaccatcaacagctacgagatgagaaacgccgtgaacgacgccggcttccacctgaacaaccagctgtacgacatcatcaccatgagatacgccgacaagcacatgaacatcgacttcgacagcttcatctgctgcttcgtgagactggagggcatgttcagagccttccacgccttcgacaaggacggcgacggcatcatcaagctgaacgtgctggagtggctgcagctgaccatgtacgcctag

SEQ ID NO: 75197 - DNA, 930 bp, synthetic construct
  misc_feature 1..930: note = Description of Artificial Sequence: Synthetic coding sequence
  source 1..930: mol_type = other DNA
atgcacggcaacaagcagcacctgcagaaggacttcttcctgtacaacgccagcaaggccagaagcaagacctacatcaacatgagagaggtgagccagagattcagactgccccccagcgagtacgtgatcgtgcccagcacctacgagccccaccaggagggcgagttcatcctgagagtgttcagcgagaagagaaacctgagcgaggaggtggagaacaccatcagcgtggacagacccgtgaagaagaagaagaccaagcccatcatcttcgtgagcgacagagccaacagcaacaaggagctgggcgtggaccaggagagcgaggagggcaagggcaagaccagccccgacaagcagaagcagagcccccagccccagcccggcagcagcgaccaggagagcgaggagcagcagcagttcagaaacatcttcaagcagatcgccggcgacgacatggagatctgcgccgacgagctgaagaaggtgctgaacaccgtggtgaacaagcacaaggacctgaagacccacggcttcaccctggagagctgcagaagcatgatcgccctgatggacaccgacggcagcggcaagctgaacctgcaggagttccaccacctgtggaacaagatcaaggcctggcagaagatcttcaagcactacgacaccgaccagagcggcaccatcaacagctacgagatgagaaacgccgtgaacgacgccggcttccacctgaacaaccagctgtacgacatcatcaccatgagatacgccgacaagcacatgaacatcgacttcgacagcttcatctgctgcttcgtgagactggagggcatgttcagagccttccacgccttcgacaaggacggcgacggcatcatcaagctgaacgtgctggagtggctgcagctgaccatgtacgcctag

SEQ ID NO: 75198 - DNA, 471 bp, synthetic construct; identical to SEQ ID NO: 75192
  misc_feature 1..471: note = Description of Artificial Sequence: Synthetic coding sequence
  source 1..471: mol_type = other DNA

SEQ ID NO: 75199 - DNA, 1923 bp, synthetic construct
  misc_feature 1..1923: note = Description of Artificial Sequence: Synthetic coding sequence
  source 1..1923: mol_type = other DNA
atgttcagctgcgtgaagccctacgaggaccagaactacagcgccctgagaagagactgcagaagaagaaaggtgctgttcgaggaccccctgttccccgccaccgacgacagcctgtactacaagggcacccccggccccgccgtgagatggaagagacccaagggcatctgcgaggaccccagactgttcgtggacggcatcagcagccacgacctgcaccagggccaggtgggcaactgctggttcgtggccgcctgcagcagcctggccagcagagagagcctgtggcagaaggtgatccccgactggaaggagcaggagtgggaccccgagaagcccaacgcctacgccggcatcttccacttccacttctggagattcggcgagtgggtggacgtggtgatcgacgacagactgcccaccgtgaacaaccagctgatctactgccacagcaacagcagaaacgagttctggtgcgccctggtggagaaggcctacgccaagctggccggctgctaccaggccctggacggcggcaacaccgccgacgccctggtggacttcaccggcggcgtgagcgagcccatcgacctgaccgagggcgacttcgccaacgacgagaccaagagaaaccagctgttcgagagaatgctgaaggtgcacagcagaggcggcctgatcagcgccagcatcaaggccgtgaccgccgccgacatggaggccagactggcctgcggcctggtgaagggccacgcctacgccgtgaccgacgtgagaaaggtgagactgggccacggcctgctggccttcttcaagagcgagaagctggacatgatcagactgagaaacccctggggcgagagagagtggaacggcccctggagcgacaccagcgaggagtggcagaaggtgagcaagagcgagagagagaagatgggcgtgaccgtgcaggacgacggcgagttctggatgaccttcgaggacgtgtgcagatacttcaccgacatcatcaagtgcagagtgatcaacaccagccacctgagcatccacaagacctgggaggaggccagactgcacggcgcctggaccctgcacgaggaccccagacagaacagaggcggcggctgcatcaaccacaaggacaccttcttccagaacccccagtacatcttcgaggtgaagaagcccgaggacgaggtgctgatctgcatccagcagagacccaagagaagcaccagaagagagggcaagggcgagaacctggccatcggcttcgacatctacaaggtggaggagaacagacagtacagaatgcacagcctgcagcacaaggccgccagcagcatctacatcaacagcagaagcgtgttcctgagaaccgaccagcccgagggcagatacgtgatcatccccaccaccttcgagcccggccacaccggcgagttcctgctgagagtgttcaccgacgtgcccagcaactgcagagagctgagactggacgagcccccccacacctgctggagcagcctgtgcggctacccccagctggtgacccaggtgcacgtgctgggcgccgccggcctgaaggacagccccaccggcgccaacagctacgtgatcatcaagtgcgagggcgacaaggtgagaagcgccgtgcagaagggcaccagcacccccgagtacaacgtgaagggcatcttctacagaaagaagctgagccagcccatcaccgtgcaggtgtggaaccacagagtgctgaaggacgagttcctgggccaggtgcacctgaaggccgaccccgacaacctgcaggccctgcacaccctgcacctgagagacagaaacagcagacagcccagcaacctgcccggcaccgtggccgtgcacatcctgagcagcaccagcctgatggccgtgtag

SEQ ID NO: 75200 - DNA, 2043 bp, synthetic construct
  misc_feature 1..2043: note = Description of Artificial Sequence: Synthetic coding sequence
  source 1..2043: mol_type = other DNA
atgagctgcaccggcacccccagctgcatctacctgctgagcgccctgagcctgcaggacctggtgctggactgggagcccagaggcgtgcccccccccctgcccggcgccgccgccaccatgttcagctgcgtgaagccctacgaggaccagaactacagcgccctgagaagagactgcagaagaagaaaggtgctgttcgaggaccccctgttccccgccaccgacgacagcctgtactacaagggcacccccggccccgccgtgagatggaagagacccaagggcatctgcgaggaccccagactgttcgtggacggcatcagcagccacgacctgcaccagggccaggtgggcaactgctggttcgtggccgcctgcagcagcctggccagcagagagagcctgtggcagaaggtgatccccgactggaaggagcaggagtgggaccccgagaagcccaacgcctacgccggcatcttccacttccacttctggagattcggcgagtgggtggacgtggtgatcgacgacagactgcccaccgtgaacaaccagctgatctactgccacagcaacagcagaaacgagttctggtgcgccctggtggagaaggcctacgccaagctggccggctgctaccaggccctggacggcggcaacaccgccgacgccctggtggacttcaccggcggcgtgagcgagcccatcgacctgaccgagggcgacttcgccaacgacgagaccaagagaaaccagctgttcgagagaatgctgaaggtgcacagcagaggcggcctgatcagcgccagcatcaaggccgtgaccgccgccgacatggaggccagactggcctgcggcctggtgaagggccacgcctacgccgtgaccgacgtgagaaaggtgagactgggccacggcctgctggccttcttcaagagcgagaagctggacatgatcagactgagaaacccctggggcgagagagagtggaacggcccctggagcgacaccagcgaggagtggcagaaggtgagcaagagcgagagagagaagatgggcgtgaccgtgcaggacgacggcgagttctggatgaccttcgaggacgtgtgcagatacttcaccgacatcatcaagtgcagagtgatcaacaccagccacctgagcatccacaagacctgggaggaggccagactgcacggcgcctggaccctgcacgaggaccccagacagaacagaggcggcggctgcatcaaccacaaggacaccttcttccagaacccccagtacatcttcgaggtgaagaagcccgaggacgaggtgctgatctgcatccagcagagacccaagagaagcaccagaagagagggcaagggcgagaacctggccatcggcttcgacatctacaaggtggaggagaacagacagtacagaatgcacagcctgcagcacaaggccgccagcagcatctacatcaacagcagaagcgtgttcctgagaaccgaccagcccgagggcagatacgtgatcatccccaccaccttcgagcccggccacaccggcgagttcctgctgagagtgttcaccgacgtgcccagcaactgcagagagctgagactggacgagcccccccacacctgctggagcagcctgtgcggctacccccagctggtgacccaggtgcacgtgctgggcgccgccggcctgaaggacagccccaccggcgccaacagctacgtgatcatcaagtgcgagggcgacaaggtgagaagcgccgtgcagaagggcaccagcacccccgagtacaacgtgaagggcatcttctacagaaagaagctgagccagcccatcaccgtgcaggtgtggaaccacagagtgctgaaggacgagttcctgggccaggtgcacctgaaggccgaccccgacaacctgcaggccctgcacaccctgcacctgagagacagaaacagcagacagcccagcaacctgcccggcaccgtggccgtgcacatcctgagcagcaccagcctgatggccgtgtag

SEQ ID NO: 75201 - DNA, 294 bp, synthetic construct
  misc_feature 1..294: note = Description of Artificial Sequence: Synthetic coding sequence
  source 1..294: mol_type = other DNA
atgttcagctgcgtgaagccctacgaggaccagaactacagcgccctgagaagagactgcagaagaagaaaggtgctgttcgaggaccccctgttccccgccaccgacgacagcctgtactacaagggcacccccggccccgccgtgagatggaagagacccaagggcatctgcgaggaccccagactgttcgtggacggcatcagcagccacgacctgcaccagggccaggtgggcaactgctggttcgtggccgcctgcagcagcctggccagcagagagagcctgtggtag

SEQ ID NO: 75202 - DNA, 1923 bp, synthetic construct; identical to SEQ ID NO: 75199
  misc_feature 1..1923: note = Description of Artificial Sequence: Synthetic coding sequence
  source 1..1923: mol_type = other DNA

SEQ ID NO: 75203 - DNA, 1674 bp, synthetic construct
  misc_feature 1..1674: note = Description of Artificial Sequence: Synthetic coding sequence
  source 1..1674: mol_type = other DNA
atgttcagctgcgtgaagccctacgaggaccagaactacagcgccctgagaagagactgcagaagaagaaaggtgctgttcgaggaccccctgttccccgccaccgacgacagcctgtactacaagggcacccccggccccgccgtgagatggaagagacccaagtacagcggccacagcctggccccccacagacccggctggggcgacgccagaagaatggagaacgtgcccagacccggcagcagcggctgccccagcagcagcctgagagccagagacctgggcatctgcgaggaccccagactgttcgtggacggcatcagcagccacgacctgcaccagggccaggtgggcaactgctggttcgtggccgcctgcagcagcctggccagcagagagagcctgtggcagaaggtgatccccgactggaaggagcaggagtgggaccccgagaagcccaacgcctacgccggcatcttccacttccacttctggagattcggcgagtgggtggacgtggtgatcgacgacagactgcccaccgtgaacaaccagctgatctactgccacagcaacagcagaaacgagttctggtgcgccctggtggagaaggcctacgccaagctggccggctgctaccaggccctggacggcggcaacaccgccgacgccctggtggacttcaccggcggcgtgagcgagcccatcgacctgaccgagggcgacttcgccaacgacgagaccaagagaaaccagctgttcgagagaatgctgaaggtgcacagcagaggcggcctgatcagcgccagcatcaaggccgtgaccgccgccgacatggaggccagactggcctgcggcctggtgaagggccacgcctacgccgtgaccgacgtgagaaaggtgagactgggccacggcctgctggccttcttcaagagcgagaagctggacatgatcagactgagaaacccctggggcgagagagagtggaacggcccctggagcgacaccagcgaggagtggcagaaggtgagcaagagcgagagagagaagatgggcgtgaccgtgcaggacgacggcgagttctggatgaccttcgaggacgtgtgcagatacttcaccgacatcatcaagtgcagagtgatcaacaccagccacctgagcatccacaagacctgggaggaggccagactgcacggcgcctggaccctgcacgaggaccccagacagaacagaggcggcggctgcatcaaccacaaggacaccttcttccagaacccccagtacatcttcgaggtgaagaagcccgaggacgaggtgctgatctgcatccagcagagacccaagagaagcaccagaagagagggcaagggcgagaacctggccatcggcttcgacatctacaaggtggaggagaacagacagtacagaatgcacagcctgcagcacaaggccgccagcagcatctacatcaacagcagaagcgtgttcctgagaaccgaccagcccgagggcagatacgtgatcatccccaccaccttcgagcccggccacaccggcgagttcctgctgagagtgttcaccgacgtgcccagcaactgcagagagctgagactggacgagcccccccacacctgctggagcagcctgtgcggctacccccagtggtag

SEQ ID NO: 75204 - DNA, 2442 bp, synthetic construct
  misc_feature 1..2442: note = Description of Artificial Sequence: Synthetic coding sequence
  source 1..2442: mol_type = other DNA
atggacgccaccgccctggagagagacgccgtgcagttcgccagactggccgtgcagagagaccacgagggcagatacagcgaggccgtgttctactacaaggaggccgcccaggccctgatctacgccgagatggccggcagcagcctggagaacatccaggagaagatcaccgagtacctggagagagtgcaggccctgcacagcgccgtgcagagcaagagcgccgaccccctgaagagcaagcaccagctggacctggagagagcccacttcctggtgacccaggccttcgacgaggacgagaaggagaacgtggaggacgccatcgagctgtacaccgaggccgtggacctgtgcctgaagaccagctacgagaccgccgacaaggtgctgcagaacaagctgaagcagctggccagacaggccctggacagagccgaggccctgagcgagcccctgaccaagcccgtgggcaagatcagcagcaccagcgtgaagcccaagcccccccccgtgagagcccacttccccctgggcgccaaccccttcctggagagaccccagagcttcatcagcccccagagctgcgacgcccagggccagagatacaccgccgaggagatcgaggtgctgagaaccaccagcaagatcaacggcatcgagtacgtgcccttcatgaacgtggacctgagagagagattcgcctaccccatgcccttctgcgacagatggggcaagctgcccctgagccccaagcagaagaccaccttcagcaagtgggtgagacccgaggacctgaccaacaaccccaccatgatctacaccgtgagcagcttcagcatcaagcagaccatcgtgagcgactgcagcttcgtggccagcctggccatcagcgccgcctacgagagaagattcaacaagaagctgatcaccggcatcatctacccccagaacaaggacggcgagcccgagtacaacccctgcggcaagtacatggtgaagctgcacctgaacggcgtgcccagaaaggtgatcatcgacgaccagctgcccgtggaccacaagggcgagctgctgtgcagctacagcaacaacaagagcgagctgtgggtgagcctgatcgagaaggcctacatgaaggtgatgggcggctacgacttccccggcagcaacagcaacatcgacctgcacgccctgaccggctggatccccgagagaatcgccatgcacagcgacagccagaccttcagcaaggacaacagcttcagaatgctgtaccagagattccacaagggcgacgtgctgatcaccgccagcaccggcatgatgaccgaggccgagggcgagaagtggggcctggtgcccacccacgcctacgccgtgctggacatcagagagttcaagggcctgagattcatccagctgaagaacccctggagccacctgagatggaagggcagatacagcgagaacgacgtgaagaactggacccccgagctgcagaagtacctgaacttcgaccccagaaccgcccagaagatcgacaacggcatcttctggatcagctgggacgacctgtgccagtactacgacgtgatctacctgagctggaaccccggcctgttcaaggagagcacctgcatccacagcacctgggacgccaagcagggccccgtgaaggacgcctacagcctggccaacaacccccagtacaagctggaggtgcagtgcccccagggcggcgccgccgtgtgggtgctgctgagcagacacatcaccgacaaggacgacttcgccaacaacagagagttcatcaccatggtggtgtacaagaccgacggcaagaaggtgtactaccccgccgacccccccccctacatcgacggcatcagaatcaacagcccccactacctgaccaagatcaagctgaccacccccggcacccacaccttcaccctggtggtgagccagtacgagaagcagaacaccatccactacaccgtgagagtgtacagcgcctgcagcttcaccttcagcaagatccccagcccctacaccctgagcaagagaatcaacggcaagtggagcggccagagcgccggcggctgcggcaacttccaggagacccacaagaacaaccccatctaccagttccacatcgagaagaccggccccctgctgatcgagctgagaggccccagacagtacagcgtgggcttcgaggtggtgaccgtgagcaccctgggcgaccccggcccccacggcttcctgagaaagagcagcggcgactacagatgcggcttctgctacctggagctggagaacatccccagcggcatcttcaacatcatccccagcaccttcctgcccaagcaggagggccccttcttcctggacttcaacagcatcatccccatcaagatcacccagctgcagtag

SEQ ID NO: 75205 - DNA, 2073 bp, synthetic construct
  misc_feature 1..2073: note = Description of Artificial Sequence: Synthetic coding sequence
  source 1..2073: mol_type = other DNA
atgccctacctgtacagagcccccggcccccaggcccaccccgtgcccaaggacgccagaatcacccacagcagcggccagagcttcgagcagatgagacaggagtgcctgcagagaggcaccctgttcgaggacgccgacttccccgccagcaacagcagcctgttctacagcgagagaccccagatccccttcgtgtggaagagacccggcgagatcgtgaagaaccccgagttcatcctgggcggcgccaccagaaccgacatctgccagggcgagctgggcgactgctggctgctggccgccatcgccagcctgaccctgaaccagaaggccctggccagagtgatcccccaggaccagagcttcggccccggctacgccggcatcttccacttccagttctggcagcacagcgagtggctggacgtggtgatcgacgacagactgcccaccttcagagacagactggtgttcctgcacagcgccgaccacaacgagttctggagcgccctgctggagaaggcctacgccaagctgaacggcagctacgaggccctgaagggcggcagcgccatcgaggccatggaggacttcaccggcggcgtggccgagaccttccagaccaaggaggcccccgagaacttctacgagatcctggagaaggccctgaagagaggcagcctgctgggctgcttcatcgacaccagaagcgccgccgagagcgaggccagaacccccttcggcctgatcaagggccacgcctacagcgtgaccggcatcgaccaggtgagcttcagaggccagagaatcgagctgatcagaatcagaaacccctggggccaggtggagtggaacggcagctggagcgacagcagccccgagtggagaagcgtgggccccgccgagcagaagagactgtgccacaccgccctggacgacggcgagttctggatggccttcaaggacttcaaggcccacttcgacaaggtggagatctgcaacctgacccccgacgccctggaggaggacgccatccacaagtgggaggtgaccgtgcaccagggcagctgggtgagaggcagcaccgccggcggctgcagaaacttcctggacaccttctggaccaacccccagatcaagctgagcctgaccgagaaggacgagggccaggaggagtgcagcttcctggtggccctgatgcagaaggacagaagaaagctgaagagattcggcgccaacgtgctgaccatcggctacgccatctacgagtgccccgacaaggacgagcacctgaacaaggacttcttcagataccacgccagcagagccagaagcaagaccttcatcaacctgagagaggtgagcgacagattcaagctgccccccggcgagtacatcctgatccccagcaccttcgagccccaccaggaggccgacttctgcctgagaatcttcagcgagaagaaggccatcaccagagacatggacggcaacgtggacatcgacctgcccgagccccccaagcccaccccccccgaccaggagaccgaggaggagcagagattcagagccctgttcgagcaggtggccggcgaggacatggaggtgaccgccgaggagctggagtacgtgctgaacgccgtgctgcagaagaagaaggacatcaagttcaagaagctgagcctgatcagctgcaagaacatcatcagcctgatggacaccagcggcaacggcaagctggagttcgacgagttcaaggtgttctgggacaagctgaagcagtggatcaacctgttcctgagattcgacgccgacaagagcggcaccatgagcacctacgagctgagaaccgccctgaaggccgccggcttccagctgagcagccacctgctgcagctgatcgtgctgagatacgccgacgaggagctgcagctggacttcgacgacttcctgaactgcctggtgagactggagaacgccagcagagtgttccaggccctgagcaccaagaacaaggagttcatccacctgaacatcaacgagttcatccacctgaccatgaacatctag

SEQ ID NO: 75206 - DNA, 1995 bp, synthetic construct
  misc_feature 1..1995: note = Description of Artificial Sequence: Synthetic coding sequence
  source 1..1995: mol_type = other DNA
atgccctacctgtacagagcccccggcccccaggcccaccccgtgcccaaggacgccagaatcacccacagcagcggccagagcttcgagcagatgagacaggagtgcctgcagagaggcaccctgttcgaggacgccgacttccccgccagcaacagcagcctgttctacagcgagagaccccagatccccttcgtgtggaagagacccggcgagatcgtgaagaaccccgagttcatcctgggcggcgccaccagaaccgacatctgccagggcgagctgggcgactgctggctgctggccgccatcgccagcctgaccctgaaccagaaggccctggccagagtgatcccccaggaccagagcttcggccccggctacgccggcatcttccacttccagttctggcagcacagcgagtggctggacgtggtgatcgacgacagactgcccaccttcagagacagactggtgttcctgcacagcgccgaccacaacgagttctggagcgccctgctggagaaggcctacgccaagctgaacggcagctacgaggccctgaagggcggcagcgccatcgaggccatggaggacttcaccggcggcgtggccgagaccttccagaccaaggaggcccccgagaacttctacgagatcctggagaaggccctgaagagaggcagcctgctgggctgcttcatcgacaccagaagcgccgccgagagcgaggccagaacccccttcggcctgatcaagggccacgcctacagcgtgaccggcatcgaccaggtgagcttcagaggccagagaatcgagctgatcagaatcagaaacccctggggccaggtggagtggaacggcagctggagcgacagaatggccttcaaggacttcaaggcccacttcgacaaggtggagatctgcaacctgacccccgacgccctggaggaggacgccatccacaagtgggaggtgaccgtgcaccagggcagctgggtgagaggcagcaccgccggcggctgcagaaacttcctggacaccttctggaccaacccccagatcaagctgagcctgaccgagaaggacgagggccaggaggagtgcagcttcctggtggccctgatgcagaaggacagaagaaagctgaagagattcggcgccaacgtgctgaccatcggctacgccatctacgagtgccccgacaaggacgagcacctgaacaaggacttcttcagataccacgccagcagagccagaagcaagaccttcatcaacctgagagaggtgagcgacagattcaagctgccccccggcgagtacatcctgatccccagcaccttcgagccccaccaggaggccgacttctgcctgagaatcttcagcgagaagaaggccatcaccagagacatggacggcaacgtggacatcgacctgcccgagccccccaagcccaccccccccgaccaggagaccgaggaggagcagagattcagagccctgttcgagcaggtggccggcgaggacatggaggtgaccgccgaggagctggagtacgtgctgaacgccgtgctgcagaagaagaaggacatcaagttcaagaagctgagcctgatcagctgcaagaacatcatcagcctgatggacaccagcggcaacggcaagctggagttcgacgagttcaaggtgttctgggacaagctgaagcagtggatcaacctgttcctgagattcgacgccgacaagagcggcaccatgagcacctacgagctgagaaccgccctgaaggccgccggcttccagctgagcagccacctgctgcagctgatcgtgctgagatacgccgacgaggagctgcagctggacttcgacgacttcctgaactgcctggtgagactggagaacgccagcagagtgttccaggccctgagcaccaagaacaaggagttcatccacctgaacatcaacgagttcatccacctgaccatgaacatctag

SEQ ID NO: 75207 - DNA, 1884 bp, synthetic construct
  misc_feature 1..1884: note = Description of Artificial Sequence: Synthetic coding sequence
  source 1..1884: mol_type = other DNA
atgccctacctgtacagagcccccggcccccaggcccaccccgtgcccaaggacgccagaatcacccacagcagcggccagagcttcgagcagatgagacaggagtgcctgcagagaggcaccctgttcgaggacgccgacttccccgccagcaacagcagcctgttctacagcgagagaccccagatccccttcgtgtggaagagacccggcttctggcagcacagcgagtggctggacgtggtgatcgacgacagactgcccaccttcagagacagactggtgttcctgcacagcgccgaccacaacgagttctggagcgccctgctggagaaggcctacgccaagctgaacggcagctacgaggccctgaagggcggcagcgccatcgaggccatggaggacttcaccggcggcgtggccgagaccttccagaccaaggaggcccccgagaacttctacgagatcctggagaaggccctgaagagaggcagcctgctgggctgcttcatcgacaccagaagcgccgccgagagcgaggccagaacccccttcggcctgatcaagggccacgcctacagcgtgaccggcatcgaccaggtgagcttcagaggccagagaatcgagctgatcagaatcagaaacccctggggccaggtggagtggaacggcagctggagcgacagcagccccgagtggagaagcgtgggccccgccgagcagaagagactgtgccacaccgccctggacgacggcgagttctggatggccttcaaggacttcaaggcccacttcgacaaggtggagatctgcaacctgacccccgacgccctggaggaggacgccatccacaagtgggaggtgaccgtgcaccagggcagctgggtgagaggcagcaccgccggcggctgcagaaacttcctggacaccttctggaccaacccccagatcaagctgagcctgaccgagaaggacgagggccaggaggagtgcagcttcctggtggccctgatgcagaaggacagaagaaagctgaagagattcggcgccaacgtgctgaccatcggctacgccatctacgagtgccccgacaaggacgagcacctgaacaaggacttcttcagataccacgccagcagagccagaagcaagaccttcatcaacctgagagaggtgagcgacagattcaagctgccccccggcgagtacatcctgatccccagcaccttcgagccccaccaggaggccgacttctgcctgagaatcttcagcgagaagaaggccatcaccagagacatggacggcaacgtggacatcgacctgcccgagccccccaagcccaccccccccgaccaggagaccgaggaggagcagagattcagagccctgttcgagcaggtggccggcgaggacatggaggtgaccgccgaggagctggagtacgtgctgaacgccgtgctgcagaagaagaaggacatcaagttcaagaagctgagcctgatcagctgcaagaacatcatcagcctgatggacaccagcggcaacggcaagctggagttcgacgagttcaaggtgttctgggacaagctgaagcagtggatcaacctgttcctgagattcgacgccgacaagagcggcaccatgagcacctacgagctgagaaccgccctgaaggccgccggcttccagctgagcagccacctgctgcagctgatcgtgctgagatacgccgacgaggagctgcagctggacttcgacgacttcctgaactgcctggtgagactggagaacgccagcagagtgttccaggccctgagcaccaagaacaaggagttcatccacctgaacatcaacgagttcatccacctgaccatgaacatctag

SEQ ID NO: 75208 - DNA, 807 bp, synthetic construct
  misc_feature 1..807: note = Description of Artificial Sequence: Synthetic coding sequence
  source 1..807: mol_type = other DNA
atgttcctggtgaacagcttcctgaagggcggcggcggcggcggcggcggcggcggcggcctgggcggcggcctgggcaacgtgctgggcggcctgatcagcggcgccggcggcggcggcggcggcggcggcggcggcggcggcggcggcggcggcggcggcggcggcaccgccatgagaatcctgggcggcgtgatcagcgccatcagcgaggccgccgcccagtacaaccccgagccccccccccccagaacccactacagcaacatcgaggccaacgagagcgaggaggtgagacagttcagaagactgttcgcccagctggccggcgacgacatggaggtgagcgccaccgagctgatgaacatcctgaacaaggtggtgaccagacaccccgacctgaagaccgacggcttcggcatcgacacctgcagaagcatggtggccgtgatggacagcgacaccaccggcaagctgggcttcgaggagttcaagtacctgtggaacaacatcaagagatggcaggccatctacaagcagttcgacaccgacagaagcggcaccatctgcagcagcgagctgcccggcgccttcgaggccgccggcttccacctgaacgagcacctgtacaacatgatcatcagaagatacagcgacgagagcggcaacatggacttcgacaacttcatcagctgcctggtgagactggacgccatgttcagagccttcaagagcctggacaaggacggcaccggccagatccaggtgaacatccaggagtggctgcagctgaccatgtacagctag

SEQ ID NO: 75209 - DNA, 2061 bp, synthetic construct
  misc_feature 1..2061: note = Description of Artificial Sequence: Synthetic coding sequence
  source 1..2061: mol_type = other DNA
atgaaccccaccgagaccaaggccgtgaagaccgagcccgagaagaagagccagagcaccaagctgagcgtggtgcacgagaagaagagccaggagggcaagcccaaggagcacaccgagcccaagagcctgcccaagcaggccagcgacaccggcagcaacgacgcccacaacaagaaggccgtgagcagaagcgccgagcagcagcccagcgagaagagcaccgagcccaagaccaagccccaggacatgatcagcgccggcggcgagagcgtggccggcatcaccgccatcagcggcaagcccggcgacaagaagaaggagaagaagagcctgacccccgccgtgcccgtggagagcaagcccgacaagcccagcggcaagagcggcatggacgccgccctggacgacctgatcgacaccctgggcggccccgaggagaccgaggaggagaacaccacctacaccggccccgaggtgagcgaccccatgagcagcacctacatcgaggagctgggcaagagagaggtgaccatcccccccaagtacagagagctgctggccaagaaggagggcatcaccggcccccccgccgacagcagcaagcccatcggccccgacgacgccatcgacgccctgagcagcgacttcacctgcggcagccccaccgccgccggcaagaagaccgagaaggaggagagcaccgaggtgctgaaggcccagagcgccggcaccgtgagaagcgccgcccccccccaggagaagaagagaaaggtggagaaggacaccatgagcgaccaggccctggaggccctgagcgccagcctgggcaccagacaggccgagcccgagctggacctgagaagcatcaaggaggtggacgaggccaaggccaaggaggagaagctggagaagtgcggcgaggacgacgagaccatccccagcgagtacagactgaagcccgccaccgacaaggacggcaagcccctgctgcccgagcccgaggagaagcccaagcccagaagcgagagcgagctgatcgacgagctgagcgaggacttcgacagaagcgagtgcaaggagaagcccagcaagcccaccgagaagaccgaggagagcaaggccgccgcccccgcccccgtgagcgaggccgtgtgcagaaccagcatgtgcagcatccagagcgccccccccgagcccgccaccctgaagggcaccgtgcccgacgacgccgtggaggccctggccgacagcctgggcaagaaggaggccgaccccgaggacggcaagcccgtgatggacaaggtgaaggagaaggccaaggaggaggacagagagaagctgggcgagaaggaggagaccatcccccccgactacagactggaggaggtgaaggacaaggacggcaagcccctgctgcccaaggagagcaaggagcagctgccccccatgagcgaggacttcctgctggacgccctgagcgaggacttcagcggcccccagaacgccagcagcctgaagttcgaggacgccaagctggccgccgccatcagcgaggtggtgagccagacccccgccagcaccacccaggccggcgccccccccagagacaccagccagagcgacaaggacctggacgacgccctggacaagctgagcgacagcctgggccagagacagcccgaccccgacgagaacaagcccatggaggacaaggtgaaggagaaggccaaggccgagcacagagacaagctgggcgagagagacgacaccatcccccccgagtacagacacctgctggacgacaacggccaggacaagcccgtgaagccccccaccaagaagagcgaggacagcaagaagcccgccgacgaccaggaccccatcgacgccctgagcggcgacctggacagctgccccagcaccaccgagaccagccagaacaccgccaaggacaagtgcaagaaggccgccagcagcagcaaggcccccaagaacggcggcaaggccaaggacagcgccaagaccaccgaggagaccagcaagcccaaggacgactag

SEQ ID NO: 75210 - DNA, 2271 bp, synthetic construct
  misc_feature 1..2271: note = Description of Artificial Sequence: Synthetic coding sequence
  source 1..2271: mol_type = other DNA
atgagccagcccggccagaagcccgccgccagccccagacccagaagagccgccgccgccagaagaacccacgagcacgtgagcgagaagaccagcgagagccccagcaagcccggcgagaagaagggcagcgacgagaagaaggccgccagcctgggcagcagccagagcagcagaacctacgccggcggcaccgccagcgccaccaaggtgagcgccagcagcggcgccaccagcaagagcagcagcatgaaccccaccgagaccaaggccgtgaagaccgagcccgagaagaagagccagagcaccaagctgagcgtggtgcacgagaagaagagccaggagggcaagcccaaggagcacaccgagcccaagagcctgcccaagcaggccagcgacaccggcagcaacgacgcccacaacaagaaggccgtgagcagaagcgccgagcagcagcccagcgagaagagcaccgagcccaagaccaagccccaggacatgatcagcgccggcggcgagagcgtggccggcatcaccgccatcagcggcaagcccggcgacaagaagaaggagaagaagagcctgacccccgccgtgcccgtggagagcaagcccgacaagcccagcggcaagagcggcatggacgccgccctggacgacctgatcgacaccctgggcggccccgaggagaccgaggaggagaacaccacctacaccggccccgaggtgagcgaccccatgagcagcacctacatcgaggagctgggcaagagagaggtgaccatcccccccaagtacagagagctgctggccaagcccatcggccccgacgacgccatcgacgccctgagcagcgacttcacctgcggcagccccaccgccgccggcaagaagaccgagaaggaggagagcaccgaggtgctgaaggcccagagcgccggcaccgtgagaagcgccgcccccccccaggagaagaagagaaaggtggagaaggacaccatgagcgaccaggccctggaggccctgagcgccagcctgggcaccagacaggccgagcccgagctggacctgagaagcatcaaggaggtggacgaggccaaggccaaggaggagaagctggagaagtgcggcgaggacgacgagaccatccccagcgagtacagactgaagcccgccaccgacaaggacggcaagcccctgctgcccgagcccgaggagaagcccaagcccagaagcgagagcgagctgatcgacgagctgagcgaggacttcgacagaagcgagtgcaaggagaagcccagcaagcccaccgagaagaccgaggagagcaaggccgccgcccccgcccccgtgagcgaggccgtgtgcagaaccagcatgtgcagcatccagagcgccccccccgagcccgccaccctgaagggcaccgtgcccgacgacgccgtggaggccctggccgacagcctgggcaagaaggaggccgaccccgaggacggcaagcccgtgatggacaaggtgaaggagaaggccaaggaggaggacagagagaagctgggcgagaaggaggagaccatcccccccgactacagactggaggaggtgaaggacaaggacggcaagcccctgctgcccaaggagagcaaggagcagctgccccccatgagcgaggacttcctgctggacgccctgagcgaggacttcagcggcccccagaacgccagcagcctgaagttcgaggacgccaagctggccgccgccatcagcgaggtggtgagccagacccccgccagcaccacccaggccggcgccccccccagagacaccagccagagcgacaaggacctggacgacgccctggacaagctgagcgacagcctgggccagagacagcccgaccccgacgagaacaagcccatggaggacaaggtgaaggagaaggccaaggccgagcacagagacaagctgggcgagagagacgacaccatcccccccgagtacagacacctgctggacgacaacggccaggacaagcccgtgaagccccccaccaagaagagcgaggacagcaagaagcccgccgacgaccaggaccccatcgacgccctgagcggcgacctggacagctgccccagcaccaccgagaccagccagaacaccgccaaggacaagtgcaagaaggccgccagcagcagcaaggcccccaagaacggcggcaaggccaaggacagcgccaagaccaccgaggagaccagcaagcccaaggacgactag

SEQ ID NO: 75211 - DNA, 2088 bp, synthetic construct
  misc_feature 1..2088: note = Description of Artificial Sequence: Synthetic coding sequence
  source 1..2088: mol_type = other DNA
atgaaccccaccgagaccaaggccatccccgtgagccagcagatggagggcccccacctgcccaacaagaagaagcacaagaagcaggccgtgaagaccgagcccgagaagaagagccagagcaccaagctgagcgtggtgcacgagaagaagagccaggagggcaagcccaaggagcacaccgagcccaagagcctgcccaagcaggccagcgacaccggcagcaacgacgcccacaacaagaaggccgtgagcagaagcgccgagcagcagcccagcgagaagagcaccgagcccaagaccaagccccaggacatgatcagcgccggcggcgagagcgtggccggcatcaccgccatcagcggcaagcccggcgacaagaagaaggagaagaagagcctgacccccgccgtgcccgtggagagcaagcccgacaagcccagcggcaagagcggcatggacgccgccctggacgacctgatcgacaccctgggcggccccgaggagaccgaggaggagaacaccacctacaccggccccgaggtgagcgaccccatgagcagcacctacatcgaggagctgggcaagagagaggtgaccatcccccccaagtacagagagctgctggccaagcccatcggccccgacgacgccatcgacgccctgagcagcgacttcacctgcggcagccccaccgccgccggcaagaagaccgagaaggaggagagcaccgaggtgctgaaggcccagagcgccggcaccgtgagaagcgccgcccccccccaggagaagaagagaaaggtggagaaggacaccatgagcgaccaggccctggaggccctgagcgccagcctgggcaccagacaggccgagcccgagctggacctgagaagcatcaaggaggtggacgaggccaaggccaaggaggagaagctggagaagtgcggcgaggacgacgagaccatccccagcgagtacagactgaagcccgccaccgacaaggacggcaagcccctgctgcccgagcccgaggagaagcccaagcccagaagcgagagcgagctgatcgacgagctgagcgaggacttcgacagaagcgagtgcaaggagaagcccagcaagcccaccgagaagaccgaggagagcaaggccgccgcccccgcccccgtgagcgaggccgtgtgcagaaccagcatgtgcagcatccagagcgccccccccgagcccgccaccctgaagggcaccgtgcccgacgacgccgtggaggccctggccgacagcctgggcaagaaggaggccgaccccgaggacggcaagcccgtgatggacaaggtgaaggagaaggccaaggaggaggacagagagaagctgggcgagaaggaggagaccatcccccccgactacagactggaggaggtgaaggacaaggacggcaagcccctgctgcccaaggagagcaaggagcagctgccccccatgagcgaggacttcctgctggacgccctgagcgaggacttcagcggcccccagaacgccagcagcctgaagttcgaggacgccaagctggccgccgccatcagcgaggtggtgagccagacccccgccagcaccacccaggccggcgccccccccagagacaccagccagagcgacaaggacctggacgacgccctggacaagctgagcgacagcctgggccagagacagcccgaccccgacgagaacaagcccatggaggacaaggtgaaggagaaggccaaggccgagcacagagacaagctgggcgagagagacgacaccatcccccccgagtacagacacctgctggacgacaacggccaggacaagcccgtgaagccccccaccaagaagagcgaggacagcaagaagcccgccgacgaccaggaccccatcgacgccctgagcggcgacctggacagctgccccagcaccaccgagaccagccagaacaccgccaaggacaagtgcaagaaggccgccagcagcagcaaggcccccaagaacggcggcaaggccaaggacagcgccaagaccaccgaggagaccagcaagcccaaggacgactag

SEQ ID NO: 75212 - DNA, 2127 bp, synthetic construct
  misc_feature 1..2127: note = Description of Artificial Sequence: Synthetic coding sequence
  source 1..2127: mol_type = other DNA
atgaaccccaccgagaccaaggccatccccgtgagccagcagatggagggcccccacctgcccaacaagaagaagcacaagaagcaggccgtgaagaccgagcccgagaagaagagccagagcaccaagctgagcgtggtgcacgagaagaagagccaggagggcaagcccaaggagcacaccgagcccaagagcctgcccaagcaggccagcgacaccggcagcaacgacgcccacaacaagaaggccgtgagcagaagcgccgagcagcagcccagcgagaagagcaccgagcccaagaccaagccccaggacatgatcagcgccggcggcgagagcgtggccggcatcaccgccatcagcggcaagcccggcgacaagaagaaggagaagaagagcctgacccccgccgtgcccgtggagagcaagcccgacaagcccagcggcaagagcggcatggacgccgccctggacgacctgatcgacaccctgggcggccccgaggagaccgaggaggagaacaccacctacaccggccccgaggtgagcgaccccatgagcagcacctacatcgaggagctgggcaagagagaggtgaccatcccccccaagtacagagagctgctggccaagaaggagggcatcaccggcccccccgccgacagcagcaagcccatcggccccgacgacgccatcgacgccctgagcagcgacttcacctgcggcagccccaccgccgccggcaagaagaccgagaaggaggagagcaccgaggtgctgaaggcccagagcgccggcaccgtgagaagcgccgcccccccccaggagaagaagagaaaggtggagaaggacaccatgagcgaccaggccctggaggccctgagcgccagcctgggcaccagacaggccgagcccgagctggacctgagaagcatcaaggaggtggacgaggccaaggccaaggaggagaagctggagaagtgcggcgaggacgacgagaccatccccagcgagtacagactgaagcccgccaccgacaaggacggcaagcccctgctgcccgagcccgaggagaagcccaagcccagaagcgagagcgagctgatcgacgagctgagcgaggacttcgacagaagcgagtgcaaggagaagcccagcaagcccaccgagaagaccgaggagagcaaggccgccgcccccgcccccgtgagcgaggccgtgtgcagaaccagcatgtgcagcatccagagcgccccccccgagcccgccaccctgaagggcaccgtgcccgacgacgccgtggaggccctggccgacagcctgggcaagaaggaggccgaccccgaggacggcaagcccgtgatggacaaggtgaaggagaaggccaaggaggaggacagagagaagctgggcgagaaggaggagaccatcccccccgactacagactggaggaggtgaaggacaaggacggcaagcccctgctgcccaaggagagcaaggagcagctgccccccatgagcgaggacttcctgctggacgccctgagcgaggacttcagcggcccccagaacgccagcagcctgaagttcgaggacgccaagctggccgccgccatcagcgaggtggtgagccagacccccgccagcaccacccaggccggcgccccccccagagacaccagccagagcgacaaggacctggacgacgccctggacaagctgagcgacagcctgggccagagacagcccgaccccgacgagaacaagcccatggaggacaaggtgaaggagaaggccaaggccgagcacagagacaagctgggcgagagagacgacaccatcccccccgagtacagacacctgctggacgacaacggccaggacaagcccgtgaagccccccaccaagaagagcgaggacagcaagaagcccgccgacgaccaggaccccatcgacgccctgagcggcgacctggacagctgccccagcaccaccgagaccagccagaacaccgccaaggacaagtgcaagaaggccgccagcagcagcaaggcccccaagaacggcggcaaggccaaggacagcgccaagaccaccgaggagaccagcaagcccaaggacgactag

SEQ ID NO: 75213 - DNA, 2319 bp, synthetic construct
  misc_feature 1..2319: note = Description of Artificial Sequence: Synthetic coding sequence
  source 1..2319: mol_type = other DNA
atgagccagcccggccagaagcccgccgccagccccagacccagaagagccgccgccgccagaagaacccacgagcacgtgagcgagaagaccagcgagagccccagcaagcccggcgagaagaagggcagcgacgagaagaaggccgccagcctgggcagcagccagagcagcagaacctacgccggcggcaccgccagcgccaccaaggtgagcgccagcagcggcgccaccagcaagagcagcagcatgaaccccaccgagaccaaggccatccccgtgagccagcagatggagggcccccacctgcccaacaagaagaagcacaagaagcaggccgtgaagaccgagcccgagaagaagagccagagcaccaagcccaagagcctgcccaagcaggccagcgacaccggcagcaacgacgcccacaacaagaaggccgtgagcagaagcgccgagcagcagcccagcgagaagagcaccgagcccaagaccaagccccaggacatgatcagcgccggcggcgagagcgtggccggcatcaccgccatcagcggcaagcccggcgacaagaagaaggagaagaagagcctgacccccgccgtgcccgtggagagcaagcccgacaagcccagcggcaagagcggcatggacgccgccctggacgacctgatcgacaccctgggcggccccgaggagaccgaggaggagaacaccacctacaccggccccgaggtgagcgaccccatgagcagcacctacatcgaggagctgggcaagagagaggtgaccatcccccccaagtacagagagctgctggccaagaaggagggcatcaccggcccccccgccgacagcagcaagcccatcggccccgacgacgccatcgacgccctgagcagcgacttcacctgcggcagccccaccgccgccggcaagaagaccgagaaggaggagagcaccgaggtgctgaaggcccagagcgccggcaccgtgagaagcgccgcccccccccaggagaagaagagaaaggtggagaaggacaccatgagcgaccaggccctggaggccctgagcgccagcctgggcaccagacaggccgagcccgagctggacctgagaagcatcaaggaggtggacgaggccaaggccaaggaggagaagctggagaagtgcggcgaggacgacgagaccatccccagcgagtacagactgaagcccgccaccgacaaggacggcaagcccctgctgcccgagcccgaggagaagcccaagcccagaagcgagagcgagctgatcgacgagctgagcgaggacttcgacagaagcgagtgcaaggagaagcccagcaagcccaccgagaagaccgaggagagcaaggccgccgcccccgcccccgtgagcgaggccgtgtgcagaaccagcatgtgcagcatccagagcgccccccccgagcccgccaccctgaagggcaccgtgcccgacgacgccgtggaggccctggccgacagcctgggcaagaaggaggccgaccccgaggacggcaagcccgtgatggacaaggtgaaggagaaggccaaggaggaggacagagagaagctgggcgagaaggaggagaccatcccccccgactacagactggaggaggtgaaggacaaggacggcaagcccctgctgcccaaggagagcaaggagcagctgccccccatgagcgaggacttcctgctggacgccctgagcgaggacttcagcggcccccagaacgccagcagcctgaagttcgaggacgccaagctggccgccgccatcagcgaggtggtgagccagacccccgccagcaccacccaggccggcgccccccccagagacaccagccagagcgacaaggacctggacgacgccctggacaagctgagcgacagcctgggccagagacagcccgaccccgacgagaacaagcccatggaggacaaggtgaaggagaaggccaaggccgagcacagagacaagctgggcgagagagacgacaccatcccccccgagtacagacacctgctggacgacaacggccaggacaagcccgtgaagccccccaccaagaagagcgaggacagcaagaagcccgccgacgaccaggaccccatcgacgccctgagcggcgacctggacagctgccccagcaccaccgagaccagccagaacaccgccaaggacaagtgcaagaaggccgccagcagcagcaaggcccccaagaacggcggcaaggccaaggacagcgccaagaccaccgaggagaccagcaagcccaaggacgactag

SEQ ID NO: 75214 - DNA, 2376 bp, synthetic construct
  misc_feature 1..2376: note = Description of Artificial Sequence: Synthetic coding sequence
  source 1..2376: mol_type = other DNA
atgagccagcccggccagaagcccgccgccagccccagacccagaagagccgccgccgccagaagaacccacgagcacgtgagcgagaagaccagcgagagccccagcaagcccggcgagaagaagggcagcgacgagaagaaggccgccagcctgggcagcagccagagcagcagaacctacgccggcggcaccgccagcgccaccaaggtgagcgccagcagcggcgccaccagcaagagcagcagcatgaaccccaccgagaccaaggccatccccgtgagccagcagatggagggcccccacctgcccaacaagaagaagcacaagaagcaggccgtgaagaccgagcccgagaagaagagccagagcaccaagctgagcgtggtgcacgagaagaagagccaggagggcaagcccaaggagcacaccgagcccaagagcctgcccaagcaggccagcgacaccggcagcaacgacgcccacaacaagaaggccgtgagcagaagcgccgagcagcagcccagcgagaagagcaccgagcccaagaccaagccccaggacatgatcagcgccggcggcgagagcgtggccggcatcaccgccatcagcggcaagcccggcgacaagaagaaggagaagaagagcctgacccccgccgtgcccgtggagagcaagcccgacaagcccagcggcaagagcggcatggacgccgccctggacgacctgatcgacaccctgggcggccccgaggagaccgaggaggagaacaccacctacaccggccccgaggtgagcgaccccatgagcagcacctacatcgaggagctgggcaagagagaggtgaccatcccccccaagtacagagagctgctggccaagaaggagggcatcaccggcccccccgccgacagcagcaagcccatcggccccgacgacgccatcgacgccctgagcagcgacttcacctgcggcagccccaccgccgccggcaagaagaccgagaaggaggagagcaccgaggtgctgaaggcccagagcgccggcaccgtgagaagcgccgcccccccccaggagaagaagagaaaggtggagaaggacaccatgagcgaccaggccctggaggccctgagcgccagcctgggcaccagacaggccgagcccgagctggacctgagaagcatcaaggaggtggacgaggccaaggccaaggaggagaagctggagaagtgcggcgaggacgacgagaccatccccagcgagtacagactgaagcccgccaccgacaaggacggcaagcccctgctgcccgagcccgaggagaagcccaagcccagaagcgagagcgagctgatcgacgagctgagcgaggacttcgacagaagcgagtgcaaggagaagcccagcaagcccaccgagaagaccgaggagagcaaggccgccgcccccgcccccgtgagcgaggccgtgtgcagaaccagcatgtgcagcatccagagcgccccccccgagcccgccaccctgaagggcaccgtgcccgacgacgccgtggaggccctggccgacagcctgggcaagaaggaggccgaccccgaggacggcaagcccgtgatggacaaggtgaaggagaaggccaaggaggaggacagagagaagctgggcgagaaggaggagaccatcccccccgactacagactggaggaggtgaaggacaaggacggcaagcccctgctgcccaaggagagcaaggagcagctgccccccatgagcgaggacttcctgctggacgccctgagcgaggacttcagcggcccccagaacgccagcagcctgaagttcgaggacgccaagctggccgccgccatcagcgaggtggtgagccagacccccgccagcaccacccaggccggcgccccccccagagacaccagccagagcgacaaggacctggacgacgccctggacaagctgagcgacagcctgggccagagacagcccgaccccgacgagaacaagcccatggaggacaaggtgaaggagaaggccaaggccgagcacagagacaagctgggcgagagagacgacaccatcccccccgagtacagacacctgctggacgacaacggccaggacaagcccgtgaagccccccaccaagaagagcgaggacagcaagaagcccgccgacgaccaggaccccatcgacgccctgagcggcgacctggacagctgccccagcaccaccgagaccagccagaacaccgccaaggacaagtgcaagaaggccgccagcagcagcaaggcccccaagaacggcggcaaggccaaggacagcgccaagaccaccgaggagaccagcaagcccaaggacgactag

SEQ ID NO: 75215 - DNA, 2265 bp, synthetic construct
  misc_feature 1..2265: note = Description of Artificial Sequence: Synthetic coding sequence
  source 1..2265: mol_type = other DNA
atggccttcgccagctggtggtacaagacccacgtgagcgagaagaccagcgagagccccagcaagcccggcgagaagaagggcagcgacgagaagaaggccgccagcctgggcagcagccagagcagcagaacctacgccggcggcaccgccagcgccaccaaggtgagcgccagcagcggcgccaccagcaagagcagcagcatgaaccccaccgagaccaaggccgtgaagaccgagcccgagaagaagagccagagcaccaagctgagcgtggtgcacgagaagaagagccaggagggcaagcccaaggagcacaccgagcccaagagcctgcccaagcaggccagcgacaccggcagcaacgacgcccacaacaagaaggccgtgagcagaagcgccgagcagcagcccagcgagaagagcaccgagcccaagaccaagccccaggacatgatcagcgccggcggcgagagcgtggccggcatcaccgccatcagcggcaagcccggcgacaagaagaaggagaagaagagcctgacccccgccgtgcccgtggagagcaagcccgacaagcccagcggcaagagcggcatggacgccgccctggacgacctgatcgacaccctgggcggccccgaggagaccgaggaggagaacaccacctacaccggccccgaggtgagcgaccccatgagcagcacctacatcgaggagctgggcaagagagaggtgaccatcccccccaagtacagagagctgctggccaagaaggagggcatcaccggcccccccgccgacagcagcaagcccatcggccccgacgacgccatcgacgccctgagcagcgacttcacctgcggcagccccaccgccgccggcaagaagaccgagaaggaggagagcaccgaggtgctgaaggcccagagcgccggcaccgtgagaagcgccgcccccccccaggagaagaagagaaaggtggagaaggacaccatgagcgaccaggccctggaggccctgagcgccagcctgggcaccagacaggccgagcccgagctggacctgagaagcatcaaggaggtggacgaggccaaggccaaggaggagaagctggagaagtgcggcgaggacgacgagaccatccccagcgagtacagactgaagcccgccaccgacaaggacggcaagcccctgctgcccgagcccgaggagaagcccaagcccagaagcgagagcgagctgatcgacgagctgagcgaggacttcgacagaagcgagtgcaaggagaagcccagcaagcccaccgagaagaccgaggagagcaaggccgccgcccccgcccccgtgagcgaggccgtgtgcagaaccagcatgtgcagcatccagagcgccccccccgagcccgccaccctgaagggcaccgtgcccgacgacgccgtggaggccctggccgacagcctgggcaagaaggaggccgaccccgaggacggcaagcccgtgatggacaaggtgaaggagaaggccaaggaggaggacagagagaagctgggcgagaaggaggagaccatcccccccgactacagactggaggaggtgaaggacaaggacggcaagcccctgctgcccaaggagagcaaggagcagctgccccccatgagcgaggacttcctgctggacgccctgagcgaggacttcagcggcccccagaacgccagcagcctgaagttcgaggacgccaagctggccgccgccatcagcgaggtggtgagccagacccccgccagcaccacccaggccggcgccccccccagagacaccagccagagcgacaaggacctggacgacgccctggacaagctgagcgacagcctgggccagagacagcccgaccccgacgagaacaagcccatggaggacaaggtgaaggagaaggccaaggccgagcacagagacaagctgggcgagagagacgacaccatcccccccgagtacagacacctgctggacgacaacggccaggacaagcccgtgaagccccccaccaagaagagcgaggacagcaagaagcccgccgacgaccaggaccccatcgacgccctgagcggcgacctggacagctgccccagcaccaccgagaccagccagaacaccgccaaggacaagtgcaagaaggccgccagcagcagcaaggcccccaagaacggcggcaaggccaaggacagcgccaagaccaccgaggagaccagcaagcccaaggacgactag

SEQ ID NO: 75216 - DNA, 2376 bp, synthetic construct; identical to SEQ ID NO: 75214
  misc_feature 1..2376: note = Description of Artificial Sequence: Synthetic coding sequence
  source 1..2376: mol_type = other DNA

SEQ ID NO: 75217 - DNA, 1929 bp, synthetic construct
  misc_feature 1..1929: note = Description of Artificial Sequence: Synthetic coding sequence
  source 1..1929: mol_type = other DNA
atgaaccccaccgagaccaaggccatccccgtgagccagcagatggagggcccccacctgcccaacaagaagaagcacaagaagcaggccgtgaagaccgagcccgagaagaagagccagagcaccaagctgagcgtggtgcacgagaagaagagccaggagggcaagcccaaggagcacaccgagcccaagagcctgcccaagcaggccagcgacaccggcagcaacgacgcccacaacaagaaggccgtgagcagaagcgccgagcagcagcccagcgagaagagcaccgagcccaagaccaagccccaggacatgatcagcgccggcggcgagagcgtggccggcatcaccgccatcagcggcaagcccggcgacaagaagaaggagaagaagagcctgacccccgccgtgcccgtggagagcaagcccgacaagcccagcggcaagagcggcatggacgccgccctggacgacctgatcgacaccctgggcggccccgaggagaccgaggaggagaacaccacctacaccggccccgaggtgagcgaccccatgagcagcacctacatcgaggagctgggcaagagagaggtgaccatcccccccaagtacagagagctgctggccaagaaggagggcatcaccggcccccccgccgacagcagcaagcccatcggccccgacgacgccatcgacgccctgagcagcgacttcacctgcggcagccccaccgccgccggcaagaagaccgagaaggaggagagcaccgaggtgctgaaggcccagagcgccggcaccgtgagaagcgccgcccccccccaggagaagaagagaaaggtggagaaggacaccatgagcgaccaggccctggaggccctgagcgccagcctgggcaccagacaggccgagcccgagctggacctgagaagcatcaaggaggtggacgaggccaaggccaaggaggagaagctggagaagtgcggcgaggacgacgagaccatccccagcgagtacagactgaagcccgccaccgacaaggacggcaagcccctgctgcccgagcccgaggagaagcccaagcccagaagcgagagcgagctgatcgacgagctgagcgaggacttcgacagaagcgagtgcaaggagaagcccagcaagcccaccgagaagaccgaggagagcaaggccgccgcccccgcccccgtgagcgaggccgtgtgcagaaccagcatgtgcagcatccagagcgccccccccgagcccgccaccctgaagggcaccgtgcccgacgacgccgtggaggccctggccgacagcctgggcaagaaggaggccgaccccgaggacggcaagcccgtgatggacaaggtgaaggagaaggccaaggaggaggacagagagaagctgggcgagaaggaggagaccatcccccccgactacagactggaggaggtgaaggacaaggacggcaagcccctgctgcccaaggagagcaaggagcagctgccccccatgagcgaggacttcctgctggacgccctgagcgaggacttcagcggcccccagaacgccagcagcctgaagttcgaggacgccaagctggccgccgccatcagcgaggtggtgagccagacccccgccagcaccacccaggccggcgccccccccagagacaccagccagagcgacaaggacctggacgacgccctggacaagctgagcgacagcctgggccagagacagcccgaccccgacgagaacaagcccatggaggacaaggtgaaggagaaggccaaggccgagcacagagacaagctgggcgagagagacgacaccatcccccccgagtacagacacctgctggacgacaacggccaggacaagcccgtgaagccccccaccaagaagagcgaggacagcaagtag

SEQ ID NO: 75218 - DNA, 2085 bp, synthetic construct
  misc_feature 1..2085: note = Description of Artificial Sequence: Synthetic coding sequence
  source 1..2085: mol_type = other DNA
atggagggcccccacctgcccaacaagaagaagcacaagaagcaggccgtgaagaccgagcccgagaagaagagccagagcaccaagctgagcgtggtgcacgagaagaagagccaggagggcaagcccaaggagcacaccgagcccaagagcctgcccaagcaggccagcgacaccggcagcaacgacgcccacaacaagaaggccgtgagcagaagcgccgagcagcagcccagcgagaagagcaccgagcccaagaccaagccccaggacatgatcagcgccggcggcgagagcgtggccggcatcaccgccatcagcggcaagcccggcgacaagaagaaggagaagaagagcctgacccccgccgtgcccgtggagagcaagcccgacaagcccagcggcaagagcggcatggacgccgccctggacgacctgatcgacaccctgggcggccccgaggagaccgaggaggagaacaccacctacaccggccccgaggtgagcgaccccatgagcagcacctacatcgaggagctgggcaagagagaggtgaccatcccccccaagtacagagagctgctggccaagaaggagggcatcaccggcccccccgccgacagcagcaagcccatcggccccgacgacgccatcgacgccctgagcagcgacttcacctgcggcagccccaccgccgccggcaagaagaccgagaaggaggagagcaccgaggtgctgaaggcccagagcgccggcaccgtgagaagcgccgcccccccccaggagaagaagagaaaggtggagaaggacaccatgagcgaccaggccctggaggccctgagcgccagcctgggcaccagacaggccgagcccgagctggacctgagaagcatcaaggaggtggacgaggccaaggccaaggaggagaagctggagaagtgcggcgaggacgacgagaccatccccagcgagtacagactgaagcccgccaccgacaaggacggcaagcccctgctgcccgagcccgaggagaagcccaagcccagaagcgagagcgagctgatcgacgagctgagcgaggacttcgacagaagcgagtgcaaggagaagcccagcaagcccaccgagaagaccgaggagagcaaggccgccgcccccgcccccgtgagcgaggccgtgtgcagaaccagcatgtgcagcatccagagcgccccccccgagcccgccaccctgaagggcaccgtgcccgacgacgccgtggaggccctggccgacagcctgggcaagaaggaggccgaccccgaggacggcaagcccgtgatggacaaggtgaaggagaaggccaaggaggaggacagagagaagctgggcgagaaggaggagaccatcccccccgactacagactggaggaggtgaaggacaaggacggcaagcccctgctgcccaaggagagcaaggagcagctgccccccatgagcgaggacttcctgctggacgccctgagcgaggacttcagcggcccccagaacgccagcagcctgaagttcgaggacgccaagctggccgccgccatcagcgaggtggtgagccagacccccgccagcaccacccaggccggcgccccccccagagacaccagccagagcgacaaggacctggacgacgccctggacaagctgagcgacagcctgggccagagacagcccgaccccgacgagaacaagcccatggaggacaaggtgaaggagaaggccaaggccgagcacagagacaagctgggcgagagagacgacaccatcccccccgagtacagacacctgctggacgacaacggccaggacaagcccgtgaagccccccaccaagaagagcgaggacagcaagaagcccgccgacgaccaggaccccatcgacgccctgagcggcgacctggacagctgccccagcaccaccgagaccagccagaacaccgccaaggacaagtgcaagaaggccgccagcagcagcaaggcccccaagaacggcggcaaggccaaggacagcgccaagaccaccgaggagaccagcaagcccaaggacgactag

SEQ ID NO: 75219 - DNA, 2253 bp, synthetic construct
  misc_feature 1..2253: note = Description of Artificial Sequence: Synthetic coding sequence
  source 1..2253: mol_type = other DNA
atgagccagcccggccagaagcccgccgccagccccagacccagaagagccgccgccgccagaagaacccacgagcacgtgagcgagaagaccagcgagagccccagcaagcccggcgagaagaagggcagcgacgagaagaaggccgccagcctgggcagcagccagagcagcagaacctacgccggcggcaccgccagcgccaccaaggtgagcgccagcagcggcgccaccagcaagagcagcagcatgaaccccaccgagaccaaggccgtgaagaccgagcccgagaagaagagccagagcaccaagcccaagagcctgcccaagcaggccagcgacaccggcagcaacgacgcccacaacaagaaggccgtgagcagaagcgccgagcagcagcccagcgagaagagcaccgagcccaagaccaagccccaggacatgatcagcgccggcggcgagagcgtggccggcatcaccgccatcagcggcaagcccggcgacaagaagaaggagaagaagagcctgacccccgccgtgcccgtggagagcaagcccgacaagcccagcggcaagagcggcatggacgccgccctggacgacctgatcgacaccctgggcggccccgaggagaccgaggaggagaacaccacctacaccggccccgaggtgagcgaccccatgagcagcacctacatcgaggagctgggcaagagagaggtgaccatcccccccaagtacagagagctgctggccaagaaggagggcatcaccggcccccccgccgacagcagcaagcccatcggccccgacgacgccatcgacgccctgagcagcgacttcacctgcggcagccccaccgccgccggcaagaagaccgagaaggaggagagcaccgaggtgctgaaggcccagagcgccggcaccgtgagaagcgccgcccccccccaggagaagaagagaaaggtggagaaggacaccatgagcgaccaggccctggaggccctgagcgccagcctgggcaccagacaggccgagcccgagctggacctgagaagcatcaaggaggtggacgaggccaaggccaaggaggagaagctggagaagtgcggcgaggacgacgagaccatccccagcgagtacagactgaagcccgccaccgacaaggacggcaagcccctgctgcccgagcccgaggagaagcccaagcccagaagcgagagcgagctgatcgacgagctgagcgaggacttcgacagaagcgagtgcaaggagaagcccagcaagcccaccgagaagaccgaggagagcaaggccgccgcccccgcccccgtgagcgaggccgtgtgcagaaccagcatgtgcagcatccagagcgccccccccgagcccgccaccctgaagggcaccgtgcccgacgacgccgtggaggccctggccgacagcctgggcaagaaggaggccgaccccgaggacggcaagcccgtgatggacaaggtgaaggagaaggccaaggaggaggacagagagaagctgggcgagaaggaggagaccatcccccccgactacagactggaggaggtgaaggacaaggacggcaagcccctgctgcccaaggagagcaaggagcagctgccccccatgagcgaggacttcctgctggacgccctgagcgaggacttcagcggcccccagaacgccagcagcctgaagttcgaggacgccaagctggccgccgccatcagcgaggtggtgagccagacccccgccagcaccacccaggccggcgccccccccagagacaccagccagagcgacaaggacctggacgacgccctggacaagctgagcgacagcctgggccagagacagcccgaccccgacgagaacaagcccatggaggacaaggtgaaggagaaggccaaggccgagcacagagacaagctgggcgagagagacgacaccatcccccccgagtacagacacctgctggacgacaacggccaggacaagcccgtgaagccccccaccaagaagagcgaggacagcaagaagcccgccgacgaccaggaccccatcgacgccctgagcggcgacctggacagctgccccagcaccaccgagaccagccagaacaccgccaaggacaagtgcaagaaggccgccagcagcagcaaggcccccaagaacggcggcaaggccaaggacagcgccaagaccaccgaggagaccagcaagcccaaggacgactag

SEQ ID NO: 75220 - DNA, 1254 bp, synthetic construct
  misc_feature 1..1254: note = Description of Artificial Sequence: Synthetic coding sequence
  source 1..1254: mol_type = other DNA
atgctgctgagcgtgcccctgctgctgggcctgctgggcctggccgtggccgagcccgccgtgtacttcaaggagcagttcctggacggcgacggctggaccagcagatggatcgagagcaagcacaagagcgacttcggcaagttcgtgctgagcagcggcaagttctacggcgacgaggagaaggacaagggcctgcagaccagccaggacgccagattctacgccctgagcgccagcttcgagcccttcagcaacaagggccagaccctggtggtgcagttcaccgtgaagcacgagcagaacatcgactgcggcggcggctacgtgaagctgttccccaacagcctggaccagaccgacatgcacggcgacagcgagtacaacatcatgttcggccccgacatctgcggccccggcaccaagaaggtgcacgtgatcttcaactacaagggcaagaacgtgctgatcaacaaggacatcagatgcaaggacgacgagttcacccacctgtacaccctgatcgtgagacccgacaacacctacgaggtgaagatcgacaacagccaggtggagagcggcagcctggaggacgactgggacttcctgccccccaagaagatcaaggaccccgacgccagcaagcccgaggactgggacgagagagccaagatcgacgaccccaccgacagcaagcccgaggactgggacaagcccgagcacatccccgaccccgacgccaagaagcccgaggactgggacgaggagatggacggcgagtgggagccccccgtgatccagaaccccgagtacaagggcgagtggaagcccagacagatcgacaaccccgactacaagggcacctggatccaccccgagatcgacaaccccgagtacagccccgaccccagcatctacgcctacgacaacttcggcgtgctgggcctggacctgtggcaggtgaagagcggcaccatcttcgacaacttcctgatcaccaacgacgaggcctacgccgaggagttcggcaacgagacctggggcgtgaccaaggccgccgagaagcagatgaaggacaagcaggacgaggagcagagactgaaggaggaggaggaggacaagaagagaaaggaggaggaggaggccgaggacaaggaggacgacgaggacaaggacgaggacgaggaggacgaggaggacaaggaggaggacgaggaggaggacgtgcccggccaggccaaggacgagctgtag

SEQ ID NO: 75221 - DNA, 891 bp, synthetic construct
  misc_feature 1..891: note = Description of Artificial Sequence: Synthetic coding sequence
  source 1..891: mol_type = other DNA
atgcacggcgacagcgagtacaacatcatgttcggccccgacatctgcggccccggcaccaagaaggtgcacgtgatcttcaactacaagggcaagaacgtgctgatcaacaaggacatcagatgcaaggacgacgagttcacccacctgtacaccctgatcgtgagacccgacaacacctacgaggtgaagatcgacaacagccaggtggagagcggcagcctggaggacgactgggacttcctgccccccaagaagatcaaggaccccgacgccagcaagcccgaggactgggacgagagagccaagatcgacgaccccaccgacagcaagcccgaggactgggacaagcccgagcacatccccgaccccgacgccaagaagcccgaggactgggacgaggagatggacggcgagtgggagccccccgtgatccagaaccccgagtacaagggcgagtggaagcccagacagatcgacaaccccgactacaagggcacctggatccaccccgagatcgacaaccccgagtacagccccgaccccagcatctacgcctacgacaacttcggcgtgctgggcctggacctgtggcaggtgaagagcggcaccatcttcgacaacttcctgatcaccaacgacgaggcctacgccgaggagttcggcaacgagacctggggcgtgaccaaggccgccgagaagcagatgaaggacaagcaggacgaggagcagagactgaaggaggaggaggaggacaagaagagaaaggaggaggaggaggccgaggacaaggaggacgacgaggacaaggacgaggacgaggaggacgaggaggacaaggaggaggacgaggaggaggacgtgcccggccaggccaaggacgagctgtag

SEQ ID NO: 75222 - DNA, 1155 bp, synthetic construct
  misc_feature 1..1155: note = Description of Artificial Sequence: Synthetic coding sequence
  source 1..1155: mol_type = other DNA
atggccagagccctggtgcagctgtgggccatctgcatgctgagagtggccctggccaccgtgtacttccaggaggagttcctggacggcgagcactggagaaacagatggctgcagagcaccaacgacagcagattcggccacttcagactgagcagcggcaagttctacggccacaaggagaaggacaagggcctgcagaccacccagaacggcagattctacgccatcagcgccagattcaagcccttcagcaacaagggcaagaccctggtgatccagtacaccgtgaagcacgagcagaagatggactgcggcggcggctacatcaaggtgttccccgccgacatcgaccagaagaacctgaacggcaagagccagtactacatcatgttcggccccgacatctgcggcttcgacatcaagaaggtgcacgtgatcctgcacttcaagaacaagtaccacgagaacaagaagctgatcagatgcaaggtggacggcttcacccacctgtacaccctgatcctgagacccgacctgagctacgacgtgaagatcgacggccagagcatcgagagcggcagcatcgagtacgactggaacctgaccagcctgaagaaggagaccagccccgccgagagcaaggactgggagcagaccaaggacaacaaggcccaggactgggagaagcacttcctggacgccagcaccagcaagcagagcgactggaacggcgacctggacggcgactggcccgcccccatgctgcagaagcccccctaccaggacggcctgaagcccgagggcatccacaaggacgtgtggctgcacagaaagatgaagaacaccgactacctgacccagtacgacctgagcgagttcgagaacatcggcgccatcggcctggagctgtggcaggtgagaagcggcaccatcttcgacaacttcctgatcaccgacgacgaggagtacgccgacaacttcggcaaggccacctggggcgagaccaagggccccgagagagagatggacgccatccaggccaaggaggagatgaagaaggccagagaggaggaggaggaggagctgctgagcggcaagatcaacagacacgagcactacttcaaccagttccacagaagaaacgagctgtag

SEQ ID NO: 75223 - DNA, 1191 bp, synthetic construct
  misc_feature 1..1191: note = Description of Artificial Sequence: Synthetic coding sequence
  source 1..1191: mol_type = other DNA
atgagcgccaccgacagaatgggccccagagccgtgcccggcctgagactggccctgctgctgctgctggtgctgggcacccccaagagcggcgtgcagggccaggagggcctggacttccccgagtacgacggcgtggacagagtgatcaacgtgaacgccaagaactacaagaacgtgttcaagaagtacgaggtgctggccctgctgtaccacgagccccccgaggacgacaaggccagccagagacagttcgagatggaggagctgatcctggagctggccgcccaggtgctggaggacaagggcgtgggcttcggcctggtggacagcgagaaggacgccgccgtggccaagaagctgggcctgaccgaggtggacagcatgtacgtgttcaagggcgacgaggtgatcgagtacgacggcgagttcagcgccgacaccatcgtggagttcctgctggacgtgctggaggaccccgtggagctgatcgagggcgagagagagctgcaggccttcgagaacatcgaggacgagatcaagctgatcggctacttcaagagcaaggacagcgagcactacaaggccttcgaggacgccgccgaggagttccacccctacatccccttcttcgccaccttcgacagcaaggtggccaagaagctgaccctgaagctgaacgagatcgacttctacgaggccttcatggaggagcccgtgaccatccccgacaagcccaacagcgaggaggagatcgtgaacttcgtggaggagcacagaagaagcaccctgagaaagctgaagcccgagagcatgtacgagacctgggaggacgacatggacggcatccacatcgtggccttcgccgaggaggccgaccccgacggcttcgagttcctggagaccctgaaggccgtggcccaggacaacaccgagaaccccgacctgagcatcatctggatcgaccccgacgacttccccctgctggtgccctactgggagaagaccttcgacatcgacctgagcgccccccagatcggcgtggtgaacgtgaccgacgccgacagcgtgtggatggagatggacgacgaggaggacctgcccagcgccgaggagctggaggactggctggaggacgtgctggagggcgagatcaacaccgaggacgacgacgacgacgacgacgactag

SEQ ID NO: 75224 - DNA, 1173 bp, synthetic construct
  misc_feature 1..1173: note = Description of Artificial Sequence: Synthetic coding sequence
  source 1..1173: mol_type = other DNA
atgggccccagagccgtgcccggcctgagactggccctgctgctgctgctggtgctgggcacccccaagagcggcgtgcagggccaggagggcctggacttccccgagtacgacggcgtggacagagtgatcaacgtgaacgccaagaactacaagaacgtgttcaagaagtacgaggtgctggccctgctgtaccacgagccccccgaggacgacaaggccagccagagacagttcgagatggaggagctgatcctggagctggccgcccaggtgctggaggacaagggcgtgggcttcggcctggtggacagcgagaaggacgccgccgtggccaagaagctgggcctgaccgaggtggacagcatgtacgtgttcaagggcgacgaggtgatcgagtacgacggcgagttcagcgccgacaccatcgtggagttcctgctggacgtgctggaggaccccgtggagctgatcgagggcgagagagagctgcaggccttcgagaacatcgaggacgagatcaagctgatcggctacttcaagagcaaggacagcgagcactacaaggccttcgaggacgccgccgaggagttccacccctacatccccttcttcgccaccttcgacagcaaggtggccaagaagctgaccctgaagctgaacgagatcgacttctacgaggccttcatggaggagcccgtgaccatccccgacaagcccaacagcgaggaggagatcgtgaacttcgtggaggagcacagaagaagcaccctgagaaagctgaagcccgagagcatgtacgagacctgggaggacgacatggacggcatccacatcgtggccttcgccgaggaggccgaccccgacggcttcgagttcctggagaccctgaaggccgtggcccaggacaacaccgagaaccccgacctgagcatcatctggatcgaccccgacgacttccccctgctggtgccctactgggagaagaccttcgacatcgacctgagcgccccccagatcggcgtggtgaacgtgaccgacgccgacagcgtgtggatggagatggacgacgaggaggacctgcccagcgccgaggagctggaggactggctggaggacgtgctggagggcgagatcaacaccgaggacgacgacgacgacgacgacgactag

SEQ ID NO: 75225 - DNA, 936 bp, synthetic construct
  misc_feature 1..936: note = Description of Artificial Sequence: Synthetic coding sequence
  source 1..936: mol_type = other DNA
atgagcatgcagagaaccaccagaatgtgcagcagaagcatgagatgctggcacagcagcaccatgaacccccccagaatgaccagaccccacaaggacaacagcctgggcctgaccgaggtggacagcatgtacgtgttcaagggcgacgaggtgatcgagtacgacggcgagttcagcgccgacaccatcgtggagttcctgctggacgtgctggaggaccccgtggagctgatcgagggcgagagagagctgcaggccttcgagaacatcgaggacgagatcaagctgatcggctacttcaagagcaaggacagcgagcactacaaggccttcgaggacgccgccgaggagttccacccctacatccccttcttcgccaccttcgacagcaaggtggccaagaagctgaccctgaagctgaacgagatcgacttctacgaggccttcatggaggagcccgtgaccatccccgacaagcccaacagcgaggaggagatcgtgaacttcgtggaggagcacagaagaagcaccctgagaaagctgaagcccgagagcatgtacgagacctgggaggacgacatggacggcatccacatcgtggccttcgccgaggaggccgaccccgacggcttcgagttcctggagaccctgaaggccgtggcccaggacaacaccgagaaccccgacctgagcatcatctggatcgaccccgacgacttccccctgctggtgccctactgggagaagaccttcgacatcgacctgagcgccccccagatcggcgtggtgaacgtgaccgacgccgacagcgtgtggatggagatggacgacgaggaggacctgcccagcgccgaggagctggaggactggctggaggacgtgctggagggcgagatcaacaccgaggacgacgacgacgacgacgacgactag

SEQ ID NO: 75226 - DNA, 1200 bp, synthetic construct
  misc_feature 1..1200: note = Description of Artificial Sequence: Synthetic coding sequence
  source 1..1200: mol_type = other DNA
atgaagagaacccacctgttcatcgtgggcatctacttcctgagcagctgcagagccgaggagggcctgaacttccccacctacgacggcaaggacagagtggtgagcctgagcgagaagaacttcaagcaggtgctgaagaagtacgacctgctgtgcctgtactaccacgagcccgtgagcagcgacaaggtgacccagaagcagttccagctgaaggagatcgtgctggagctggtggcccaggtgctggagcacaaggccatcggcttcgtgatggtggacgccaagaaggaggccaagctggccaagaagctgggcttcgacgaggagggcagcctgtacatcctgaagggcgacagaaccatcgagttcgacggcgagttcgccgccgacgtgctggtggagttcctgctggacctgatcgaggaccccgtggagatcatcagcagcaagctggaggtgcaggccttcgagagaatcgaggactacatcaagctgatcggcttcttcaagagcgaggacagcgagtactacaaggccttcgaggaggccgccgagcacttccagccctacatcaagttcttcgccaccttcgacaagggcgtggccaagaagctgagcctgaagatgaacgaggtggacttctacgagcccttcatggacgagcccatcgccatccccaacaagccctacaccgaggaggagctggtggagttcgtgaaggagcaccagagacccaccctgagaagactgagacccgaggagatgttcgagacctgggaggacgacctgaacggcatccacatcgtggccttcgccgagaagagcgaccccgacggctacgagttcctggagatcctgaagcaggtggccagagacaacaccgacaaccccgacctgagcatcctgtggatcgaccccgacgacttccccctgctggtggcctactgggagaagaccttcaagatcgacctgttcagaccccagatcggcgtggtgaacgtgaccgacgccgacagcgtgtggatggagatccccgacgacgacgacctgcccaccgccgaggagctggaggactggatcgaggacgtgctgagcggcaagatcaacaccgaggacgacgacgaggacgacgacgacgacgacaacagcgacgaggaggacaacgacgacagcgacgacgacgacgacgagtag

SEQ ID NO: 75227 - DNA, 1062 bp, synthetic construct
  misc_feature 1..1062: note = Description of Artificial Sequence: Synthetic coding sequence
  source 1..1062: mol_type = other DNA
atgaagagaacccacctgttcatcgtgggcatctacttcctgagcagctgcagagccgaggagggcctgaacttccccacctacgacggcaaggacagagtggtgagcctgagcgagaagaacttcaagcaggtgctgaagaagtacgacctgctgtgcctgtactaccacgagcccgtgagcagcgacaaggtgacccagaagcagttccagctgaaggagatcgtgctggagctggtggcccaggtgctggagcacaaggccatcggcttcgtgatggtggacgccaagaaggaggccaagctggccaagaagctgggcttcgacgaggagggcagcctgtacatcctgaagggcgacagaaccatcgagttcgacggcgagttcgccgccgacgtgctggtggagttcctgctggacctgatcgaggaccccgtggagatcatcagcagcaagctggaggtgcaggccttcgagagaatcgaggactacatcaagctgatcggcttcttcaagagcgaggacagcgagtactacaaggccttcgaggaggccgccgagcacttccagccctacatcaagttcttcgccaccttcgacaagggcgtggccaagaagctgagcctgaagatgaacgaggtggacttctacgagcccttcatggacgagcccatcgccatccccaacaagccctacaccgacggctacgagttcctggagatcctgaagcaggtggccagagacaacaccgacaaccccgacctgagcatcctgtggatcgaccccgacgacttccccctgctggtggcctactgggagaagaccttcaagatcgacctgttcagaccccagatcggcgtggtgaacgtgaccgacgccgacagcgtgtggatggagatccccgacgacgacgacctgcccaccgccgaggagctggaggactggatcgaggacgtgctgagcggcaagatcaacaccgaggacgacgacgaggacgacgacgacgacgacaacagcgacgaggaggacaacgacgacagcgacgacgacgacgacgagtag

SEQ ID NO: 75228 - DNA, 987 bp, synthetic construct
  misc_feature 1..987: note = Description of Artificial Sequence: Synthetic coding sequence
  source 1..987: mol_type = other DNA
atgaagagaacccacctgttcatcgtgggcatctacttcctgagcagctgcagagccgaggagggcctgaacttccccacctacgacggcaaggacagagtggtgagcctgagcgagaagaacttcaagcaggtgctgaagaagtacgacctgctgtgcctgtactaccacgagcccgtgagcagcgacaaggtgacccagaagcagttccagctgaaggagatcgtgctggagctggtggcccaggtgctggagcacaaggccatcggcttcgtgatggtggacgccaagaaggaggccaagctggccaagaagctggactacaaggccttcgaggaggccgccgagcacttccagccctacatcaagttcttcgccaccttcgacaagggcgtggccaagaagctgagcctgaagatgaacgaggtggacttctacgagcccttcatggacgagcccatcgccatccccaacaagccctacaccgaggaggagctggtggagttcgtgaaggagcaccagagacccaccctgagaagactgagacccgaggagatgttcgagacctgggaggacgacctgaacggcatccacatcgtggccttcgccgagaagagcgaccccgacggctacgagttcctggagatcctgaagcaggtggccagagacaacaccgacaaccccgacctgagcatcctgtggatcgaccccgacgacttccccctgctggtggcctactgggagaagaccttcaagatcgacctgttcagaccccagatcggcgtggtgaacgtgaccgacgccgacagcgtgtggatggagatccccgacgacgacgacctgcccaccgccgaggagctggaggactggatcgaggacgtgctgagcggcaagatcaacaccgaggacgacgacgaggacgacgacgacgacgacaacagcgacgaggaggacaacgacgacagcgacgacgacgacgacgagtag

SEQ ID NO: 75229 - DNA, 948 bp, synthetic construct
  misc_feature 1..948: note = Description of Artificial Sequence: Synthetic coding sequence
  source 1..948: mol_type = other DNA
atggacctgagacagttcctgatgtgcctgagcctgtgcaccgccttcgccctgagcaagcccaccgagaagaaggacagagtgcaccacgagccccagctgagcgacaaggtgcacaacgacgcccagagcttcgactacgaccacgacgccttcctgggcgccgaggaggccaagaccttcgaccagctgacccccgaggagagcaaggagagactgggcaagatcgtgagcaagatcgacggcgacaaggacggcttcgtgaccgtggacgagctgaaggactggatcaagttcgcccagaagagatggatctacgaggacgtggagagacagtggaagggccacgacctgaacgaggacggcctggtgagctgggaggagtacaagaacgccacctacggctacgtgctggacgaccccgaccccgacgacggcttcaactacaagcagatgatggtgagagacgagagaagattcaagatggccgacaaggacggcgacctgatcgccaccaaggaggagttcaccgccttcctgcaccccgaggagtacgactacatgaaggacatcgtggtgcaggagaccatggaggacatcgacaagaacgccgacggcttcatcgacctggaggagtacatcggcgacatgtacagccacgacggcaacaccgacgagcccgagtgggtgaagaccgagagagagcagttcgtggagttcagagacaagaacagagacggcaagatggacaaggaggagaccaaggactggatcctgcccagcgactacgaccacgccgaggccgaggccagacacctggtgtacgagagcgaccagaacaaggacggcaagctgaccaaggaggagatcgtggacaagtacgacctgttcgtgggcagccaggccaccgacttcggcgaggccctggtgagacacgacgagttctag

SEQ ID NO: 75230 - DNA, 465 bp, synthetic construct
  misc_feature 1..465: note = Description of Artificial Sequence: Synthetic coding sequence
  source 1..465: mol_type = other DNA
atggacctgagacagttcctgatgtgcctgagcctgtgcaccgccttcgccctgagcaagcccaccgagaagaaggacagagtgcaccacgagccccagctgagcgacaaggtgcacaacgacgcccagagcttcgactacgaccacgacgccttcctgggcgccgaggaggccaagaccttcgaccagctgacccccgaggagagcaaggagagactgggcaagatcgtgagcaagatcgacggcgacaaggacggcttcgtgaccgtggacgagctgaaggactggatcctgcccagcgactacgaccacgccgaggccgaggccagacacctggtgtacgagagcgaccagaacaaggacggcaagctgaccaaggaggagatcgtggacaagtacgacctgttcgtgggcagccaggccaccgacttcggcgaggccctggtgagacacgacgagttctag

SEQ ID NO: 75231 - DNA, 948 bp, synthetic construct
  misc_feature 1..948: note = Description of Artificial Sequence: Synthetic coding sequence
  source 1..948: mol_type = other DNA
atggacctgagacagttcctgatgtgcctgagcctgtgcaccgccttcgccctgagcaagcccaccgagaagaaggacagagtgcaccacgagccccagctgagcgacaaggtgcacaacgacgcccagagcttcgactacgaccacgacgccttcctgggcgccgaggaggccaagaccttcgaccagctgacccccgaggagagcaaggagagactgggcatgatcgtggacaagatcgacgccgacaaggacggcttcgtgaccgagggcgagctgaagagctggatcaagcacgcccagaagaagtacatctacgacaacgtggagaaccagtggcaggagttcgacatgaaccaggacggcctgatcagctgggacgagtacagaaacgtgacctacggcacctacctggacgaccccgaccccgacgacggcttcaactacaagcagatgatggtgagagacgagagaagattcaagatggccgacaaggacggcgacctgatcgccaccaaggaggagttcaccgccttcctgcaccccgaggagtacgactacatgaaggacatcgtggtgcaggagaccatggaggacatcgacaagaacgccgacggcttcatcgacctggaggagtacatcggcgacatgtacagccacgacggcaacaccgacgagcccgagtgggtgaagaccgagagagagcagttcgtggagttcagagacaagaacagagacggcaagatggacaaggaggagaccaaggactggatcctgcccagcgactacgaccacgccgaggccgaggccagacacctggtgtacgagagcgaccagaacaaggacggcaagctgaccaaggaggagatcgtggacaagtacgacctgttcgtgggcagccaggccaccgacttcggcgaggccctggtgagacacgacgagttctag

SEQ ID NO: 75232 - DNA, 972 bp, synthetic construct
  misc_feature 1..972: note = Description of Artificial Sequence: Synthetic coding sequence
  source 1..972: mol_type = other DNA
atgaaggagaccgacctgatcatcatggacctgagacagttcctgatgtgcctgagcctgtgcaccgccttcgccctgagcaagcccaccgagaagaaggacagagtgcaccacgagccccagctgagcgacaaggtgcacaacgacgcccagagcttcgactacgaccacgacgccttcctgggcgccgaggaggccaagaccttcgaccagctgacccccgaggagagcaaggagagactgggcaagatcgtgagcaagatcgacggcgacaaggacggcttcgtgaccgtggacgagctgaaggactggatcaagttcgcccagaagagatggatctacgaggacgtggagagacagtggaagggccacgacctgaacgaggacggcctggtgagctgggaggagtacaagaacgccacctacggctacgtgctggacgaccccgaccccgacgacggcttcaactacaagcagatgatggtgagagacgagagaagattcaagatggccgacaaggacggcgacctgatcgccaccaaggaggagttcaccgccttcctgcaccccgaggagtacgactacatgaaggacatcgtggtgcaggagaccatggaggacatcgacaagaacgccgacggcttcatcgacctggaggagtacatcggcgacatgtacagccacgacggcaacaccgacgagcccgagtgggtgaagaccgagagagagcagttcgtggagttcagagacaagaacagagacggcaagatggacaaggaggagaccaaggactggatcctgcccagcgactacgaccacgccgaggccgaggccagacacctggtgtacgagagcgaccagaacaaggacggcaagctgaccaaggaggagatcgtggacaagtacgacctgttcgtgggcagccaggccaccgacttcggcgaggccctggtgagacacgacgagttctag

SEQ ID NO: 75233 - DNA, 444 bp, synthetic construct
  misc_feature 1..444: note = Description of Artificial Sequence: Synthetic coding sequence
  source 1..444: mol_type = other DNA
tgaatcgccaccaaggaggagttcaccgccttcctgcaccccgaggagtacgactacatgaaggacatcgtggtgcaggagaccatggaggacatcgacaagaacgccgacggcttcatcgacctggaggagtacatcggcgacatgtacagccacgacggcaacaccgacgagcccgagtgggtgaagaccgagagagagcagttcgtggagttcagagacaagaacagagacggcaagatggacaaggaggagaccaaggactggatcctgcccagcgactacgaccacgccgaggccgaggccagacacctggtgtacgagagcgaccagaacaaggacggcaagctgaccaaggaggagatcgtggacaagtacgacctgttcgtgggcagccaggccaccgacttcggcgaggccctggtgagacacgacgagttctag

SEQ ID NO: 75234 - DNA, 675 bp, synthetic construct
  misc_feature 1..675: note = Description of Artificial Sequence: Synthetic coding sequence
  source 1..675: mol_type = other DNA
atggacctgagacagttcctgatgtgcctgagcctgtgcaccgccttcgccctgagcaagcccaccgagaagaaggacagagtgcaccacgagccccagctgagcgacaaggtgcacaacgacgcccagagcttcgactacgaccacgacgccttcctgggcgccgaggaggccaagaccttcgaccagctgacccccgaggagagcaaggagagactgggcaagatcgtgagcaagatcgacggcgacaaggacggcttcgtgaccgtggacgagctgaaggactggatcaagttcgcccagaagagatggatctacgaggacgtggagagacagtggaagggccacgacctgaacgaggacggcctggtgagctgggaggagtacaagaacgccacctacggctacgtgctggacgaccccgaccccgacgacggcttcaactacaagcagatgatggtgagagacgagagaagattcaagatggccgacaaggacggcgacctgatcgccaccaaggaggagttcaccgccttcctgcaccccgaggagtacgactacatgaaggacatcgtggtgcaggagaccatggaggacatcgacaagaacgccgacggcttcatcgacctggaggagtacatcggctggcaggcctaccagggcggcgacagatag

SEQ ID NO: 75235 - DNA, 444 bp, synthetic construct
  misc_feature 1..444: note = Description of Artificial Sequence: Synthetic coding sequence
  source 1..444: mol_type = other DNA
atgaaggagaccgacctgatcatcatggacctgagacagttcctgatgtgcctgagcctgtgcaccgccttcgccctgagcaagcccaccgagaagaaggacagagtgcaccacgagccccagctgagcgacaaggtgcacaacgacgcccagagcttcgactacgaccacgacgccttcctgggcgccgaggaggccaagaccttcgaccagctgacccccgaggagagcaaggagagactgggcaagatcgtgagcaagatcgacggcgacaaggacggcttcgtgaccgtggacgagctgaaggactggatcaagttcgcccagaagagatggatctacgaggacgtggagagacagtggaagggccacgacctgaacgaggacggcctggtgagctgggaggagtacaagaacgccacctacggctacgtgctggagtag

SEQ ID NO: 75236 - DNA, 513 bp, synthetic construct
  misc_feature 1..513: note = Description of Artificial Sequence: Synthetic coding sequence
  source 1..513: mol_type = other DNA
atggacctgagacagttcctgatgtgcctgagcctgtgcaccgccttcgccctgagcaagcccaccgagaagaaggacagagtgcaccacgagccccagctgagcgacaaggtgcacaacgacgcccagagcttcgactacgaccacgacgccttcctgggcgccgaggaggccaagaccttcgaccagctgacccccgaggagagcaaggagagactgggcatgatcgtggacaagatcgacgccgacaaggacggcttcgtgaccgagggcgagctgaagagctggatcaagcacgcccagaagaagtacatctacgacaacgtggagaaccagtggcaggagttcgacatgaaccaggacggcctgatcagctgggacgagtacagaaacgtgacctacggcacctacctggacgaccccgaccccgacgacggcttcaactacaagcagatgatggtgagagacgagagaagattcaagatggccgacagagccagagccgtgtgctag

SEQ ID NO: 75237 - DNA, 606 bp, synthetic construct
  misc_feature 1..606: note = Description of Artificial Sequence: Synthetic coding sequence
  source 1..606: mol_type = other DNA
atggacctgagacagttcctgatgtgcctgagcctgtgcaccgccttcgccctgagcaagcccaccgagaagaaggacagagtgcaccacgagccccagctgagcgacaaggtgcacaacgacgcccagagcttcgactacgaccacgacgccttcctgggcgccgaggaggccaagaccttcgaccagctgacccccgaggagagcaaggagagactgggcatgatcgtggacaagatcgacgccgacaaggacggcttcgtgaccgagggcgagctgaagagctggatcaagcacgcccagaagaagtacatctacgacaacgtggagaaccagtggcaggagttcgacatgaaccaggacggcctgatcagctgggacgagtacagaaacgtgacctacggcacctacctggacgaccccgaccccgacgacggcttcaactacaagcagatgatggtgagagacgagagaagattcaagatggccgacaaggacggcgacctgatcgccaccaaggaggagatcgtggacaagtacgacctgttcgtgggcagccaggccaccgacttcggcgaggccctggtgagacacgacgagttctag

SEQ ID NO: 75238 - DNA, 798 bp, synthetic construct
  misc_feature 1..798: note = Description of Artificial Sequence: Synthetic coding sequence
  source 1..798: mol_type = other DNA
atggacctgagacagttcctgatgtgcctgagcctgtgcaccgccttcgccctgagcaagcccaccgagaagaaggacagagtgcaccacgagccccagctgagcgacaaggtgcacaacgacgcccagagcttcgactacgaccacgacgccttcctgggcgccgaggaggccaagaccttcgaccagctgacccccgaggagagcaaggagagactgggcaagatcgtgagcaagatcgacggcgacaaggacggcttcgtgaccgtggacgagctgaaggactggatcaagttcgcccagaagagatggatctacgaggacgtggagagacagtggaagggccacgacctgaacgaggacggcctggtgagctgggaggagtacaagaacgccacctacggctacgtgctggacgaccccgaccccgacgacggcttcaactacaagcagatgatggtgagagacgagagaagattcaagatggccgacaaggacggcgacctgatcgccaccaaggaggagttcaccgccttcctgcaccccgaggagtacgactacatgaaggacatcgtggtgcaggagaccatggaggacatcgacaagaacgccgacggcttcatcgacctggaggagtacatcggcgacatgtacagccacgacggcaacaccgacgagagcgaccagaacaaggacggcaagctgaccaaggaggagatcgtggacaagtacgacctgttcgtgggcagccaggccaccgacttcggcgaggccctggtgagacacgacgagttctag

SEQ ID NO: 75239 - DNA, 495 bp, synthetic construct
  misc_feature 1..495: note = Description of Artificial Sequence: Synthetic coding sequence
  source 1..495: mol_type = other DNA
atgatggtgagagacgagagaagattcaagatggccgacaaggacggcgacctgatcgccaccaaggaggagttcaccgccttcctgcaccccgaggagtacgactacatgaaggacatcgtggtgcaggagaccatggaggacatcgacaagaacgccgacggcttcatcgacctggaggagtacatcggcgacatgtacagccacgacggcaacaccgacgagcccgagtgggtgaagaccgagagagagcagttcgtggagttcagagacaagaacagagacggcaagatggacaaggaggagaccaaggactggatcctgcccagcgactacgaccacgccgaggccgaggccagacacctggtgtacgagagcgaccagaacaaggacggcaagctgaccaaggaggagatcgtggacaagtacgacctgttcgtgggcagccaggccaccgacttcggcgaggccctggtgagacacgacgagttctag

SEQ ID NO: 75240 - DNA, 972 bp, synthetic construct
  misc_feature 1..972: note = Description of Artificial Sequence: Synthetic coding sequence
  source 1..972: mol_type = other DNA
atgaaggagaccgacctgatcatcatggacctgagacagttcctgatgtgcctgagcctgtgcaccgccttcgccctgagcaagcccaccgagaagaaggacagagtgcaccacgagccccagctgagcgacaaggtgcacaacgacgcccagagcttcgactacgaccacgacgccttcctgggcgccgaggaggccaagaccttcgaccagctgacccccgaggagagcaaggagagactgggcatgatcgtggacaagatcgacgccgacaaggacggcttcgtgaccgagggcgagctgaagagctggatcaagcacgcccagaagaagtacatctacgacaacgtggagaaccagtggcaggagttcgacatgaaccaggacggcctgatcagctgggacgagtacagaaacgtgacctacggcacctacctggacgaccccgaccccgacgacggcttcaactacaagcagatgatggtgagagacgagagaagattcaagatggccgacaaggacggcgacctgatcgccaccaaggaggagttcaccgccttcctgcaccccgaggagtacgactacatgaaggacatcgtggtgcaggagaccatggaggacatcgacaagaacgccgacggcttcatcgacctggaggagtacatcggcgacatgtacagccacgacggcaacaccgacgagcccgagtgggtgaagaccgagagagagcagttcgtggagttcagagacaagaacagagacggcaagatggacaaggaggagaccaaggactggatcctgcccagcgactacgaccacgccgaggccgaggccagacacctggtgtacgagagcgaccagaacaaggacggcaagctgaccaaggaggagatcgtggacaagtacgacctgttcgtgggcagccaggccaccgacttcggcgaggccctggtgagacacgacgagttctag

SEQ ID NO: 75241 - DNA, 1116 bp, synthetic construct
  misc_feature 1..1116: note = Description of Artificial Sequence: Synthetic coding sequence
  source 1..1116: mol_type = other DNA
atggagctggagctggacgccggcgaccaggacctgctggccttcctgctggaggagagcggcgacctgggcaccgcccccgacgaggccgtgagagcccccctggactgggccctgcccctgagcgaggtgcccagcgactgggaggtggacgacctgctgtgcagcctgctgagcccccccgccagcctgaacatcctgagcagcagcaacccctgcctggtgcaccacgaccacacctacagcctgcccagagagaccgtgagcatggacctggagagcgagagctgcagaaaggagggcacccagatgaccccccagcacatggaggagctggccgagcaggagatcgccagactggtgctgaccgacgaggagaagagcctgctggagaaggagggcctgatcctgcccgagaccctgcccctgaccaagaccgaggagcagatcctgaagagagtgagaagaaagatcagaaacaagagaagcgcccaggagagcagaagaaagaagaaggtgtacgtgggcggcctggagagcagagtgctgaagtacaccgcccagaacatggagctgcagaacaaggtgcagctgctggaggagcagaacctgagcctgctggaccagctgagaaagctgcaggccatggtgatcgagatcagcaacaagaccagcagcagcagcacctgcatcctggtgctgctggtgagcttctgcctgctgctggtgcccgccatgtacagcagcgacaccagaggcagcctgcccgccgagcacggcgtgctgagcagacagctgagagccctgcccagcgaggacccctaccagctggagctgcccgccctgcagagcgaggtgcccaaggacagcacccaccagtggctggacggcagcgactgcgtgctgcaggcccccggcaacaccagctgcctgctgcactacatgccccaggcccccagcgccgagccccccctggagtggcccttccccgacctgttcagcgagcccctgtgcagaggccccatcctgcccctgcaggccaacctgaccagaaagggcggctggctgcccaccggcagccccagcgtgatcctgcaggacagatacagcggctag

SEQ ID NO: 75242 - DNA, 1386 bp, synthetic construct
  misc_feature 1..1386: note = Description of Artificial Sequence: Synthetic coding sequence
  source 1..1386: mol_type = other DNA
atgaacaccgacctggccgccggcaagatggccagcgccgcctgcagcatggaccccatcgacagcttcgagctgctggacctgctgttcgacagacaggacggcatcctgagacacgtggagctgggcgagggctggggccacgtgaaggaccagcaggtgctgcccaaccccgacagcgacgacttcctgagcagcatcctgggcagcggcgacagcctgcccagcagccccctgtggagccccgagggcagcgacagcggcatcagcgaggacctgcccagcgacccccaggacaccccccccagaagcggccccgccaccagccccgccggctgccaccccgcccagcccggcaagggcccctgcctgagctaccaccccggcaacagctgcagcaccaccacccccggccccgtgatccaggtgcccgaggccagcgtgaccatcgacctggagatgtggagccccggcggcagaatctgcgccgagaagcccgccgaccccgtggacctgagccccagatgcaacctgaccgtgaaggacctgctgctgagcggcagcagcggcgacctgcagcagcaccacctgggcgccagctacctgctgagacccggcgccggccactgccaggagctggtgctgaccgaggacgagaagaagctgctggccaaggagggcatcaccctgcccacccagctgcccctgaccaagtacgaggagagagtgctgaagaagatcagaagaaagatcagaaacaagcagagcgcccaggagagcagaaagaagaagaaggagtacatcgacggcctggagaccagaatgagcgcctgcaccgcccagaaccaggagctgcagagaaaggtgctgcacctggagaagcagaacctgagcctgctggagcagctgaagaagctgcaggccatcgtggtgcagagcaccagcaagagcgcccagaccggcacctgcgtggccgtgctgctgctgagcttcgccctgatcatcctgcccagcatcagccccttcggccccaacaagaccgagagccccggcgacttcgcccccgtgagagtgttcagcagaaccctgcacaacgacgccgccagcagagtggccgccgacgccgtgcccggcagcgaggcccccggccccagacccgaggccgacaccaccagagaggagagccccggcagccccggcgccgactggggcttccaggacaccgccaacctgaccaacagcaccgaggagctggacaacgccaccctggtgctgagaaacgccaccgagggcctgggccaggtggccctgctggactgggtggcccccggccccagcaccggcagcggcagagccggcctggaggccgccggcgacgagctgtag

SEQ ID NO: 75243 - DNA, 900 bp, synthetic construct
  misc_feature 1..900: note = Description of Artificial Sequence: Synthetic coding sequence
  source 1..900: mol_type = other DNA
atggccagcgccgcctgcagcatggaccccatcgacagcttcgagctgctggacctgctgttcgacagacaggacggcatcctgagacacgtggagctgggcgagggctggggccacgtgaaggaccaggtgctgcccaaccccgacagcgacgacttcctgagcagcatcctgggcagcggcgacagcctgcccagcagccccctgtggagccccgagggcagcgacagcggcatcagcgaggacctgcccagcgacccccaggacaccccccccagaagcggccccgccaccagccccgccggctgccaccccgcccagcccggcaagggcccctgcctgagctaccaccccggcaacagctgcagcaccaccacccccggccccgtgatccagcagcagcaccacctgggcgccagctacctgctgagacccggcgccggccactgccaggagctggtgctgaccgaggacgagaagaagctgctggccaaggagggcatcaccctgcccacccagctgcccctgaccaagtacgaggagagagtgctgaagaagatcagaagaaagatcagaaacaagcagagcgcccaggagagcagaaagaagaagaaggagtacatcgacggcctggagaccagaagctgctgctgccccctgcccagcagcagcagcccccccagcgccctgctggcccccaccaagcccagagccctgggcaccctgagactgtacgagtgcagccccgagctgtgcaccaccatgctgccccccgcctggctgctgatgctgtgccaggcccccagaccccaggaccccgaccccagactgacccagcccgagaagagcctgcaggaggcccccggccagaccggcgccagcagaacccccagaacctag

SEQ ID NO: 75244 - DNA, 1260 bp, synthetic construct
  misc_feature 1..1260: note = Description of Artificial Sequence: Synthetic coding sequence
  source 1..1260: mol_type = other DNA
atgaacaccgacctggccgccggcaagatggccagcgccgcctgcagcatggaccccatcgacagcttcgagctgctggacctgctgttcgacagacaggacggcatcctgagacacgtggagctgggcgagggctggggccacgtgaaggaccagcaggtgctgcccaaccccgacagcgacgacttcctgagcagcatcctgggcagcggcgacagcctgcccagcagccccctgtggagccccgagggcagcgacagcggcatcagcgaggacctgcccagcgacccccaggacaccccccccagaagcggccccgccaccagccccgccggctgccaccccgcccagcccggcaagggcccctgcctgagctaccaccccggcaacagctgcagcaccaccacccccggccccgtgatccaggtgcccgaggccagcgtgaccatcgacctggagatgtggagccccggcggcagaatctgcgccgagaagcccgccgaccccgtggacctgagccccagatgcaacctgaccgtgaaggacctgctgctgagcggcagcagcggcgacctgcagcagcaccacctgggcgccagctacctgctgagacccggcgccggccactgccaggagctggtgctgaccgaggacgagaagaagctgctggccaaggagggcatcaccctgcccacccagctgcccctgaccaagtacgaggagagagtgctgaagaagatcagaagaaagatcagaaacaagcagagcgcccaggagagcagaaagaagaagaaggccatcgtggtgcagagcaccagcaagagcgcccagaccggcacctgcgtggccgtgctgctgctgagcttcgccctgatcatcctgcccagcatcagccccttcggccccaacaagaccgagagccccggcgacttcgcccccgtgagagtgttcagcagaaccctgcacaacgacgccgccagcagagtggccgccgacgccgtgcccggcagcgaggcccccggccccagacccgaggccgacaccaccagagaggagagccccggcagccccggcgccgactggggcttccaggacaccgccaacctgaccaacagcaccgaggagctggacaacgccaccctggtgctgagaaacgccaccgagggcctgggccaggtggccctgctggactgggtggcccccggccccagcaccggcagcggcagagccggcctggaggccgccggcgacgagctgtag

SEQ ID NO: 75245 - DNA, 1188 bp, synthetic construct
  misc_feature 1..1188: note = Description of Artificial Sequence: Synthetic coding sequence
  source 1..1188: mol_type = other DNA
atggacctgggcatccccgacctgctggacgcctggctggagccccccgaggacatcttcagcaccggcagcgtgctggagctgggcctgcactgccccccccccgaggtgcccgtgaccagactgcaggagcagggcctgcagggctggaagagcggcggcgacagaggctgcggcctgcaggagagcgagcccgaggacttcctgaagctgttcatcgaccccaacgaggtgtactgcagcgaggccagccccggcagcgacagcggcatcagcgaggacccctgccaccccgacagcccccccgcccccagagccaccagcagccccatgctgtacgaggtggtgtacgaggccggcgccctggagagaatgcagggcgagaccggccccaacgtgggcctgatcagcatccagctggaccagtggagccccgccttcatggtgcccgacagctgcatggtgagcgagctgcccttcgacgcccacgcccacatcctgcccagagccggcaccgtggcccccgtgccctgcaccaccctgctgccctgccagaccctgttcctgaccgacgaggagaagagactgctgggccaggagggcgtgagcctgcccagccacctgcccctgaccaaggccgaggagagagtgctgaagaaggtgagaagaaagatcagaaacaagcagagcgcccaggacagcagaagaagaaagaaggagtacatcgacggcctggagagcagagtggccgcctgcagcgcccagaaccaggagctgcagaagaaggtgcaggagctggagagacacaacatcagcctggtggcccagctgagacagctgcagaccctgatcgcccagaccagcaacaaggccgcccagaccagcacctgcgtgctgatcctgctgttcagcctggccctgatcatcctgcccagcttcagccccttccagagcagacccgaggccggcagcgaggactaccagccccacggcgtgaccagcagaaacatcctgacccacaaggacgtgaccgagaacctggagacccaggtggtggagagcagactgagagagccccccggcgccaaggacgccaacggcagcaccagaaccctgctggagaagatgggcggcaagcccagacccagcggcagaatcagaagcgtgctgcacgccgacgagatgtag

SEQ ID NO: 75246 - DNA, 1128 bp, synthetic construct
  misc_feature 1..1128: note = Description of Artificial Sequence: Synthetic coding sequence
  source 1..1128: mol_type = other DNA
atggacctgggcatccccgacctgctggacgcctggctggagccccccgaggacatcttcagcaccggcagcgtgctggagctgggcctgcactgccccccccccgaggtgcccggcctgcaggagagcgagcccgaggacttcctgaagctgttcatcgaccccaacgaggtgtactgcagcgaggccagccccggcagcgacagcggcatcagcgaggacccctgccaccccgacagcccccccgcccccagagccaccagcagccccatgctgtacgaggtggtgtacgaggccggcgccctggagagaatgcagggcgagaccggccccaacgtgggcctgatcagcatccagctggaccagtggagccccgccttcatggtgcccgacagctgcatggtgagcgagctgcccttcgacgcccacgcccacatcctgcccagagccggcaccgtggcccccgtgccctgcaccaccctgctgccctgccagaccctgttcctgaccgacgaggagaagagactgctgggccaggagggcgtgagcctgcccagccacctgcccctgaccaaggccgaggagagagtgctgaagaaggtgagaagaaagatcagaaacaagcagagcgcccaggacagcagaagaagaaagaaggagtacatcgacggcctggagagcagagtggccgcctgcagcgcccagaaccaggagctgcagaagaaggtgcaggagctggagagacacaacatcagcctggtggcccagctgagacagctgcagaccctgatcgcccagaccagcaacaaggccgcccagaccagcacctgcgtgctgatcctgctgttcagcctggccctgatcatcctgcccagcttcagccccttccagagcagacccgaggccggcagcgaggactaccagccccacggcgtgaccagcagaaacatcctgacccacaaggacgtgaccgagaacctggagacccaggtggtggagagcagactgagagagccccccggcgccaaggacgccaacggcagcaccagaaccctgctggagaagatgggcggcaagcccagacccagcggcagaatcagaagcgtgctgcacgccgacgagatgtag

SEQ ID NO: 75247 - DNA, 654 bp, synthetic construct
  misc_feature 1..654: note = Description of Artificial Sequence: Synthetic coding sequence
  source 1..654: mol_type = other DNA
atggacctgggcatccccgacctgctggacgcctggctggagccccccgaggacatcttcagcaccggcagcgtgctggagctgggcctgcactgccccccccccgaggtgcccgtgaccagactgcaggagcagggcctgcagggctggaagagcggcggcgacagaggctgcggcctgcaggagagcgagcccgaggacttcctgaagctgttcatcgaccccaacgaggtgtactgcagcgaggccagccccggcagcgacagcggcatcagcgaggacccctgccaccccgacagcccccccgcccccagagccaccagcagccccatgctgtacgaggtggtgtacgaggccggcgccctggagagaatgcagggcgagaccggccccaacgtgggcctgatcagcatccagctggaccagtggagccccgccttcatggtgcccgacagctgcatggtgagcgagctgcccttcgacgcccacgcccacatcctgcccagagccggcaccgtggcccccgtgccctgcaccaccctgctgccctgccagaccctgttcctgaccgacgaggagaagagactgctgggccaggagggcgtgagcctgcccagccacctgcccctgaccaaggtgacctgcttcccctag

SEQ ID NO: 75248 - DNA, 1188 bp, synthetic construct; identical to SEQ ID NO: 75245
  misc_feature 1..1188: note = Description of Artificial Sequence: Synthetic coding sequence
  source 1..1188: mol_type = other DNA

SEQ ID NO: 75249 - DNA, 1188 bp, synthetic construct; identical to SEQ ID NO: 75245
  misc_feature 1..1188: note = Description of Artificial Sequence: Synthetic coding sequence
  source 1..1188: mol_type = other DNA

SEQ ID NO: 75250 - DNA, 747 bp, synthetic construct
  misc_feature 1..747: note = Description of Artificial Sequence: Synthetic coding sequence
  source 1..747: mol_type = other DNA
atggtgcccgacagctgcatggtgagcgagctgcccttcgacgcccacgcccacatcctgcccagagccggcaccgtggcccccgtgccctgcaccaccctgctgccctgccagaccctgttcctgaccgacgaggagaagagactgctgggccaggagggcgtgagcctgcccagccacctgcccctgaccaaggccgaggagagagtgctgaagaaggtgagaagaaagatcagaaacaagcagagcgcccaggacagcagaagaagaaagaaggagtacatcgacggcctggagagcagagtggccgcctgcagcgcccagaaccaggagctgcagaagaaggtgcaggagctggagagacacaacatcagcctggtggcccagctgagacagctgcagaccctgatcgcccagaccagcaacaaggccgcccagaccagcacctgcgtgctgatcctgctgttcagcctggccctgatcatcctgcccagcttcagccccttccagagcagacccgaggccggcagcgaggactaccagccccacggcgtgaccagcagaaacatcctgacccacaaggacgtgaccgagaacctggagacccaggtggtggagagcagactgagagagccccccggcgccaaggacgccaacggcagcaccagaaccctgctggagaagatgggcggcaagcccagacccagcggcagaatcagaagcgtgctgcacgccgacgagatgtag

SEQ ID NO: 75251 - DNA, 549 bp, synthetic construct
  misc_feature 1..549: note = Description of Artificial Sequence: Synthetic coding sequence
  source 1..549: mol_type = other DNA
atggacctgggcatccccgacctgctggacgcctggctggagccccccgaggacatcttcagcaccggcagcgtgctggagctgggcctgcactgccccccccccgaggtgcccgtgaccagactgcaggagcagggcctgcagggctggaagagcggcggcgacagaggctgcggcctgcaggagagcgagcccgaggacttcctgaagctgttcatcgaccccaacgaggtgtactgcagcgaggccagccccggcagcgacagcggcatcagcgaggacccctgccaccccgacagcccccccgcccccagagccaccagcagccccatgctgtacgaggtggtgtacgaggccggcgccctggagagaatgcagggcgagaccggccccaacgtgggcctgatcagcatccagctggaccagtggagccccgccttcatggtgcccgacagctgcatggtgagcgagctgcccttcgacgcccacgcccacatcctgcccagagccggcaccgtggcccccgtgccctgcaccaccctggtgtag

SEQ ID NO: 75252 - DNA, 687 bp, synthetic construct
  misc_feature 1..687: note = Description of Artificial Sequence: Synthetic coding sequence
  source 1..687: mol_type = other DNA
atggacctgggcatccccgacctgctggacgcctggctggagccccccgaggacatcttcagcaccggcagcgtgctggagctgggcctgcactgccccccccccgaggtgcccggcctgcaggagagcgagcccgaggacttcctgaagctgttcatcgaccccaacgaggtgtactgcagcgaggccagccccggcagcgacagcggcatcagcgaggacccctgccaccccgacagcccccccgcccccagagccaccagcagccccatgctgtacgaggtggtgtacgaggccggcgccctggagagaatgcagggcgagaccggccccaacgtgggcctgatcagcatccagctggaccagtggagccccgccttcatggtgcccgacagctgcatggtgagcgagctgcccttcgacgcccacgcccacatcctgcccagagccggcaccgtggcccccgtgccctgcaccaccctgctgccctgccagaccctgttcctgaccgacgaggagaagagactgctgggccaggagggcgtgagcctgcccagccacctgcccctgaccaaggccgaggagagagtgctgaagaaggtgagaagaaagatcagaaacaagcagagcgcccaggacagcagaagaagaaagaaggagtacatcgacggcctggagagcagatag

SEQ ID NO: 75253 - DNA, 1047 bp, synthetic construct
  misc_feature 1..1047: note = Description of Artificial Sequence: Synthetic coding sequence
  source 1..1047: mol_type = other DNA
atgagcaagtgcgccagaaagaagtacatcaagaccaaccccagacagatgaccatggagaccgtggagagccagcacgacggcagcatcaccgccagcctgaccgagagcaagagcgcccacgtgcagacccagaccggccagaacagcatccccgccctggcccaggtgagcgtggccggcagcggcaccagaagaggcagccccgccgtgaccctggtgcagctgcccagcggccagaccatccacgtgcagggcgtgatccagaccccccagccctgggtgatccagagcagcgagatccacaccgtgcaggtggccgccatcgccgagaccgacgagagcgccgagagcgagggcgtgatcgacagccacaagagaagagagatcctgagcagaagacccagctacagaaagatcctgaacgagctgagcagcgacgtgcccggcgtgcccaagatcgaggaggagagaagcgaggaggagggcaccccccccagcatcgccaccatggccgtgcccaccagcatctaccagaccagcaccggccagtacatcgccatcgcccagggcggcaccatccagatcagcaaccccggcagcgacggcgtgcagggcctgcaggccctgaccatgaccaacagcggcgcccccccccccggcgccaccatcgtgcagtacgccgcccagagcgccgacggcacccagcagttcttcgtgcccggcagccaggtggtggtgcaggccgccaccggcgacatgcccacctaccagatcagagcccccaccgccgccctgccccagggcgtggtgatggccgccagccccggcagcctgcacagcccccagcagctggccgaggaggccaccagaaagagagagctgagactgatgaagaacagagaggccgccagagagtgcagaagaaagaagaaggagtacgtgaagtgcctggagaacagagtggccgtgctggagaaccagaacaagaccctgatcgaggagctgaaggccctgaaggacctgtactgccacaaggtggagtag

SEQ ID NO: 75254 - DNA, 900 bp, synthetic construct
  misc_feature 1..900: note = Description of Artificial Sequence: Synthetic coding sequence
  source 1..900: mol_type = other DNA
atgagcaagtgcgccagaaagaagtacatcaagaccaaccccagacagatgaccatggagaccgtggagagccagcacgacggcagcatcaccgccagcctgaccgagagcaagagcgcccacgtgcagacccagaccggccagaacagcatccccgccctggcccaggtggccgccatcgccgagaccgacgagagcgccgagagcgagggcgtgatcgacagccacaagagaagagagatcctgagcagaagacccagctacagaaagatcctgaacgagctgagcagcgacgtgcccggcgtgcccaagatcgaggaggagagaagcgaggaggagggcaccccccccagcatcgccaccatggccgtgcccaccagcatctaccagaccagcaccggccagtacatcgccatcgcccagggcggcaccatccagatcagcaaccccggcagcgacggcgtgcagggcctgcaggccctgaccatgaccaacagcggcgcccccccccccggcgccaccatcgtgcagtacgccgcccagagcgccgacggcacccagcagttcttcgtgcccggcagccaggtggtggtgcaggccgccaccggcgacatgcccacctaccagatcagagcccccaccgccgccctgccccagggcgtggtgatggccgccagccccggcagcctgcacagcccccagcagctggccgaggaggccaccagaaagagagagctgagactgatgaagaacagagaggccgccagagagtgcagaagaaagaagaaggagtacgtgaagtgcctggagaacagagtggccgtgctggagaaccagaacaagaccctgatcgaggagctgaaggccctgaaggacctgtactgccacaaggtggagtag

SEQ ID NO: 75255 - DNA, 738 bp, synthetic construct
  misc_feature 1..738: note = Description of Artificial Sequence: Synthetic coding sequence
  source 1..738: mol_type = other DNA
atggtggccgccatcgccgagaccgacgagagcgccgagagcgagggcgtgatcgacagccacaagagaagagagatcctgagcagaagacccagctacagaaagatcctgaacgagctgagcagcgacgtgcccggcgtgcccaagatcgaggaggagagaagcgaggaggagggcaccccccccagcatcgccaccatggccgtgcccaccagcatctaccagaccagcaccggccagtacatcgccatcgcccagggcggcaccatccagatcagcaaccccggcagcgacggcgtgcagggcctgcaggccctgaccatgaccaacagcggcgcccccccccccggcgccaccatcgtgcagtacgccgcccagagcgccgacggcacccagcagttcttcgtgcccggcagccaggtggtggtgcaggccgccaccggcgacatgcccacctaccagatcagagcccccaccgccgccctgccccagggcgtggtgatggccgccagccccggcagcctgcacagcccccagcagctggccgaggaggccaccagaaagagagagctgagactgatgaagaacagagaggccgccaaggagtgcagaagaagaaagaaggagtacgtgaagtgcctggagagcagagtggccgtgctggaggtgcagaacaagaagctgatcgaggagctggagaccctgaaggacatctgcagccccaagaccgactactag

SEQ ID NO: 75256 - DNA, 288 bp, synthetic construct
  misc_feature 1..288: note = Description of Artificial Sequence: Synthetic coding sequence
  source 1..288: mol_type = other DNA
atgcccacctaccagatcagagcccccaccgccgccctgccccagggcgtggtgatggccgccagccccggcagcctgcacagcccccagcagctggccgaggaggccaccagaaagagagagctgagactgatgaagaacagagaggccgccagagagtgcagaagaaagaagaaggagtacgtgaagtgcctggagaacagagtggccgtgctggagaaccagaacaagaccctgatcgaggagctgaaggccctgaaggacctgtactgccacaaggtggagtag

SEQ ID NO: 75257 - DNA, 903 bp, synthetic construct
  misc_feature 1..903: note = Description of Artificial Sequence: Synthetic coding sequence
  source 1..903: mol_type = other DNA
atgagcaagtgcgccagaaagaagtacatcaagaccaaccccagacagatgaccatggagaccgtggagagccagcacgacggcagcatcaccgccagcctgaccgagagcaagagcgcccacgtgcagacccagaccggccagaacagcatccccgccctggcccaggtggccgccatcgccgagaccgacgagagcgccgagagcgagggcgtgatcgacagccacaagagaagagagatcctgagcagaagacccagctacagaaagatcctgaacgagctgagcagcgacgtgcccggcgtgcccaagatcgaggaggagagaagcgaggaggagggcaccccccccagcatcgccaccatggccgtgcccaccagcatctaccagaccagcaccggccagtacatcgccatcgcccagggcggcaccatccagatcagcaaccccggcagcgacggcgtgcagggcctgcaggccctgaccatgaccaacagcggcgcccccccccccggcgccaccatcgtgcagtacgccgcccagagcgccgacggcacccagcagttcttcgtgcccggcagccaggtggtggtgcaggccgccaccggcgacatgcccacctaccagatcagagcccccaccgccgccctgccccagggcgtggtgatggccgccagccccggcagcctgcacagcccccagcagctggccgaggaggccaccagaaagagagagctgagactgatgaagaacagagaggccgccaaggagtgcagaagaagaaagaaggagtacgtgaagtgcctggagagcagagtggccgtgctggaggtgcagaacaagaagctgatcgaggagctggagaccctgaaggacatctgcagccccaagaccgactactag

SEQ ID NO: 75258 - DNA, 666 bp, synthetic construct
  misc_feature 1..666: note = Description of Artificial Sequence: Synthetic coding sequence
  source 1..666: mol_type = other DNA
atgaccatggagaccgtggagagccagcacgacggcagcatcaccgccagcctgaccgagagcaagagcgcccacgtgcagacccagaccggccagaacagcatccccgccctggcccaggtggccgccatcgccgagaccgacgagagcgccgagagcgagggcgtgatcgacagccacaagagaagagagatcctgagcagaagacccagctacagaaagatcctgaacgagctgagcagcgacgtgcccggcgtgcccaagatcgaggaggagagaagcgaggaggagggcaccccccccagcatcgccaccatggccgtgcccaccagcatctaccagaccagcaccggccagtacaccgccaccggcgacatgcccacctaccagatcagagcccccaccgccgccctgccccagggcgtggtgatggccgccagccccggcagcctgcacagcccccagcagctggccgaggaggccaccagaaagagagagctgagactgatgaagaacagagaggccgccaaggagtgcagaagaagaaagaaggagtacgtgaagtgcctggagagcagagtggccgtgctggaggtgcagaacaagaagctgatcgaggagctggagaccctgaaggacatctgcagccccaagaccgactactag

SEQ ID NO: 75259 - DNA, 747 bp, synthetic construct
  misc_feature 1..747: note = Description of Artificial Sequence: Synthetic coding sequence
  source 1..747: mol_type = other DNA
atgagcaagtgcgccagaaagaagtacatcaagaccaaccccagacagatgaccatggagaccgtggagagccagcacgacggcagcatcaccgccagcctgaccgagagcaagagcgcccacgtgcagacccagaccggccagaacagcatccccgccctggcccaggtggccgccatcgccgagaccgacgagagcgccgagagcgagggcgtgatcgacagccacaagagaagagagatcctgagcagaagacccagctacagaaagatcctgaacgagctgagcagcgacgtgcccggcgtgcccaagatcgaggaggagagaagcgaggaggagggcaccccccccagcatcgccaccatggccgtgcccaccagcatctaccagaccagcaccggccagtacaacgaggagaccgagctggcccccagccacatggccgccgccaccggcgacatgcccacctaccagatcagagcccccaccgccgccctgccccagggcgtggtgatggccgccagccccggcagcctgcacagcccccagcagctggccgaggaggccaccagaaagagagagctgagactgatgaagaacagagaggccgccagagagtgcagaagaaagaagaaggagtacgtgaagtgcctggagaacagagtggccgtgctggagaaccagaacaagaccctgatcgaggagctgaaggccctgaaggacctgtactgccacaaggtggagtag

SEQ ID NO: 75260 - DNA, 327 bp, synthetic construct
  misc_feature 1..327: note = Description of Artificial Sequence: Synthetic coding sequence
  source 1..327: mol_type = other DNA
atggccgtgaccggcgacgacaccgccgccaccggcgacatgcccacctaccagatcagagcccccaccgccgccctgccccagggcgtggtgatggccgccagccccggcagcctgcacagcccccagcagctggccgaggaggccaccagaaagagagagctgagactgatgaagaacagagaggccgccagagagtgcagaagaaagaagaaggagtacgtgaagtgcctggagaacagagtggccgtgctggagaaccagaacaagaccctgatcgaggagctgaaggccctgaaggacctgtactgccacaaggtggagtag

SEQ ID NO: 75261 - DNA, 813 bp, synthetic construct
  misc_feature 1..813: note = Description of Artificial Sequence: Synthetic coding sequence
  source 1..813: mol_type = other DNA
atgtggtggcaccagcacaacctgtgcttcagaagacccatcgaggaggactacagcagcggcgacgtggaggagaaggtggccgccatcgccgagaccgacgagagcgccgagagcgagggcgtgatcgacagccacaagagaagagagatcctgagcagaagacccagctacagaaagatcctgaacgagctgagcagcgacgtgcccggcgtgcccaagatcgaggaggagagaagcgaggaggagggcaccccccccagcatcgccaccatggccgtgcccaccagcatctaccagaccagcaccggccagtacatcgccatcgcccagggcggcaccatccagatcagcaaccccggcagcgacggcgtgcagggcctgcaggccctgaccatgaccaacagcggcgcccccccccccggcgccaccatcgtgcagtacgccgcccagagcgccgacggcacccagcagttcttcgtgcccggcagccaggtggtggtgcaggccgccaccggcgacatgcccacctaccagatcagagcccccaccgccgccctgccccagggcgtggtgatggccgccagccccggcagcctgcacagcccccagcagctggccgaggaggccaccagaaagagagagctgagactgatgaagaacagagaggccgccaaggagtgcagaagaagaaagaaggagtacgtgaagtgcctggagagcagagtggccgtgctggaggtgcagaacaagaagctgatcgaggagctggagaccctgaaggacatctgcagccccaagaccgactactag

SEQ ID NO: 75262 - DNA, 999 bp, synthetic construct
  misc_feature 1..999: note = Description of Artificial Sequence: Synthetic coding sequence
  source 1..999: mol_type = other DNA
atgaccatggagaccgtggagagccagcacgacggcagcatcaccgccagcctgaccgagagcaagagcgcccacgtgcagacccagaccggccagaacagcatccccgccctggcccaggtgagcgtggccggcagcggcaccagaagaggcagccccgccgtgaccctggtgcagctgcccagcggccagaccatccacgtgcagggcgtgatccagaccccccagccctgggtgatccagagcagcgagatccacaccgtgcaggtggccgccatcgccgagaccgacgagagcgccgagagcgagggcgtgatcgacagccacaagagaagagagatcctgagcagaagacccagctacagaaagatcctgaacgagctgagcagcgacgtgcccggcgtgcccaagatcgaggaggagagaagcgaggaggagggcaccccccccagcatcgccaccatggccgtgcccaccagcatctaccagaccagcaccggccagtacatcgccatcgcccagggcggcaccatccagatcagcaaccccggcagcgacggcgtgcagggcctgcaggccctgaccatgaccaacagcggcgcccccccccccggcgccaccatcgtgcagtacgccgcccagagcgccgacggcacccagcagttcttcgtgcccggcagccaggtggtggtgcaggccgccaccggcgacatgcccacctaccagatcagagcccccaccgccgccctgccccagggcgtggtgatggccgccagccccggcagcctgcacagcccccagcagctggccgaggaggccaccagaaagagagagctgagactgatgaagaacagagaggccgccagagagtgcagaagaaagaagaaggagtacgtgaagtgcctggagaacagagtggccgtgctggagaaccagaacaagaccctgatcgaggagctgaaggccctgaaggacctgtactgccacaaggtggagtag

SEQ ID NO: 75263 - DNA, 1002 bp, synthetic construct
  misc_feature 1..1002: note = Description of Artificial Sequence: Synthetic coding sequence
  source 1..1002: mol_type = other DNA
atgaccatggagaccgtggagagccagcacgacggcagcatcaccgccagcctgaccgagagcaagagcgcccacgtgcagacccagaccggccagaacagcatccccgccctggcccaggtgagcgtggccggcagcggcaccagaagaggcagccccgccgtgaccctggtgcagctgcccagcggccagaccatccacgtgcagggcgtgatccagaccccccagccctgggtgatccagagcagcgagatccacaccgtgcaggtggccgccatcgccgagaccgacgagagcgccgagagcgagggcgtgatcgacagccacaagagaagagagatcctgagcagaagacccagctacagaaagatcctgaacgagctgagcagcgacgtgcccggcgtgcccaagatcgaggaggagagaagcgaggaggagggcaccccccccagcatcgccaccatggccgtgcccaccagcatctaccagaccagcaccggccagtacatcgccatcgcccagggcggcaccatccagatcagcaaccccggcagcgacggcgtgcagggcctgcaggccctgaccatgaccaacagcggcgcccccccccccggcgccaccatcgtgcagtacgccgcccagagcgccgacggcacccagcagttcttcgtgcccggcagccaggtggtggtgcaggccgccaccggcgacatgcccacctaccagatcagagcccccaccgccgccctgccccagggcgtggtgatggccgccagccccggcagcctgcacagcccccagcagctggccgaggaggccaccagaaagagagagctgagactgatgaagaacagagaggccgccaaggagtgcagaagaagaaagaaggagtacgtgaagtgcctggagagcagagtggccgtgctggaggtgcagaacaagaagctgatcgaggagctggagaccctgaaggacatctgcagccccaagaccgactactag

SEQ ID NO: 75264 - DNA, 414 bp, synthetic construct
  misc_feature 1..414: note = Description of Artificial Sequence: Synthetic coding sequence
  source 1..414: mol_type = other DNA
atgaccatggagaccgtggagagccagcacgacggcagcatcaccgccagcctgaccgagagcaagagcgcccacgtgcagacccagaccggccagaacagcatccccgccctggcccaggtggccgccatcgccgagaccgacgagagcgccgagagcgagggcgtgatcgacagccacaagagaagagagatcctgagcagaagacccagctacagaaagatcctgaacgagctgagcagcgacgtgcccggcgtgcccaagatcgaggaggagagaagcgaggaggagggcaccccccccagcatcgccaccatggccgtgcccaccagcatctaccagaccagcaccggccagtacagcatgtacgccgccatcagatacgacaccgtgctggccctgagcctgctgtag

SEQ ID NO: 75265 - DNA, 666 bp, synthetic construct; identical to SEQ ID NO: 75258
  misc_feature 1..666: note = Description of Artificial Sequence: Synthetic coding sequence
  source 1..666: mol_type = other DNA

SEQ ID NO: 75266 - DNA, 711 bp, synthetic construct
  misc_feature 1..711: note = Description of Artificial Sequence: Synthetic coding sequence
  source 1..711: mol_type = other DNA
atgagcaagtgcgccagaaagaagtacatcaagaccaaccccagacagatgaccatggagaccgtggagagccagcacgacggcagcatcaccgccagcctgaccgagagcaagagcgcccacgtgcagacccagaccggccagaacagcatccccgccctggcccaggtggccgccatcgccgagaccgacgagagcgccgagagcgagggcgtgatcgacagccacaagagaagagagatcctgagcagaagacccagctacagaaagatcctgaacgagctgagcagcgacgtgcccggcgtgcccaagatcgaggaggagagaagcgaggaggagggcaccccccccagcatcgccaccatggccgtgcccaccagcatctaccagaccagcaccggccagtacaccgccaccggcgacatgcccacctaccagatcagagcccccaccgccgccctgccccagggcgtggtgatggccgccagccccggcagcctgcacagcccccagcagctggccgaggaggccaccagaaagagagagctgagactgatgaagaacagagaggccgccagagagtgcagaagaaagaagaaggagtacgtgaagtgcctggagaacagagtggccgtgctggagaaccagaacaagaccctgatcgaggagctgaaggccctgaaggacctgtactgccacaaggtggagtag

SEQ ID NO: 75267 - DNA, 849 bp, synthetic construct
  misc_feature 1..849: note = Description of Artificial Sequence: Synthetic coding sequence
  source 1..849: mol_type = other DNA
atgtggtggcaccagcacaacctgtgcttcagaagacccatcgaggaggactacagcagcggcgacgtggaggagaaggtggccgccatcgccgagaccgacgagagcgccgagagcgagggcgtgatcgacagccacaagagaagagagatcctgagcagaagacccagctacagaaagatcctgaacgagctgagcagcgacgtgcccggcgtgcccaagatcgaggaggagagaagcgaggaggagggcaccccccccagcatcgccaccatggccgtgcccaccagcatctaccagaccagcaccggccagtacatcgccatcgcccagggcggcaccatccagatcagcaaccccggcagcgacggcgtgcagggcctgcaggccctgaccatgaccaacagcggcgcccccccccccggcgccaccatcgtgcagtacgccgcccagagcgccgacggcacccagcagttcttcgtgcccggcagccaggtggtggtgcaggacgaggagaccgagctggcccccagccacatggccgccgccaccggcgacatgcccacctaccagatcagagcccccaccgccgccctgccccagggcgtggtgatggccgccagccccggcagcctgcacagcccccagcagctggccgaggaggccaccagaaagagagagctgagactgatgaagaacagagaggccgccaaggagtgcagaagaagaaagaaggagtacgtgaagtgcctggagagcagagtggccgtgctggaggtgcagaacaagaagctgatcgaggagctggagaccctgaaggacatctgcagccccaagaccgactactag

SEQ ID NO: 75268 - DNA, 1086 bp, synthetic construct
  misc_feature 1..1086: note = Description of Artificial Sequence: Synthetic coding sequence
  source 1..1086: mol_type = other DNA
atgagcaagtgcgccagaaagaagtacatcaagaccaaccccagacagatgaccatggagaccgtggagagccagcacgacggcagcatcaccgccagcctgaccgagagcaagagcgcccacgtgcagacccagaccggccagaacagcatccccgccctggcccaggtgagcgtggccggcagcggcaccagaagaggcagccccgccgtgaccctggtgcagctgcccagcggccagaccatccacgtgcagggcgtgatccagaccccccagccctgggtgatccagagcagcgagatccacaccgtgcaggtggccgccatcgccgagaccgacgagagcgccgagagcgagggcgtgatcgacagccacaagagaagagagatcctgagcagaagacccagctacagaaagatcctgaacgagctgagcagcgacgtgcccggcgtgcccaagatcgaggaggagagaagcgaggaggagggcaccccccccagcatcgccaccatggccgtgcccaccagcatctaccagaccagcaccggccagtacatcgccatcgcccagggcggcaccatccagatcagcaaccccggcagcgacggcgtgcagggcctgcaggccctgaccatgaccaacagcggcgcccccccccccggcgccaccatcgtgcagtacgccgcccagagcgccgacggcacccagcagttcttcgtgcccggcagccaggtggtggtgcaggacgaggagaccgagctggcccccagccacatggccgccgccaccggcgacatgcccacctaccagatcagagcccccaccgccgccctgccccagggcgtggtgatggccgccagccccggcagcctgcacagcccccagcagctggccgaggaggccaccagaaagagagagctgagactgatgaagaacagagaggccgccaaggagtgcagaagaagaaagaaggagtacgtgaagtgcctggagagcagagtggccgtgctggaggtgcagaacaagaagctgatcgaggagctggagaccctgaaggacatctgcagccccaagaccgactactag

SEQ ID NO: 75269 - DNA, 474 bp, synthetic construct
  misc_feature 1..474: note = Description of Artificial Sequence: Synthetic coding sequence
  source 1..474: mol_type = other DNA
atgagcaagtgcgccagaaagaagtacatcaagaccaaccccagacagatgaccatggagaccgtggagagccagcacgacggcagcatcaccgccagcctgaccgagagcaagagcgcccacgtgcagacccagaccggccagaacagcatccccgccctggcccaggtggccgccatcgccgagaccgacgagagcgccgagagcgagggcgtgatcgacagccacaagagaagagagatcctgagcagaagacccagctacagaaagatcctgaacgagctgagcagcgacgtgcccggcgtgcccaagatcgaggaggagagaagcgaggaggagggcaccccccccagcatcgccaccatggccgtgcccaccagcatctaccagaccagcaccggccagtacatcgccatcgcccagggcggcaccatccagatcagcaaccccggcagcgacggcgtgcagggctag

SEQ ID NO: 75270 - DNA, 1038 bp, synthetic construct
  misc_feature 1..1038: note = Description of Artificial Sequence: Synthetic coding sequence
  source 1..1038: mol_type = other DNA
atgaccatggagaccgtggagagccagcacgacggcagcatcaccgccagcctgaccgagagcaagagcgcccacgtgcagacccagaccggccagaacagcatccccgccctggcccaggtgagcgtggccggcagcggcaccagaagaggcagccccgccgtgaccctggtgcagctgcccagcggccagaccatccacgtgcagggcgtgatccagaccccccagccctgggtgatccagagcagcgagatccacaccgtgcaggtggccgccatcgccgagaccgacgagagcgccgagagcgagggcgtgatcgacagccacaagagaagagagatcctgagcagaagacccagctacagaaagatcctgaacgagctgagcagcgacgtgcccggcgtgcccaagatcgaggaggagagaagcgaggaggagggcaccccccccagcatcgccaccatggccgtgcccaccagcatctaccagaccagcaccggccagtacatcgccatcgcccagggcggcaccatccagatcagcaaccccggcagcgacggcgtgcagggcctgcaggccctgaccatgaccaacagcggcgcccccccccccggcgccaccatcgtgcagtacgccgcccagagcgccgacggcacccagcagttcttcgtgcccggcagccaggtggtggtgcaggacgaggagaccgagctggcccccagccacatggccgccgccaccggcgacatgcccacctaccagatcagagcccccaccgccgccctgccccagggcgtggtgatggccgccagccccggcagcctgcacagcccccagcagctggccgaggaggccaccagaaagagagagctgagactgatgaagaacagagaggccgccaaggagtgcagaagaagaaagaaggagtacgtgaagtgcctggagagcagagtggccgtgctggaggtgcagaacaagaagctgatcgaggagctggagaccctgaaggacatctgcagccccaagaccgactactag

SEQ ID NO: 75271 - DNA, 858 bp, synthetic construct
  misc_feature 1..858: note = Description of Artificial Sequence: Synthetic coding sequence
  source 1..858: mol_type = other DNA
atgagcaagtgcgccagaaagaagtacatcaagaccaaccccagacagatgaccatggagaccgtggagagccagcacgacggcagcatcaccgccagcctgaccgagagcaagagcgcccacgtgcagacccagaccggccagaacagcatccccgccctggcccaggtgagcgtggccggcagcggcaccagaagaggcagccccgccgtgaccctggtgcagctgcccagcggccagaccatccacgtgcagggcgtgatccagaccccccagccctgggtgatccagagcagcgagatccacaccgtgcaggtggccgccatcgccgagaccgacgagagcgccgagagcgagggcgtgatcgacagccacaagagaagagagatcctgagcagaagacccagctacagaaagatcctgaacgagctgagcagcgacgtgcccggcgtgcccaagatcgaggaggagagaagcgaggaggagggcaccccccccagcatcgccaccatggccgtgcccaccagcatctaccagaccagcaccggccagtacaccgccaccggcgacatgcccacctaccagatcagagcccccaccgccgccctgccccagggcgtggtgatggccgccagccccggcagcctgcacagcccccagcagctggccgaggaggccaccagaaagagagagctgagactgatgaagaacagagaggccgccagagagtgcagaagaaagaagaaggagtacgtgaagtgcctggagaacagagtggccgtgctggagaaccagaacaagaccctgatcgaggagctgaaggccctgaaggacctgtactgccacaaggtggagtag

SEQ ID NO: 75272 - DNA, 288 bp, synthetic construct; identical to SEQ ID NO: 75256
  misc_feature 1..288: note = Description of Artificial Sequence: Synthetic coding sequence
  source 1..288: mol_type = other DNA

SEQ ID NO: 75273 - DNA, 810 bp, synthetic construct
  misc_feature 1..810: note = Description of Artificial Sequence: Synthetic coding sequence
  source 1..810: mol_type = other DNA
atgaccatggagaccgtggagagccagcacgacggcagcatcaccgccagcctgaccgagagcaagagcgcccacgtgcagacccagaccggccagaacagcatccccgccctggcccaggtgagcgtggccggcagcggcaccagaagaggcagccccgccgtgaccctggtgcagctgcccagcggccagaccatccacgtgcagggcgtgatccagaccccccagccctgggtgatccagagcagcgagatccacaccgtgcaggtggccgccatcgccgagaccgacgagagcgccgagagcgagggcgtgatcgacagccacaagagaagagagatcctgagcagaagacccagctacagaaagatcctgaacgagctgagcagcgacgtgcccggcgtgcccaagatcgaggaggagagaagcgaggaggagggcaccccccccagcatcgccaccatggccgtgcccaccagcatctaccagaccagcaccggccagtacaccgccaccggcgacatgcccacctaccagatcagagcccccaccgccgccctgccccagggcgtggtgatggccgccagccccggcagcctgcacagcccccagcagctggccgaggaggccaccagaaagagagagctgagactgatgaagaacagagaggccgccagagagtgcagaagaaagaagaaggagtacgtgaagtgcctggagaacagagtggccgtgctggagaaccagaacaagaccctgatcgaggagctgaaggccctgaaggacctgtactgccacaaggtggagtag

SEQ ID NO: 75274 - DNA, 585 bp, synthetic construct
  misc_feature 1..585: note = Description of Artificial Sequence: Synthetic coding sequence
  source 1..585: mol_type = other DNA
atggtggccgccatcgccgagaccgacgagagcgccgagagcgagggcgtgatcgacagccacaagagaagagagatcctgagcagaagacccagctacagaaagatcctgaacgagctgagcagcgacgtgcccggcgtgcccaagatcgaggaggagagaagcgaggaggagggcaccccccccagcatcgccaccatggccgtgcccaccagcatctaccagaccagcaccggccagtacaacgaggagaccgagctggcccccagccacatggccgccgccaccggcgacatgcccacctaccagatcagagcccccaccgccgccctgccccagggcgtggtgatggccgccagccccggcagcctgcacagcccccagcagctggccgaggaggccaccagaaagagagagctgagactgatgaagaacagagaggccgccaaggagtgcagaagaagaaagaaggagtacgtgaagtgcctggagagcagagtggccgtgctggaggtgcagaacaagaagctgatcgaggagctggagaccctgaaggacatctgcagccccaagaccgactactag

SEQ ID NO: 75275 - DNA, 363 bp, synthetic construct
  misc_feature 1..363: note = Description of Artificial Sequence: Synthetic coding sequence
  source 1..363: mol_type = other DNA
atggccgtgaccggcgacgacaccgacgaggagaccgagctggcccccagccacatggccgccgccaccggcgacatgcccacctaccagatcagagcccccaccgccgccctgccccagggcgtggtgatggccgccagccccggcagcctgcacagcccccagcagctggccgaggaggccaccagaaagagagagctgagactgatgaagaacagagaggccgccagagagtgcagaagaaagaagaaggagtacgtgaagtgcctggagaacagagtggccgtgctggagaaccagaacaagaccctgatcgaggagctgaaggccctgaaggacctgtactgccacaaggtggagtag

SEQ ID NO: 75276 - DNA, 291 bp, synthetic construct
  misc_feature 1..291: note = Description of Artificial Sequence: Synthetic coding sequence
  source 1..291: mol_type = other DNA
atgcccacctaccagatcagagcccccaccgccgccctgccccagggcgtggtgatggccgccagccccggcagcctgcacagcccccagcagctggccgaggaggccaccagaaagagagagctgagactgatgaagaacagagaggccgccaaggagtgcagaagaagaaagaaggagtacgtgaagtgcctggagagcagagtggccgtgctggaggtgcagaacaagaagctgatcgaggagctggagaccctgaaggacatctgcagccccaagaccgactactag

SEQ ID NO: 75277 - DNA, 339 bp, synthetic construct
  misc_feature 1..339: note = Description of Artificial Sequence: Synthetic coding sequence
  source 1..339: mol_type = other DNA
atgaacagaacccaggagctgagcggccagctgagcgccgccaccggcgacatgcccacctaccagatcagagcccccaccgccgccctgccccagggcgtggtgatggccgccagccccggcagcctgcacagcccccagcagctggccgaggaggccaccagaaagagagagctgagactgatgaagaacagagaggccgccagagagtgcagaagaaagaagaaggagtacgtgaagtgcctggagaacagagtggccgtgctggagaaccagaacaagaccctgatcgaggagctgaaggccctgaaggacctgtactgccacaaggtggagtag

SEQ ID NO: 75278 - DNA, 939 bp, synthetic construct
  misc_feature 1..939: note = Description of Artificial Sequence: Synthetic coding sequence
  source 1..939: mol_type = other DNA
atgagcaagtgcgccagaaagaagtacatcaagaccaaccccagacagatgaccatggagaccgtggagagccagcacgacggcagcatcaccgccagcctgaccgagagcaagagcgcccacgtgcagacccagaccggccagaacagcatccccgccctggcccaggtggccgccatcgccgagaccgacgagagcgccgagagcgagggcgtgatcgacagccacaagagaagagagatcctgagcagaagacccagctacagaaagatcctgaacgagctgagcagcgacgtgcccggcgtgcccaagatcgaggaggagagaagcgaggaggagggcaccccccccagcatcgccaccatggccgtgcccaccagcatctaccagaccagcaccggccagtacatcgccatcgcccagggcggcaccatccagatcagcaaccccggcagcgacggcgtgcagggcctgcaggccctgaccatgaccaacagcggcgcccccccccccggcgccaccatcgtgcagtacgccgcccagagcgccgacggcacccagcagttcttcgtgcccggcagccaggtggtggtgcaggacgaggagaccgagctggcccccagccacatggccgccgccaccggcgacatgcccacctaccagatcagagcccccaccgccgccctgccccagggcgtggtgatggccgccagccccggcagcctgcacagcccccagcagctggccgaggaggccaccagaaagagagagctgagactgatgaagaacagagaggccgccaaggagtgcagaagaagaaagaaggagtacgtgaagtgcctggagagcagagtggccgtgctggaggtgcagaacaagaagctgatcgaggagctggagaccctgaaggacatctgcagccccaagaccgactactag

SEQ ID NO: 75279 - DNA, 660 bp, synthetic construct
  misc_feature 1..660: note = Description of Artificial Sequence: Synthetic coding sequence
  source 1..660: mol_type = other DNA
atgtggtggcaccagcacaacctgtgcttcagaagacccatcgaggaggactacagcagcggcgacgtggaggagaaggtggccgccatcgccgagaccgacgagagcgccgagagcgagggcgtgatcgacagccacaagagaagagagatcctgagcagaagacccagctacagaaagatcctgaacgagctgagcagcgacgtgcccggcgtgcccaagatcgaggaggagagaagcgaggaggagggcaccccccccagcatcgccaccatggccgtgcccaccagcatctaccagaccagcaccggccagtacaacgaggagaccgagctggcccccagccacatggccgccgccaccggcgacatgcccacctaccagatcagagcccccaccgccgccctgccccagggcgtggtgatggccgccagccccggcagcctgcacagcccccagcagctggccgaggaggccaccagaaagagagagctgagactgatgaagaacagagaggccgccaaggagtgcagaagaagaaagaaggagtacgtgaagtgcctggagagcagagtggccgtgctggaggtgcagaacaagaagctgatcgaggagctggagaccctgaaggacatctgcagccccaagaccgactactag

SEQ ID NO: 75280 - DNA, 366 bp, synthetic construct
  misc_feature 1..366: note = Description of Artificial Sequence: Synthetic coding sequence
  source 1..366: mol_type = other DNA
atggccgtgaccggcgacgacaccgacgaggagaccgagctggcccccagccacatggccgccgccaccggcgacatgcccacctaccagatcagagcccccaccgccgccctgccccagggcgtggtgatggccgccagccccggcagcctgcacagcccccagcagctggccgaggaggccaccagaaagagagagctgagactgatgaagaacagagaggccgccaaggagtgcagaagaagaaagaaggagtacgtgaagtgcctggagagcagagtggccgtgctggaggtgcagaacaagaagctgatcgaggagctggagaccctgaaggacatctgcagccccaagaccgactactag

SEQ ID NO: 75281 - DNA, 330 bp, synthetic construct
  misc_feature 1..330: note = Description of Artificial Sequence: Synthetic coding sequence
  source 1..330: mol_type = other DNA
atggccgtgaccggcgacgacaccgccgccaccggcgacatgcccacctaccagatcagagcccccaccgccgccctgccccagggcgtggtgatggccgccagccccggcagcctgcacagcccccagcagctggccgaggaggccaccagaaagagagagctgagactgatgaagaacagagaggccgccaaggagtgcagaagaagaaagaaggagtacgtgaagtgcctggagagcagagtggccgtgctggaggtgcagaacaagaagctgatcgaggagctggagaccctgaaggacatctgcagccccaagaccgactactag

SEQ ID NO: 75282 - DNA, 309 bp, synthetic construct
  misc_feature 1..309: note = Description of Artificial Sequence: Synthetic coding sequence
  source 1..309: mol_type = other DNA
atggccgccgccaccggcgacatgcccacctaccagatcagagcccccaccgccgccctgccccagggcgtggtgatggccgccagccccggcagcctgcacagcccccagcagctggccgaggaggccaccagaaagagagagctgagactgatgaagaacagagaggccgccagagagtgcagaagaaagaagaaggagtacgtgaagtgcctggagaacagagtggccgtgctggagaaccagaacaagaccctgatcgaggagctgaaggccctgaaggacctgtactgccacaaggtggagtag

SEQ ID NO: 75283 - DNA, 414 bp, synthetic construct; identical to SEQ ID NO: 75264
  misc_feature 1..414: note = Description of Artificial Sequence: Synthetic coding sequence
  source 1..414: mol_type = other DNA

SEQ ID NO: 75284 - DNA, 618 bp, synthetic construct
  misc_feature 1..618: note = Description of Artificial Sequence: Synthetic coding sequence
  source 1..618: mol_type = other DNA
atgaccatggagaccgtggagagccagcacgacggcagcatcaccgccagcctgaccgagagcaagagcgcccacgtgcagacccagaccggccagaacagcatccccgccctggcccaggtggtggccatcgcccagggcggcaccatccagatcagcaaccccggcagcgacggcgtgcagggcctgcaggccctgaccatgaccaacagcggcgcccccccccccggcgccaccatcgtgcagtacgccgcccagagcgccgacggcacccagcagttcttcgtgcccggcagccaggtggtggtgcaggccgccaccggcgacatgcccacctaccagatcagagcccccaccgccgccctgccccagggcgtggtgatggccgccagccccggcagcctgcacagcccccagcagctggccgaggaggccaccagaaagagagagctgagactgatgaagaacagagaggccgccaaggagtgcagaagaagaaagaaggagtacgtgaagtgcctggagagcagagtggccgtgctggaggtgcagaacaagaagctgatcgaggagctggagaccctgaaggacatctgcagccccaagaccgactactag

SEQ ID NO: 75285 - DNA, 813 bp, synthetic construct
  misc_feature 1..813: note = Description of Artificial Sequence: Synthetic coding sequence
  source 1..813: mol_type = other DNA
atgaccatggagaccgtggagagccagcacgacggcagcatcaccgccagcctgaccgagagcaagagcgcccacgtgcagacccagaccggccagaacagcatccccgccctggcccaggtgagcgtggccggcagcggcaccagaagaggcagccccgccgtgaccctggtgcagctgcccagcggccagaccatccacgtgcagggcgtgatccagaccccccagccctgggtgatccagagcagcgagatccacaccgtgcaggtggccgccatcgccgagaccgacgagagcgccgagagcgagggcgtgatcgacagccacaagagaagagagatcctgagcagaagacccagctacagaaagatcctgaacgagctgagcagcgacgtgcccggcgtgcccaagatcgaggaggagagaagcgaggaggagggcaccccccccagcatcgccaccatggccgtgcccaccagcatctaccagaccagcaccggccagtacaccgccaccggcgacatgcccacctaccagatcagagcccccaccgccgccctgccccagggcgtggtgatggccgccagccccggcagcctgcacagcccccagcagctggccgaggaggccaccagaaagagagagctgagactgatgaagaacagagaggccgccaaggagtgcagaagaagaaagaaggagtacgtgaagtgcctggagagcagagtggccgtgctggaggtgcagaacaagaagctgatcgaggagctggagaccctgaaggacatctgcagccccaagaccgactactag

SEQ ID NO: 75286 - DNA, 342 bp, synthetic construct
  misc_feature 1..342: note = Description of Artificial Sequence: Synthetic coding sequence
  source 1..342: mol_type = other DNA
atgaacagaacccaggagctgagcggccagctgagcgccgccaccggcgacatgcccacctaccagatcagagcccccaccgccgccctgccccagggcgtggtgatggccgccagccccggcagcctgcacagcccccagcagctggccgaggaggccaccagaaagagagagctgagactgatgaagaacagagaggccgccaaggagtgcagaagaagaaagaaggagtacgtgaagtgcctggagagcagagtggccgtgctggaggtgcagaacaagaagctgatcgaggagctggagaccctgaaggacatctgcagccccaagaccgactactag

SEQ ID NO: 75287 - DNA, 465 bp, synthetic construct
  misc_feature 1..465: note = Description of Artificial Sequence: Synthetic coding sequence
  source 1..465: mol_type = other DNA
atgaccatggagaccgtggagagccagcacgacggcagcatcaccgccagcctgaccgagagcaagagcgcccacgtgcagacccagaccggccagaacagcatccccgccctggcccaggtggacgaggagaccgagctggcccccagccacatggccgccgccaccggcgacatgcccacctaccagatcagagcccccaccgccgccctgccccagggcgtggtgatggccgccagccccggcagcctgcacagcccccagcagctggccgaggaggccaccagaaagagagagctgagactgatgaagaacagagaggccgccaaggagtgcagaagaagaaagaaggagtacgtgaagtgcctggagagcagagtggccgtgctggaggtgcagaacaagaagctgatcgaggagctggagaccctgaaggacatctgcagccccaagaccgactactag

SEQ ID NO: 75288 - DNA, 339 bp, synthetic construct
  misc_feature 1..339: note = Description of Artificial Sequence: Synthetic coding sequence
  source 1..339: mol_type = other DNA
atgagcgccgaggtgcccgaggccgccagcgccgaggagcagaaggagatggaggacaaggtgaccagccccgagaaggccgaggaggccaagctgaaggccagatacccccacctgggccagaagcccggcggcagcgacttcctgagaaagagactgcagaagggccagaagtacttcgacagcggcgactacaacatggccaaggccaagatgaagaacaagcagctgcccaccgccgcccccgacaagaccgaggtgaccggcgaccacatccccaccccccaggacctgccccagagaaagcccagcctggtggccagcaagctggccggctag

SEQ ID NO: 75289 - DNA, 1926 bp, synthetic construct
  misc_feature 1..1926: note = Description of Artificial Sequence: Synthetic coding sequence
  source 1..1926: mol_type = other DNA
atgaccgagaagcccgagttccagagccaggtgtacaactacgccaaggacaacaacatcaagcaggacagcttcaaggaggagaaccccatggagaccagcgtgagcgccaacaccgaccagctgggcaacgagtacttcagacagcccccccccagaagcccccccctgatccactgcagcggcgagatgctgaagttcaccgagaagagcctggccaagagcatcgccaaggagagcgccctgaaccccagccagccccccagcttcctgtgcaagaccgccgtgcccagcaaggagatccagaactacggcgagatccccgagatgagcgtgagctacgagaaggaggtgaccgccgagggcgtggagagacccgagatcgtgagcacctggagcagcgccggcatcagctggagaagcgaggcctgcagagagaactgcgagatgcccgactgggagcagagcgccgagagcctgcagcccgtgcaggaggacatggccctgaacgaggtgctgcagaagctgaagcacaccaacagaaagcaggaggtgagaatccaggagctgcagtgcagcaacctgtacctggagaagagagtgaaggagctgcagatgaagatcaccaagcagcaggtgttcatcgacgtgatcaacaagctgaaggagaacgtggaggagctgatcgaggacaagtacaagatcatcctggagaagaacgacaccaagaagaccctgcagaacctggaggaggtgctggccaacacccagaagcacctgcaggagagcagaaacgacaaggagatgctgcagctgcagttcaagaagatcaaggccaactacgtgtgcctgcaggagagatacatgaccgagatgcagcagaagaacaagagcgtgagccagtacctggagatggacaagaccctgagcaagaaggaggaggaggtggagagactgcagcagctgaagaaggagctggagaaggccaccgccagcgccctggacctgctgaagagagagaaggaggcccaggagcaggagttcctgagcctgcaggaggagttccagaagctggagaaggagaacctggaggagagacagaagctgaagagcagactggagaagctgctgacccaggtgagaaacctgcagttcatgagcgagaacgagagaaccaagaacatcaagctgcagcagcagatcaacgaggtgaagaacgagaacgccaagctgaagcagcaggtggccagaagcgaggagcagaactacgtgcccaagttcgagaccgcccagctgaaggaccagctggaggaggtgctgaagagcgacatcaccaaggacaccaagaccacccacagcaacctgctgcccgactgcagcccctgcgaggagagactgaaccccgccgacatcaagagagccagccagctggccagcaagatgcacagcctgctggccctgatggtgggcctgctgacctgccaggacatcatcaacagcgacgccgagcacttcaaggagagcgagaaggtgagcgacatcatgctgcagaagctgaagagcctgcacctgaagaagaagaccctggacaaggaggtgatcgactgcgacagcgacgaggccaagagcatcagagacgtgcccaccctgctgggcgccaagctggacaagtaccacagcctgaacgaggagctggacttcctggtgaccagctacgaggagatcatcgagtgcgccgaccagagactggccatcagccacagccagatcgcccacctggaggagagaaacaagcacctggaggacctgatcagaaagcccagagagaaggccagaaagcccagaagcaagagcctggagaaccaccccaagagcatgaccatgatgcccgccctgttcaaggagaacagaaacgacctggactag

SEQ ID NO: 75290 - DNA, 2475 bp, synthetic construct
  misc_feature 1..2475: note = Description of Artificial Sequence: Synthetic coding sequence
  source 1..2475: mol_type = other DNA
atgaacaaggactaccagaagttctggagcagccccagcgaccccgtgcacttcgaggtggacaccagccacgagaaggtggagagcatgagcgagagcgacaccatgaacgtgagcaacctgagccagggcgtgatgctgagccacagccccatctgcatggagaccaccggcaccacctgcgacctgccccagaacgagatcaagaacttcgagagagagaacgagtacgagagcaccctgtgcgaggacgcctacggcaccctggacaacctgctgaacgacaacaacatcgagaactacagcaccaacgccctgatccagcccgtggacaccatcagcatcagcagcctgagacagttcgagaccgtgtgcaagttccactgggtggaggccttcgacgacgagatgaccgagaagcccgagttccagagccaggtgtacaactacgccaaggacaacaacatcaagcaggacagcttcaaggaggagaaccccatggagaccagcgtgagcgccaacaccgaccagctgggcaacgagtacttcagacagcccccccccagaagcccccccctgatccactgcagcggcgagatgctgaagttcaccgagaagagcctggccaagagcatcgccaaggagagcgccctgaaccccagccagccccccagcttcctgtgcaagaccgccgtgcccagcaaggagatccagaactacggcgagatccccgagatgagcgtgagctacgagaaggaggtgaccgccgagggcgtggagagacccgagatcgtgagcacctggagcagcgccggcatcagctggagaagcgaggcctgcagagagaactgcgagatgcccgactgggagcagagcgccgagagcctgcagcccgtgcaggaggacatggccctgaacgaggtgctgcagaagctgaagcacaccaacagaaagcaggaggtgagaatccaggagctgcagtgcagcaacctgtacctggagaagagagtgaaggagctgcagatgaagatcaccaagcagcaggtgttcatcgacgtgatcaacaagctgaaggagaacgtggaggagctgatcgaggacaagtacaagatcatcctggagaagaacgacaccaagaagaccctgcagaacctggaggaggtgctggccaacacccagaagcacctgcaggagagcagaaacgacaaggagatgctgcagctgcagttcaagaagatcaaggccaactacgtgtgcctgcaggagagatacatgaccgagatgcagcagaagaacaagagcgtgagccagtacctggagatggacaagaccctgagcaagaaggaggaggaggtggagagactgcagcagctgaagaaggagctggagaaggccaccgccagcgccctggacctgctgaagagagagaaggaggcccaggagcaggagttcctgagcctgcaggaggagttccagaagctggagaaggagaacctggaggagagacagaagctgaagagcagactggagaagctgctgacccaggtgagaaacctgcagttcatgagcgagaacgagagaaccaagaacatcaagctgcagcagcagatcaacgaggtgaagaacgagaacgccaagctgaagcagcaggtggccagaagcgaggagcagaactacgtgcccaagttcgagaccgcccagctgaaggaccagctggaggaggtgctgaagagcgacatcaccaaggacaccaagaccacccacagcaacctgctgcccgactgcagcccctgcgaggagagactgaaccccgccgacatcaagagagccagccagctggccagcaagatgcacagcctgctggccctgatggtgggcctgctgacctgccaggacatcatcaacagcgacgccgagcacttcaaggagagcgagaaggtgagcgacatcatgctgcagaagctgaagagcctgcacctgaagaagaagaccctggacaaggagctgctgaagcacaaggacagaatcaccaccttcagagagctgatcgccaaggagaaggccttccaggaccacgccatcaaggtgatcgactgcgacagcgacgaggccaagagcatcagagacgtgcccaccctgctgggcgccaagctggacaagtaccacagcctgaacgaggagctggacttcctggtgaccagctacgaggagatcatcgagtgcgccgaccagagactggccatcagccacagccagatcgcccacctggaggagagaaacaagcacctggaggacctgatcagaaagcccagagagaaggccagaaagcccagaagcaagagcctggagaaccaccccaagagcatgaccatgctggcctacaacctgtacatcttcatcggctacagactgggcgccgtggccgacgcctgcaaccccagcaccctgggcggcagaggcggctggatcacctag

SEQ ID NO: 75291 - DNA, 2334 bp, synthetic construct
  misc_feature 1..2334: note = Description of Artificial Sequence: Synthetic coding sequence
  source 1..2334: mol_type = other DNA
atgaacaaggactaccagaagttctggagcagccccagcgaccccgtgcacttcgaggtggacaccagccacgagaaggtggagagcatgagcgagagcgacaccatgaacgtgagcaacctgagccagggcgtgatgctgagccacagccccatctgcatggagaccaccggcaccacctgcgacctgccccagaacgagatcaagaacttcgagagagagaacgagtacgagagcaccctgtgcgaggacgcctacggcaccctggacaacctgctgaacgacaacaacatcgagaactacagcaccaacgccctgatccagcccgtggacaccatcagcatcagcagcctgagacagttcgagaccgtgtgcaagttccactgggtggaggccttcgacgacgagatgaccgagaagcccgagttccagagccaggtgtacaactacgccaaggacaacaacatcaagcaggacagcttcaaggaggagaaccccatggagaccagcgtgagcgccaacaccgaccagctgggcaacgagtacttcagacagcccccccccagaagcccccccctgatccactgcagcggcgagatgctgaagttcaccgagaagagcctggccaagagcatcgccaaggagagcgccctgaaccccagccagccccccagcttcctgtgcaagaccgccgtgcccagcaaggagatccagaactacggcgagatccccgagatgagcgtgagctacgagaaggaggtgaccgccgagggcgtggagagacccgagatcgtgagcacctggagcagcgccggcatcagctggagaagcgaggcctgcagagagaactgcgagatgcccgactgggagcagagcgccgagagcctgcagcccgtgcaggaggacatggccctgaacgaggtgctgcagaagctgaagcacaccaacagaaagcaggaggtgagaatccaggagctgcagtgcagcaacctgtacctggagaagagagtgaaggagctgcagatgaagatcaccaagcagcaggtgttcatcgacgtgatcaacaagctgaaggagaacgtggaggagctgatcgaggacaagtacaagatcatcctggagaagaacgacaccaagaagaccctgcagaacctggaggaggtgctggccaacacccagaagcacctgcaggagagcagaaacgacaaggagatgctgcagctgcagttcaagaagatcaaggccaactacgtgtgcctgcaggagagatacatgaccgagatgcagcagaagaacaagagcgtgagccagtacctggagatggacaagaccctgagcaagaaggaggaggaggtggagagactgcagcagctgaagaaggagctggagaaggccaccgccagcgccctggacctgctgaagagagagaaggaggcccaggagcaggagttcctgagcctgcaggaggagttccagaagctggagaaggagaacctggaggagagacagaagctgaagagcagactggagaagctgctgacccaggtgagaaacctgcagttcatgagcgagaacgagagaaccaagaacatcaagctgcagcagcagatcaacgaggtgaagaacgagaacgccaagctgaagcagcaggtggccagaagcgaggagcagaactacgtgcccaagttcgagaccgcccagctgaaggaccagctggaggaggtgctgaagagcgacatcaccaaggacaccaagaccacccacagcaacctgctgcccgactgcagcccctgcgaggagagactgaaccccgccgacatcaagagagccagccagctggccagcaagatgcacagcctgctggccctgatggtgggcctgctgacctgccaggacatcatcaacagcgacgccgagcacttcaaggagagcgagaaggtgagcgacatcatgctgcagaagctgaagagcctgcacctgaagaagaagaccctggacaaggaggtgatcgactgcgacagcgacgaggccaagagcatcagagacgtgcccaccctgctgggcgccaagctggacaagtaccacagcctgaacgaggagctggacttcctggtgaccagctacgaggagatcatcgagtgcgccgaccagagactggccatcagccacagccagatcgcccacctggaggagagaaacaagcacctggaggacctgatcagaaagcccagagagaaggccagaaagcccagaagcaagagcctggagaaccaccccaagagcatgaccatgatgcccgccctgttcaaggagaacagaaacgacctggactag

SEQ ID NO: 75292 - DNA, 2103 bp, synthetic construct
  misc_feature 1..2103: note = Description of Artificial Sequence: Synthetic coding sequence
  source 1..2103: mol_type = other DNA
atgaacaaggactaccagaagttctggagcagccccagcgaccccgtgcacttcgaggtggacaccagccacgagaaggtggagagcatgagcgagagcgacaccatgaacgtgagcaacctgagccagggcgtgatgctgagccacagccccatctgcatggagaccaccggcaccacctgcgacctgccccagaacgagatcaagaacttcgagagagagaacgagtacgagagcaccctgtgcgaggacgcctacggcaccctggacaacctgctgaacgacaacaacatcgagaactacagcaccaacgccctgatccagcccgtggacaccatcagcatcagcagcctgagacagttcgagaccgtgtgcaagttccactgggtggaggccttcgacgacgagatgaccgagaagcccgagttccagagccaggtgtacaactacgccaaggacaacaacatcaagcaggacagcttcaaggaggagaaccccatggagaccagcgtgagcgccaacaccgaccagctgggcaacgagtacttcagacagcccccccccagaagcccccccctgatccactgcagcggcgagatgctgaagttcaccgagaagagcctggccaagagcatcgccaaggagagcgccctgaaccccagccagccccccagcttcctgtgcaagaccgccgtgcccagcaaggagatccagaactacggcgagatccccgagatgagcgtgagctacgagaaggaggtgaccgccgagggcgtggagagacccgagatcgtgagcacctggagcagcgccggcatcagctggagaagcgaggcctgcagagagaactgcgagatgcccgactgggagcagagcgccgagagcctgcagcccgtgcaggaggacatggccctgaacgaggtgctgcagaagctgaagcacaccaacagaaagcaggaggtgagaatccaggagctgcagtgcagcaacctgtacctggagaagagagtgaaggagctgcagatgaagatcaccaagcagcaggtgttcatcgacgtgatcaacaagctgaaggagaacgtggaggagctgatcgaggacaagtacaagatcatcctggagaagaacgacaccaagaagaccctgcagaacctggaggaggtgctggccaacacccagaagcacctgcaggagagcagaaacgacaaggagatgctgcagctgcagttcaagaagatcaaggccaactacgtgtgcctgcaggagagatacatgaccgagatgcagcagaagaacaagagcgtgagccagtacctggagatggacaagaccctgagcaagaaggaggaggaggtggagagactgcagcagctgaagaaggagctggagaaggccaccgccagcgccctggacctgctgaagagagagaaggaggcccaggagcaggagttcctgagcctgcaggaggagttccagaagctggagaaggagaacctggaggagagacagaagctgaagagcagactggagaagctgctgacccaggtgagaaacctgcagttcatgagcgagaacgagagaaccaagaacatcaagctgcagcagcagatcaacgaggtgaagaacgagaacgccaagctgaagcagcaggtggccagaagcgaggagcagaactacgtgcccaagttcgagaccgcccagctgaaggaccagctggaggaggtgctgaagagcgacatcaccaaggacaccaagaccacccacagcaacctgctgcccgactgcagcccctgcgaggagagactgaaccccgccgacatcaagagagccagccagctggccagcaagatgcacagcctgctggccctgatggtgggcctgctgacctgccaggacatcatcaacagcgacgccgagcacttcaaggagagcgagaaggtgagcgacatcatgctgcagaagctgaagagcctgcacctgaagaagaagaccctggacaaggagctgctgaagcacaaggacagaatcaccaccttcagagagctgatcgccaaggagaaggccttccaggaccacgccatcaaggtgttccagggcgtgtag

SEQ ID NO: 75293 - DNA, 2520 bp, synthetic construct
  misc_feature 1..2520: note = Description of Artificial Sequence: Synthetic coding sequence
  source 1..2520: mol_type = other DNA
atgaacaaggactaccagaagttctggagcagccccagcgaccccgtgcacttcgaggtggacaccagccacgagaaggtggagagcatgagcgagagcgacaccatgaacgtgagcaacctgagccagggcgtgatgctgagccacagccccatctgcatggagaccaccggcaccacctgcgacctgccccagaacgagatcaagaacttcgagagagagaacgagtacgagagcaccctgtgcgaggacgcctacggcaccctggacaacctgctgaacgacaacaacatcgagaactacagcaccaacgccctgatccagcccgtggacaccatcagcatcagcagcctgagacagttcgagaccgtgtgcaagttccactgggtggaggccttcgacgacgagatgaccgagaagcccgagttccagagccaggtgtacaactacgccaaggacaacaacatcaagcaggacagcttcaaggaggagaaccccatggagaccagcgtgagcgccaacaccgaccagctgggcaacgagtacttcagacagcccccccccagaagcccccccctgatccactgcagcggcgagatgctgaagttcaccgagaagagcctggccaagagcatcgccaaggagagcgccctgaaccccagccagccccccagcttcctgtgcaagaccgccgtgcccagcaaggagatccagaactacggcgagatccccgagatgagcgtgagctacgagaaggaggtgaccgccgagggcgtggagagacccgagatcgtgagcacctggagcagcgccggcatcagctggagaagcgaggcctgcagagagaactgcgagatgcccgactgggagcagagcgccgagagcctgcagcccgtgcaggaggacatggccctgaacgaggtgctgcagaagctgaagcacaccaacagaaagcaggaggtgagaatccaggagctgcagtgcagcaacctgtacctggagaagagagtgaaggagctgcagatgaagatcaccaagcagcaggtgttcatcgacgtgatcaacaagctgaaggagaacgtggaggagctgatcgaggacaagtacaagatcatcctggagaagaacgacaccaagaagaccctgcagaacctggaggaggtgctggccaacacccagaagcacctgcaggagagcagaaacgacaaggagatgctgcagctgcagttcaagaagatcaaggccaactacgtgtgcctgcaggagagatacatgaccgagatgcagcagaagaacaagagcgtgagccagtacctggagatggacaagaccctgagcaagaaggaggaggaggtggagagactgcagcagctgaagaaggagctggagaaggccaccgccagcgccctggacctgctgaagagagagaaggaggcccaggagcaggagttcctgagcctgcaggaggagttccagaagctggagaaggagaacctggaggagagacagaagctgaagagcagactggagaagctgctgacccaggtgagaaacctgcagttcatgagcgagaacgagagaaccaagaacatcaagctgcagcagcagatcaacgaggtgaagaacgagaacgccaagctgaagcagcaggtggccagaagcgaggagcagaactacgtgcccaagttcgagaccgcccagctgaaggaccagctggaggaggtgctgaagagcgacatcaccaaggacaccaagaccacccacagcaacctgctgcccgactgcagcccctgcgaggagagactgaaccccgccgacatcaagagagccagccagctggccagcaagatgcacagcctgctggccctgatggtgggcctgctgacctgccaggacatcatcaacagcgacgccgagcacttcaaggagagcgagaaggtgagcgacatcatgctgcagaagctgaagagcctgcacctgaagaagaagaccctggacaaggagctgctgaagcacaaggacagaatcaccaccttcagagagctgatcgccaaggagaaggccttccaggaccacgccatcaaggtgatcgactgcgacagcgacgaggccaagagcatcagagacgtgcccaccctgctgggcgccaagctggacaagtaccacagcctgaacgaggagctggacttcctgatcaccaagctgggccacctgctggagagcaaggagaaccactgcaacagactgatcgaggagaacgacaagtaccagagacacctgggcaacctgatcaagaaggtgaccagctacgaggagatcatcgagtgcgccgaccagagactggccatcagccacagccagatcgcccacctggaggagagaaacaagcacctggaggacctgatcagaaagcccagagagaaggccagaaagcccagaagcaagagcctggagaaccaccccaagagcatgaccatgatgcccgccctgttcaaggagaacagaaacgacctggactag

SEQ ID NO: 75294 - DNA, 2112 bp, synthetic construct
  misc_feature 1..2112: note = Description of Artificial Sequence: Synthetic coding sequence
  source 1..2112: mol_type = other DNA
atggccgacagaagaagacagagagccagccaggacaccgaggacgaggagagcggcgccagcggcagcgacagcggcggcagccccctgagaggcggcggcagctgcagcggcagcgccggcggcggcggcagcggcagcctgcccagccagagaggcggcagaaccggcgccctgcacctgagaagagtggagagcggcggcgccaagagcgccgaggagagcgagtgcgagagcgaggacggcatcgagggcgacgccgtgctgagcgactacgagagcgccgaggacagcgagggcgaggagggcgagtacagcgaggaggagaacagcaaggtggagctgaagagcgaggccaacgacgccgtgaacagcagcaccaaggaggagaagggcgaggagaagcccgacaccaagagcaccgtgaccggcgagagacagagcggcgacggccaggagagcaccgagcccgtggagaacaaggtgggcaagaagggccccaagcacctggacgacgacgaggacagaaagaaccccgcctacatccccagaaagggcctgttcttcgagcacgacctgagaggccagacccaggaggaggaggtgagacccaagggcagacagagaaagctgtggaaggacgagggcagatgggagcacgacaagttcagagaggacgagcaggcccccaagagcagacaggagctgatcgccctgtacggctacgacatcagaagcgcccacaaccccgacgacatcaagcccagaagaatcagaaagcccagatacggcagccccccccagagagaccccaactggaacggcgagagactgaacaagagccacagacaccagggcctgggcggcaccctgccccccagaaccttcatcaacagaaacgccgccggcaccggcagaatgagcgcccccagaaactacagcagaagcggcggcttcaaggagggcagagccggcttcagacccgtggaggccggcggccagcacggcggcagaagcggcgagaccgtgaagcacgagatcagctacagaagcagaagactggagcagaccagcgtgagagaccccagccccgaggccgacgcccccgtgctgggcagccccgagaaggaggaggccgccagcgagccccccgccgccgcccccgacgccgccccccccccccccgacagacccatcgagaagaagagctacagcagagccagaagaaccagaaccaaggtgggcgacgccgtgaagctggccgaggaggtgccccccccccccgagggcctgatccccgccccccccgtgcccgagaccacccccaccccccccaccaagaccggcacctgggaggcccccgtggacagcagcaccagcggcctggagcaggacgtggcccagctgaacatcgccgagcagaactggagccccggccagcccagcttcctgcagcccagagagctgagaggcatgcccaaccacatccacatgggcgccggcccccccccccagttcaacagaatggaggagatgggcgtgcagggcggcagagccaagagatacagcagccagagacagagacccgtgcccgagccccccgccccccccgtgcacatcagcatcatggagggccactactacgaccccctgcagttccagggccccatctacacccacggcgacagccccgcccccctgcccccccagggcatgctggtgcagcccggcatgaacctgccccaccccggcctgcacccccaccagacccccgcccccctgcccaaccccggcctgtaccccccccccgtgagcatgagccccggccagccccccccccagcagctgctggcccccacctacttcagcgcccccggcgtgatgaacttcggcaaccccagctacccctacgcccccggcgccctgcccccccccccccccccccacctgtaccccaacacccaggcccccagccaggtgtacggcggcgtgacctactacaaccccgcccagcagcaggtgcagcccaagcccagcccccccagaagaaccccccagcccgtgaccatcaagccccccccccccgaggtggtgagcagaggcagcagctag

SEQ ID NO: 75295 - DNA, 2112 bp, synthetic construct; identical to SEQ ID NO: 75294
  misc_feature 1..2112: note = Description of Artificial Sequence: Synthetic coding sequence
  source 1..2112: mol_type = other DNA

SEQ ID NO: 75296 - DNA, 1926 bp, synthetic construct
  misc_feature 1..1926: note = Description of Artificial Sequence: Synthetic coding sequence
  source 1..1926: mol_type = other DNA
atggccgacagaagaagacagagagccagccaggacaccgaggacgaggagagcggcgccagcggcagcgacagcggcggcagccccctgagaggcggcggcagctgcagcggcagcgccggcggcggcggcagcggcagcctgcccagccagagaggcggcagaaccggcgccctgcacctgagaagagtggagagcggcggcgccaagagcgccgaggagagcgagtgcgagagcgaggacggcatcgagggcgacgccgtgctgagcgactacgagagcgccgaggacagcgagggcgaggagggcgagtacagcgaggaggagaacagcaaggtggagctgaagagcgaggccaacgacgccgtgaacagcagcaccaaggaggagaagggcgaggagaagcccgacaccaagagcaccgtgaccggcgagagacagagcggcgacggccaggagagcaccgagcccgtggagaacaaggtgggcaagaagggccccaagcacctggacgacgacgaggacagaaagaaccccgcctacatccccagaaagggcctgttcttcgagcacgacctgagaggccagacccaggaggaggaggtgagacccaagggcagacagagaaagctgtggaaggacgagggcagatgggagcacgacaagttcagagaggacgagcaggcccccaagagcagacaggagctgatcgccctgtacggctacgacatcagaagcgcccacaaccccgacgacatcaagcccagaagaatcagaaagcccagatacggcagccccccccagagagaccccaactggaacggcgagagactgaacaagagccacagacaccagggcctgggcggcaccctgccccccagaaccttcatcaacagaaacgccgccggcaccggcagaatgagcgcccccagaaactacagcagaagcggcggcttcaaggagggcagagccggcttcagacccgtggaggccggcggccagcacggcggcagaagcggcgagaccgtgaagcacgagatcagctacagaagcagaagactggagcagaccagcgtgagagaccccagccccgaggccgacgcccccgtgctgggcagccccgagaaggaggaggccgccagcgagccccccgccgccgcccccgacgccgccccccccccccccgacagacccatcgagaagaagagctacagcagagccagaagaaccagaaccaaggtgggcgacgccgtgaagctggccgaggaggtgccccccccccccgagggcctgatccccgccccccccgtgcccgagaccacccccaccccccccaccaagaccggcacctgggaggcccccgtggacagcagcaccagcggcctggagcaggacgtggcccagctgaacatcgccgagcagaactggagccccggccagcccagcttcctgcagcccagagagctgagaggcatgcccaaccacatccacatgggcgccggcccccccccccagttcaacagaatggaggagatgggcgtgcagggcggcagagccaagagatacagcagccagagacagagacccgtgcccgagccccccgccccccccgtgcacatcagcatcatggagggccactactacgaccccctgcagttccagggccccatctacacccacggcgacagccccgcccccctgcccccccagggcatgctggtgcagcccggcatgaacctgccccaccccggcctgcacccccaccagacccccgcctgccccgacagccagaccctgagacactgcgagagctgcctgtgctggagcaccgtgttcagctgcaaggacttcagcatgtgcggcggcgtgttctgctactgcttcaagggctgccccttcgtgatcagcatcgtgacctggagatag

SEQ ID NO: 75297 - DNA, 543 bp, synthetic construct
  misc_feature 1..543: note = Description of Artificial Sequence: Synthetic coding sequence
  source 1..543: mol_type = other DNA
atgcaggccgagggcagaggcaccggcggcagcaccggcgacgccgacggccccggcggccccggcatccccgacggccccggcggcaacgccggcggccccggcgaggccggcgccaccggcggcagaggccccagaggcgccggcgccgccagagccagcggccccggcggcggcgcccccagaggcccccacggcggcgccgccagcggcctgaacggctgctgcagatgcggcgccagaggccccgagagcagactgctggagttctacctggccatgcccttcgccacccccatggaggccgagctggccagaagaagcctggcccaggacgccccccccctgcccgtgcccggcgtgctgctgaaggagttcaccgtgagcggcaacatcctgaccatcagactgaccgccgccgaccacagacagctgcagctgagcatcagcagctgcctgcagcagctgagcctgctgatgtggatcacccagtgcttcctgcccgtgttcctggcccagccccccagcggccagagaagatag

SEQ ID NO: 75298 - DNA, 570 bp, synthetic construct
  misc_feature 1..570: note = Description of Artificial Sequence: Synthetic coding sequence
  source 1..570: mol_type = other DNA
atgaccgacaagaccgagaaggtggccgtggaccccgagaccgtgttcaagagacccagagagtgcgacagccccagctaccagaagagacagagaatggccctgctggccagaaagcagggcgccggcgacagcctgatcgccggcagcgccatgagcaaggccaagaagctgatgaccggccacgccatcccccccagccagctggacagccagatcgacgacttcaccggcttcagcaaggacagaatgatgcagaagcccggcagcaacgcccccgtgggcggcaacgtgaccagcagcttcagcggcgacgacctggagtgcagagagaccgccagcagccccaagagccagagagagatcaacgccgacatcaagagaaagctggtgaaggagctgagatgcgtgggccagaagtacgagaagatcttcgagatgctggagggcgtgcagggccccaccgccgtgagaaagagattcttcgagagcatcatcaaggaggccgccagatgcatgagaagagacttcgtgaagcacctgaagaagaagctgaagagaatgatctag

SEQ ID NO: 75299 - DNA, 570 bp, synthetic construct
  misc_feature 1..570: note = Description of Artificial Sequence: Synthetic coding sequence
  source 1..570: mol_type = other DNA
atgaccgacaagaccgagaaggtggccgtggaccccgagaccgtgttcaagagacccagagagtgcgacagccccagctaccagaagagacagagaatggccctgctggccagaaagcagggcgccggcgacagcctgatcgccggcagcgccatgagcaaggagaagaagctgatgaccggccacgccatcccccccagccagctggacagccagatcgacgacttcaccggcttcagcaaggacagaatgatgcagaagcccggcagcaacgcccccgtgggcggcaacgtgaccagcagcttcagcggcgacgacctggagtgcagagagaccgccagcagccccaagagccagcaggagatcaacgccgacatcaagagaaagctggtgaaggagctgagatgcgtgggccagaagtacgagaagatcttcgagatgctggagggcgtgcagggccccaccgccgtgagaaagagattcttcgagagcatcatcaaggaggccgccagatgcatgagaagagacttcgtgaagcacctgaagaagaagctgaagagaatgatctag

SEQ ID NO: 75300 - DNA, 570 bp, synthetic construct; identical to SEQ ID NO: 75299
  misc_feature 1..570: note = Description of Artificial Sequence: Synthetic coding sequence
  source 1..570: mol_type = other DNA

SEQ ID NO: 75301 - DNA, 570 bp, synthetic construct
  misc_feature 1..570: note = Description of Artificial Sequence: Synthetic coding sequence
  source 1..570: mol_type = other DNA
atgaccgacaagaccgagaaggtggccgtggaccccgagaccgtgttcaagagacccagagagtgcgacagccccagctaccagaagagacagagaatggccctgctggccagaaagcagggcgccggcgacagcctgatcgccggcagcgccatgagcaaggagaagaagctgatgaccggccacgccatcccccccagccagctggacagccagatcgacgacttcaccggcttcagcaaggacagaatgatgcagaagcccggcagcaacgcccccgtgggcggcaacgtgaccagcagcttcagcggcgacgacctggagtgcagagagaccgccagcagccccaagagccagagagagatcaacgccgacatcaagagaaagctggtgaaggagctgagatgcgtgggccagaagtacgagaagatcttcgagatgctggagggcgtgcagggccccaccgccgtgagaaagagattcttcgagagcatcatcaaggaggccgccagatgcatgagaagagacttcgtgaagcacctgaagaagaagctgaagagaatgatctag

SEQ ID NO: 75302 - DNA, 570 bp, synthetic construct; identical to SEQ ID NO: 75301
  misc_feature 1..570: note = Description of Artificial Sequence: Synthetic coding sequence
  source 1..570: mol_type = other DNA

SEQ ID NO: 75303 - DNA, 570 bp, synthetic construct; identical to SEQ ID NO: 75299
  misc_feature 1..570: note = Description of Artificial Sequence: Synthetic coding sequence
  source 1..570: mol_type = other DNA

SEQ ID NO: 75304 - DNA, 570 bp, synthetic construct
  misc_feature 1..570: note = Description of Artificial Sequence: Synthetic coding sequence
  source 1..570: mol_type = other DNA
atgaccgacaagaccgagaaggtggccgtggaccccgagaccgtgttcaagagacccagagagtgcgacagccccagctaccagaagagacagagaatggccctgctggccagaaagcagggcgccggcgacagcctgatcgccggcagcgccatgagcaaggccaagaagctgatgaccggccacgccatcccccccagccagctggacagccagatcgacgacttcaccggcttcagcaaggacagaatgatgcagaagcccggcagcaacgcccccgtgggcggcaacgtgaccagcagcttcagcggcgacgacctggagtgcagagagaccgccagcagccccaagagccagcaggagatcaacgccgacatcaagagaaagctggtgaaggagctgagatgcgtgggccagaagtacgagaagatcttcgagatgctggagggcgtgcagggccccaccgccgtgagaaagagattcttcgagagcatcatcaaggaggccgccagatgcatgagaagagacttcgtgaagcacctgaagaagaagctgaagagaatgatctag

SEQ ID NO: 75305 - DNA, 570 bp, synthetic construct; identical to SEQ ID NO: 75304
  misc_feature 1..570: note = Description of Artificial Sequence: Synthetic coding sequence
  source 1..570: mol_type = other DNA

SEQ ID NO: 75306 - DNA, 570 bp, synthetic construct
  misc_feature 1..570: note = Description of Artificial Sequence: Synthetic coding sequence
  source 1..570: mol_type = other DNA
atgaccgacaagaccgagaaggtggccgtggaccccgagaccgtgttcaagagacccagagagtgcgacagccccagctaccagaagagacagagaatggccctgctggccagaaagcagggcgccggcgacagcctgatcgccggcagcgccatgagcaaggagaagaagctgatgaccggccacgccatcccccccagccagctggacagccagatcgacgacttcaccggcttcagcaaggacggcatgatgcagaagcccggcagcaacgcccccgtgggcggcaacgtgaccagcaacttcagcggcgacgacctggagtgcagaggcatcgccagcagccccaagagccagcaggagatcaacgccgacatcaagtgccaggtggtgaaggagatcagatgcctgggcagaaagtacgagaagatcttcgagatgctggagggcgtgcagggccccaccgccgtgagaaagagattcttcgagagcatcatcaaggaggccgccagatgcatgagaagagacttcgtgaagcacctgaagaagaagctgaagagaatgatctag

SEQ ID NO: 75307 - DNA, 570 bp, synthetic construct; identical to SEQ ID NO: 75306
  misc_feature 1..570: note = Description of Artificial Sequence: Synthetic coding sequence
  source 1..570: mol_type = other DNA

SEQ ID NO: 75308 - DNA, 570 bp, synthetic construct; identical to SEQ ID NO: 75304
  misc_feature 1..570: note = Description of Artificial Sequence: Synthetic coding sequence
  source 1..570: mol_type = other DNA

SEQ ID NO: 75309 - DNA, 570 bp, synthetic construct; identical to SEQ ID NO: 75304
  misc_feature 1..570: note = Description of Artificial Sequence: Synthetic coding sequence
  source 1..570: mol_type = other DNA

SEQ ID NO: 75310 - DNA, 867 bp, synthetic construct
  misc_feature 1..867: note = Description of Artificial Sequence: Synthetic coding sequence
  source 1..867: mol_type = other DNA
atgagcgccaccggcgacagacaccccacccagggcgaccaggaggcccccgtgagccaggagggcgcccaggccgaggccgccggcgccggcaaccaggagggcggcgacagcggccccgacagcagcgacgtggtgcccgccgccgaggtggtgggcgtggccggccccgtggagggcctgggcgaggaggagggcgagcaggccgccggcctggccgccgtgcccagaggcggcagcgccgaggaggacagcgacatcggccccgccaccgaggaggaggaggaggaggagggcaacgaggccgccaacttcgacctggccgtggtggccagaagataccccgccagcggcatccacttcgtgctgctggacatggtgcacagcctgctgcacagactgagccacaacgaccacatcctgatcgagaacagacagctgagcagactgatggtgggcccccacgccgccgccagaaacctgtggggcaacctgccccccctgctgctgccccagagactgggcgccggcgccgccgccagagccggcgagggcctgggcctgatccaggaggccgccagcgtgcccgagcccgccgtgcccgccgacctggccgagatggccagagagcccgccgaggaggccgccgaggagaagctgagcgaggaggccaccgaggagcccgacgccgaggagcccgccaccgaggagcccaccgcccaggaggccaccgcccccgaggaggtgaccaagagccagcccgagaagtgggacgaggaggcccaggacgccgccggcgaggaggagaaggagcaggagaaggagaaggacgccgagaacaaggtgaagaacagcaagggcacctag

SEQ ID NO: 75311 - DNA, 867 bp, synthetic construct; identical to SEQ ID NO: 75310
  misc_feature 1..867: note = Description of Artificial Sequence: Synthetic coding sequence
  source 1..867: mol_type = other DNA

SEQ ID NO: 75312 - DNA, 867 bp, synthetic construct; identical to SEQ ID NO: 75310
  misc_feature 1..867: note = Description of Artificial Sequence: Synthetic coding sequence
  source 1..867: mol_type = other DNA

SEQ ID NO: 75313 - DNA, 867 bp, synthetic construct; identical to SEQ ID NO: 75310
  misc_feature 1..867: note = Description of Artificial Sequence: Synthetic coding sequence
  source 1..867: mol_type = other DNA

SEQ ID NO: 75314 - DNA, 867 bp, synthetic construct; identical to SEQ ID NO: 75310
  misc_feature 1..867: note = Description of Artificial Sequence: Synthetic coding sequence
  source 1..867: mol_type = other DNA

SEQ ID NO: 75315 - DNA, 867 bp, synthetic construct; identical to SEQ ID NO: 75310
  misc_feature 1..867: note = Description of Artificial Sequence: Synthetic coding sequence
  source 1..867: mol_type = other DNA

SEQ ID NO: 75316 - DNA, 867 bp, synthetic construct; identical to SEQ ID NO: 75310
  misc_feature 1..867: note = Description of Artificial Sequence: Synthetic coding sequence
  source 1..867: mol_type = other DNA

SEQ ID NO: 75317 - DNA, 867 bp, synthetic construct; identical to SEQ ID NO: 75310
  misc_feature 1..867: note = Description of Artificial Sequence: Synthetic coding sequence
  source 1..867: mol_type = other DNA

SEQ ID NO: 75318 - DNA, 867 bp, synthetic construct; identical to SEQ ID NO: 75310
  misc_feature 1..867: note = Description of Artificial Sequence: Synthetic coding sequence
  source 1..867: mol_type = other DNA

SEQ ID NO: 75319 - DNA, 867 bp, synthetic construct; identical to SEQ ID NO: 75310
  misc_feature 1..867: note = Description of Artificial Sequence: Synthetic coding sequence
  source 1..867: mol_type = other DNA

SEQ ID NO: 75320 - DNA, 867 bp, synthetic construct; identical to SEQ ID NO: 75310
  misc_feature 1..867: note = Description of Artificial Sequence: Synthetic coding sequence
  source 1..867: mol_type = other DNA

SEQ ID NO: 75321 - DNA, 867 bp, synthetic construct; identical to SEQ ID NO: 75310
  misc_feature 1..867: note = Description of Artificial Sequence: Synthetic coding sequence
  source 1..867: mol_type = other DNA

SEQ ID NO: 75322 - DNA, 867 bp, synthetic construct; identical to SEQ ID NO: 75310
  misc_feature 1..867: note = Description of Artificial Sequence: Synthetic coding sequence
  source 1..867: mol_type = other DNA

SEQ ID NO: 75323 - DNA, 867 bp, synthetic construct; identical to SEQ ID NO: 75310
  misc_feature 1..867: note = Description of Artificial Sequence: Synthetic coding sequence
  source 1..867: mol_type = other DNA

SEQ ID NO: 75324 - DNA, 900 bp, synthetic construct
  misc_feature 1..900: note = Description of Artificial Sequence: Synthetic coding sequence
  source 1..900: mol_type = other DNA
atgagcgccaccggcgacagacaccccacccagggcgaccaggaggcccccgtgagccaggagggcgcccaggccgaggccgccggcgccggcaaccaggagggcggcgacagcggccccgacagcagcgacatggtgcccgccgccgaggtggtgggcgtggccggccccgtggagggcctgggcgaggaggagggcgagcaggccgccggcctggccgccgtgccccagggcggcagcgccgaggaggacagcgacatcggccccgccaccgaggaggaggaggaggaggaggagggcaacgaggccgccaacttcgacctggccgtggccaccagaagataccccgccgccggcatcggcttcgtgttcctgtacctggtgcacagcctgctgagaagactgtaccacaacgaccacatccagatcgccaacagacacctgagcagactgatggtgggcccccacgccgccgtgcccaacctgtgggacaacccccccctgctgctgctgagccagagactgggcgccggcgccgccgcccccgagggcgagggcctgggcctgatccaggaggccgccagcgtgcaggaggccgccagcgtgcccgagcccgccgtgcccgccgacctggccgagatggccagagagcccgccgaggaggccgccgacgagaagccccccgaggaggccgccgaggagaagctgaccgaggaggccaccgaggagcccgccgccgaggagcccaccagcgaggaggccgtggcccccgaggaggtgaccaagagccagcccgagaagtgggacgaggaggcccaggacgccgccggcgaggaggagaaggagcaggagaaggagaaggacgtggagaacaaggtgaagaacagcaagggcacctag

SEQ ID NO: 75325 - DNA, 1419 bp, synthetic construct
  misc_feature 1..1419: note = Description of Artificial Sequence: Synthetic coding sequence
  source 1..1419: mol_type = other DNA
atgaagagcatcctggacggcctggccgacaccaccttcagaaccatcaccaccgacctgctgtacgtgggcagcaacgacatccagtacgaggacatcaagggcgacatggccagcaagctgggctacttcccccagaagttccccctgaccagcttcagaggcagccccttccaggagaagatgaccgccggcgacaacccccagctggtgcccgccgaccaggtgaacatcaccgagttctacaacaagagcctgagcagcttcaaggagaacgaggagaacatccagtgcggcgagaacttcatggacatcgagtgcttcatggtgctgaaccccagccagcagctggccatcgccgtgctgagcctgaccctgggcaccttcaccgtgctggagaacctgctggtgctgtgcgtgatcctgcacagcagaagcctgagatgcagacccagctaccacttcatcggcagcctggccgtggccgacctgctgggcagcgtgatcttcgtgtacagcttcatcgacttccacgtgttccacagaaaggacagcagaaacgtgttcctgttcaagctgggcggcgtgaccgccagcttcaccgccagcgtgggcagcctgttcctgaccgccatcgacagatacatcagcatccacagacccctggcctacaagagaatcgtgaccagacccaaggccgtggtggccttctgcctgatgtggaccatcgccatcgtgatcgccgtgctgcccctgctgggctggaactgcgagaagctgcagagcgtgtgcagcgacatcttcccccacatcgacgagacctacctgatgttctggatcggcgtgaccagcgtgctgctgctgttcatcgtgtacgcctacatgtacatcctgtggaaggcccacagccacgccgtgagaatgatccagagaggcacccagaagagcatcatcatccacaccagcgaggacggcaaggtgcaggtgaccagacccgaccaggccagaatggacatcagactggccaagaccctggtgctgatcctggtggtgctgatcatctgctggggccccctgctggccatcatggtgtacgacgtgttcggcaagatgaacaagctgatcaagaccgtgttcgccttctgcagcatgctgtgcctgctgaacagcaccgtgaaccccatcatctacgccctgagaagcaaggacctgagacacgccttcagaagcatgttccccagctgcgagggcaccgcccagcccctggacaacagcatgggcgacagcgactgcctgcacaagcacgccaacaacgccgccagcgtgcacagagccgccgagagctgcatcaagagcaccgtgaagatcgccaaggtgaccatgagcgtgagcaccgacaccagcgccgaggccctgtag

SEQ ID NO: 75326 - DNA, 1419 bp, synthetic construct; identical to SEQ ID NO: 75325
  misc_feature 1..1419: note = Description of Artificial Sequence: Synthetic coding sequence
  source 1..1419: mol_type = other DNA

SEQ ID NO: 75327 - DNA, 1419 bp, synthetic construct; identical to SEQ ID NO: 75325
  misc_feature 1..1419: note = Description of Artificial Sequence: Synthetic coding sequence
  source 1..1419: mol_type = other DNA

SEQ ID NO: 75328 - DNA, 1320 bp, synthetic construct
  misc_feature 1..1320: note = Description of Artificial Sequence: Synthetic coding sequence
  source 1..1320: mol_type = other DNA
atgaagagcatcctggacggcctggccgacaccaccttcagaaccatcaccaccgacctgctgggcagccccttccaggagaagatgaccgccggcgacaacccccagctggtgcccgccgaccaggtgaacatcaccgagttctacaacaagagcctgagcagcttcaaggagaacgaggagaacatccagtgcggcgagaacttcatggacatcgagtgcttcatggtgctgaaccccagccagcagctggccatcgccgtgctgagcctgaccctgggcaccttcaccgtgctggagaacctgctggtgctgtgcgtgatcctgcacagcagaagcctgagatgcagacccagctaccacttcatcggcagcctggccgtggccgacctgctgggcagcgtgatcttcgtgtacagcttcatcgacttccacgtgttccacagaaaggacagcagaaacgtgttcctgttcaagctgggcggcgtgaccgccagcttcaccgccagcgtgggcagcctgttcctgaccgccatcgacagatacatcagcatccacagacccctggcctacaagagaatcgtgaccagacccaaggccgtggtggccttctgcctgatgtggaccatcgccatcgtgatcgccgtgctgcccctgctgggctggaactgcgagaagctgcagagcgtgtgcagcgacatcttcccccacatcgacgagacctacctgatgttctggatcggcgtgaccagcgtgctgctgctgttcatcgtgtacgcctacatgtacatcctgtggaaggcccacagccacgccgtgagaatgatccagagaggcacccagaagagcatcatcatccacaccagcgaggacggcaaggtgcaggtgaccagacccgaccaggccagaatggacatcagactggccaagaccctggtgctgatcctggtggtgctgatcatctgctggggccccctgctggccatcatggtgtacgacgtgttcggcaagatgaacaagctgatcaagaccgtgttcgccttctgcagcatgctgtgcctgctgaacagcaccgtgaaccccatcatctacgccctgagaagcaaggacctgagacacgccttcagaagcatgttccccagctgcgagggcaccgcccagcccctggacaacagcatgggcgacagcgactgcctgcacaagcacgccaacaacgccgccagcgtgcacagagccgccgagagctgcatcaagagcaccgtgaagatcgccaaggtgaccatgagcgtgagcaccgacaccagcgccgaggccctgtag

SEQ ID NO: 75329 - DNA, 1419 bp, synthetic construct; identical to SEQ ID NO: 75325
  misc_feature 1..1419: note = Description of Artificial Sequence: Synthetic coding sequence
  source 1..1419: mol_type = other DNA

SEQ ID NO: 75330 - DNA, 1419 bp, synthetic construct; identical to SEQ ID NO: 75325
  misc_feature 1..1419: note = Description of Artificial Sequence: Synthetic coding sequence
  source 1..1419: mol_type = other DNA

SEQ ID NO: 75331 - DNA, 1236 bp, synthetic construct
  misc_feature 1..1236: note = Description of Artificial Sequence: Synthetic coding sequence
  source 1..1236: mol_type = other DNA
atggccctgcagatcccccccagcgcccccagccccctgaccagctgcacctgggcccagatgaccttcagcaccaagaccagcaaggagaacgaggagaacatccagtgcggcgagaacttcatggacatcgagtgcttcatggtgctgaaccccagccagcagctggccatcgccgtgctgagcctgaccctgggcaccttcaccgtgctggagaacctgctggtgctgtgcgtgatcctgcacagcagaagcctgagatgcagacccagctaccacttcatcggcagcctggccgtggccgacctgctgggcagcgtgatcttcgtgtacagcttcatcgacttccacgtgttccacagaaaggacagcagaaacgtgttcctgttcaagctgggcggcgtgaccgccagcttcaccgccagcgtgggcagcctgttcctgaccgccatcgacagatacatcagcatccacagacccctggcctacaagagaatcgtgaccagacccaaggccgtggtggccttctgcctgatgtggaccatcgccatcgtgatcgccgtgctgcccctgctgggctggaactgcgagaagctgcagagcgtgtgcagcgacatcttcccccacatcgacgagacctacctgatgttctggatcggcgtgaccagcgtgctgctgctgttcatcgtgtacgcctacatgtacatcctgtggaaggcccacagccacgccgtgagaatgatccagagaggcacccagaagagcatcatcatccacaccagcgaggacggcaaggtgcaggtgaccagacccgaccaggccagaatggacatcagactggccaagaccctggtgctgatcctggtggtgctgatcatctgctggggccccctgctggccatcatggtgtacgacgtgttcggcaagatgaacaagctgatcaagaccgtgttcgccttctgcagcatgctgtgcctgctgaacagcaccgtgaaccccatcatctacgccctgagaagcaaggacctgagacacgccttcagaagcatgttccccagctgcgagggcaccgcccagcccctggacaacagcatgggcgacagcgactgcctgcacaagcacgccaacaacgccgccagcgtgcacagagccgccgagagctgcatcaagagcaccgtgaagatcgccaaggtgaccatgagcgtgagcaccgacaccagcgccgaggccctgtag

SEQ ID NO: 75332 - DNA, 1419 bp, synthetic construct; identical to SEQ ID NO: 75325
  misc_feature 1..1419: note = Description of Artificial Sequence: Synthetic coding sequence
  source 1..1419: mol_type = other DNA

SEQ ID NO: 75333 - DNA, 237 bp, synthetic construct
  misc_feature 1..237: note = Description of Artificial Sequence: Synthetic coding sequence
  source 1..237: mol_type = other DNA
atgaagagcatcctggacggcctggccgacaccaccttcagaaccatcaccaccgacctgctgtacgtgggcagcaacgacatccagtacgaggacatcaagggcgacatggccagcaagctgggctacttcccccagaagttccccctgaccagcttcagaggcagccccttccaggagaagatgaccgccggcgacaacccccagctggtgcccgccgaccaggtgaacatctag

SEQ ID NO: 75334 - DNA, 1083 bp, synthetic construct
  misc_feature 1..1083: note = Description of Artificial Sequence: Synthetic coding sequence
  source 1..1083: mol_type = other DNA
atggaggagtgctgggtgaccgagatcgccaacggcagcaaggacggcctggacagcaaccccatgaaggactacatgatcctgagcggcccccagaagaccgccgtggccgtgctgtgcaccctgctgggcctgctgagcgccctggagaacgtggccgtgctgtacctgatcctgagcagccaccagctgagaagaaagcccagctacctgttcatcggcagcctggccggcgccgacttcctggccagcgtggtgttcgcctgcagcttcgtgaacttccacgtgttccacggcgtggacagcaaggccgtgttcctgctgaagatcggcagcgtgaccatgaccttcaccgccagcgtgggcagcctgctgctgaccgccatcgacagatacctgtgcctgagatacccccccagctacaaggccctgctgaccagaggcagagccctggtgaccctgggcatcatgtgggtgctgagcgccctggtgagctacctgcccctgatgggctggacctgctgccccagaccctgcagcgagctgttccccctgatccccaacgactacctgctgagctggctgctgttcatcgccttcctgttcagcggcatcatctacacctacggccacgtgctgtggaaggcccaccagcacgtggccagcctgagcggccaccaggacagacaggtgcccggcatggccagaatgagactggacgtgagactggccaagaccctgggcctggtgctggccgtgctgctgatctgctggttccccgtgctggccctgatggcccacagcctggccaccaccctgagcgaccaggtgaagaaggccttcgccttctgcagcatgctgtgcctgatcaacagcatggtgaaccccgtgatctacgccctgagaagcggcgagatcagaagcagcgcccaccactgcctggcccactggaagaagtgcgtgagaggcctgggcagcgaggccaaggaggaggcccccagaagcagcgtgaccgagaccgaggccgacggcaagatcaccccctggcccgacagcagagacctggacctgagcgactgctag

SEQ ID NO: 75335 - DNA, 1083 bp, synthetic construct; identical to SEQ ID NO: 75334
  misc_feature 1..1083: note = Description of Artificial Sequence: Synthetic coding sequence
  source 1..1083: mol_type = other DNA

SEQ ID NO: 75336 - DNA, 837 bp, synthetic construct
  misc_feature 1..837: note = Description of Artificial Sequence: Synthetic coding sequence
  source 1..837: mol_type = other DNA
atggacagcatgcccgagcccgccagcagatgcctgctgctgctgcccctgctgctgctgctgctgctgctgctgcccgcccccgagctgggccccagccaggccggcgccgaggagaacgactgggtgagactgcccagcaagtgcgaggtgtgcaagtacgtggccgtggagctgaagagcgccttcgaggagaccggcaagaccaaggaggtgatcggcaccggctacggcatcctggaccagaaggccagcggcgtgaagtacaccaagagcgacctgagactgatcgaggtgaccgagaccatctgcaagagactgctggactacagcctgcacaaggagagaaccggcagcaacagattcgccaagggcatgagcgagaccttcgagaccctgcacaacctggtgcacaagggcgtgaaggtggtgatggacatcccctacgagctgtggaacgagaccagcgccgaggtggccgacctgaagaagcagtgcgacgtgctggtggaggagttcgaggaggtgatcgaggactggtacagaaaccaccaggaggaggacctgaccgagttcctgtgcgccaaccacgtgctgaagggcaaggacaccagctgcctggccgagcagtggagcggcaagaagggcgacaccgccgccctgggcggcaagaagagcaagaagaagagcagcagagccaaggccgccggcggcagaagcagcagcagcaagcagagaaaggagctgggcggcctggagggcgaccccagccccgaggaggacgagggcatccagaaggccagccccctgacccacagcccccccgacgagctgtag

SEQ ID NO: 75337 - DNA, 165 bp, synthetic construct
  misc_feature 1..165: note = Description of Artificial Sequence: Synthetic coding sequence
  source 1..165: mol_type = other DNA
atggacagcatgcccgagcccgccagcagatgcctgctgctgctgcccctgctgctgctgctgctgctgctgctgcccgcccccgagctgggccccagccaggccggcgccgaggagaacgactgggtgagactgcccagcaagtgcgagggcacctgcggctag

SEQ ID NO: 75338 - DNA, 747 bp, synthetic construct
  misc_feature 1..747: note = Description of Artificial Sequence: Synthetic coding sequence
  source 1..747: mol_type = other DNA
atgggccccgtgagactgggcatcctgctgttcctgttcctggccgtgcacgaggcctgggccggcatgctgaaggaggaggacgacgacaccgagagactgcccagcaagtgcgaggtgtgcaagctgctgagcaccgagctgcaggccgagctgagcagaaccggcagaagcagagaggtgctggagctgggccaggtgctggacaccggcaagagaaagagacacgtgccctacagcgtgagcgagaccagactggaggaggccctggagaacctgtgcgagagaatcctggactacagcgtgcacgccgagagaaagggcagcctgagatacgccaagggccagagccagaccatggccaccctgaagggcctggtgcagaagggcgtgaaggtggacctgggcatccccctggagctgtgggacgagcccagcgtggaggtgacctacctgaagaagcagtgcgagaccatgctggaggagttcgaggacatcgtgggcgactggtacttccaccaccaggagcagcccctgcagaacttcctgtgcgagggccacgtgctgcccgccgccgagaccgcctgcctgcaggagacctggaccggcaaggagatcaccgacggcgaggagaagaccgagggcgaggaggagcaggaggaggaggaggaggaggaggaggaggagggcggcgacaagatgaccaagaccggcagccaccccaagctggacagagaggacctgtag

SEQ ID NO: 75339 - DNA, 798 bp, synthetic construct
  misc_feature 1..798: note = Description of Artificial Sequence: Synthetic coding sequence
  source 1..798: mol_type = other DNA
atgagagaggagatgagcctgggctgccaggaggccttcgagatcttcaagagagaccacgccgacagcgtgaccatcgacgacaacaagcagatcctgaagcagagattcagcgaggccaaggccctgggcgagagcatcaacgaggccagaagcaagatcggccacctgaaggaggagatcacccagagacacatccagcaggtggccctgggcatcagcgagaacatggccgtgcccctgatgcccgaccagcaggaggagaagctgagaagccagctggaggaggagaagagaagatacaagaccatgttcaccagactgaaggccctgaaggtggagatcgagcacctgcagctgctgatggacaaggccaaggtgaagctgcagaaggagttcgaggtgtggtgggccgaggaggccaccaacctgcaggtgaacagccccgccgtgaacagcctggaccacaccaagcccttcctgcagaccagcgacagccagcacgagtggagccagctgctgagcaacaagagcagcggcggctgggaggtgcaggaccagggcaccggcagattcgacgtgtgcgacgtgaacgccagaaagatcctgcccagcccctgccccagcccccacagccagaagcagagcagcaccagcacccccctggaggacagcatccccaagagacccgtgagcagcatccccctgaccggcgacagccagaccgacagcgacatcatcgccttcatcaaggccagacagagcatcctgcagaagcagtgcctgggcagcaactag

SEQ ID NO: 75340 - DNA, 1185 bp, synthetic construct
  misc_feature 1..1185: note = Description of Artificial Sequence: Synthetic coding sequence
  source 1..1185: mol_type = other DNA
atggccaacatgcagggcctggtggagagactggagagagccgtgagcagactggagagcctgagcgccgagagccacagaccccccggcaactgcggcgaggtgaacggcgtgatcgccggcgtggcccccagcgtggaggccttcgacaagctgatggacagcatggtggccgagttcctgaagaacagcagaatcctggccggcgacgtggagacccacgccgagatggtgcacagcgccttccaggcccagagagccttcctgctgatggccagccagtaccagcagccccacgagaacgacgtggccgccctgctgaagcccatcagcgagaagatccaggagatccagaccttcagagagagaaacagaggcagcaacatgttcaaccacctgagcgccgtgagcgagagcatccccgccctgggctggatcgccgtgagccccaagcccccccccctgcccccccccggccccccccccctgttcgagaacgagggcaagaaggaggagagcagccccagcagaagcgccctgttcgcccagctgaaccagggcgaggccatcaccaagggcctgagacacgtgaccgacgaccagaagacctacaagaaccccagcctgagagcccagggcggccagacccagagccccaccaagagccacacccccagccccaccagccccaagagctaccccagccagaagcacgcccccgtgctggagctggagggcaagaagtggagagtggagtaccaggaggacagaaacgacctggtgatcagcgagaccgagctgaagcaggtggcctacatcttcaagtgcgagaagagcaccatccagatcaagggcaaggtgaacagcatcatcatcgacaactgcaagaagctgggcctggtgttcgacaacgtggtgggcatcgtggaggtgatcaacagccaggacatccagatccaggtgatgggcagagtgcccaccatcagcatcaacaagaccgagggctgccacatctacctgagcgaggacgccctggactgcgagatcgtgagcgccaagagcagcgagatgaacatcctgatcccccaggacggcgactacagagagttccccatccccgagcagttcaagaccgcctgggacggcagcaagctgatcaccgagcccgccgagatcatggcctag

SEQ ID NO: 75341 - DNA, 597 bp, synthetic construct
  misc_feature 1..597: note = Description of Artificial Sequence: Synthetic coding sequence
  source 1..597: mol_type = other DNA
atgaagctgtacagcctgagcgtgctgtacaagggcgaggccaaggtggtgctgctgaaggccgcctacgacgtgagcagcttcagcttcttccagagaagcagcgtgcaggagttcatgaccttcaccagccagctgatcgtggagagaagcagcaagggcaccagagccagcgtgaaggagcaggactacctgtgccacgtgtacgtgagaaacgacagcctggccggcgtggtgatcgccgacaacgagtaccccagcagagtggccttcaccctgctggagaaggtgctggacgagttcagcaagcaggtggacagaatcgactggcccgtgggcagccccgccaccatccactaccccgccctggacggccacctgagcagataccagaaccccagagaggccgaccccatgaccaaggtgcaggccgagctggacgagaccaagatcatcctgcacaacaccatggagagcctgctggagagaggcgagaagctggacgacctggtgagcaagagcgaggtgctgggcacccagagcaaggccttctacaagaccgccagaaagcagaacagctgctgcgccatcatgtag

SEQ ID NO: 75342 - DNA, 3036 bp, synthetic construct
  misc_feature 1..3036: note = Description of Artificial Sequence: Synthetic coding sequence
  source 1..3036: mol_type = other DNA
atgcagaagcccagcggcctgaagccccccggcagaggcggcaagcacagcagccccatgggcagaaccagcaccggcagcgccagcagcagcgccgccgtggccgccagcagcaaggagggcagccccctgcacaagcagagcagcggccccagcagcagccccgccgccgccgccgcccccgagaagcccggccccaaggccgccgaggtgggcgacgacttcctgggcgacttcgtggtgggcgagagagtgtgggtgaacggcgtgaagcccggcgtggtgcagtacctgggcgagacccagttcgcccccggccagtgggccggcgtggtgctggacgaccccgtgggcaagaacgacggcgccgtgggcggcgtgagatacttcgagtgccccgccctgcagggcatcttcaccagacccagcaagctgaccagacagcccaccgccgagggcagcggcagcgacgcccacagcgtggagagcctgaccgcccagaacctgagcctgcacagcggcaccgccaccccccccctgaccagcagagtgatccccctgagagagagcgtgctgaacagcagcgtgaagaccggcaacgagagcggcagcaacctgagcgacagcggcagcgtgaagagaggcgagaaggacctgagactgggcgacagagtgctggtgggcggcaccaagaccggcgtggtgagatacgtgggcgagaccgacttcgccaagggcgagtggtgcggcgtggagctggacgagcccctgggcaagaacgacggcgccgtggccggcaccagatacttccagtgcccccccaagttcggcctgttcgcccccatccacaaggtgatcagaatcggcttccccagcaccagccccgccaaggccaagaagaccaagagaatggccatgggcgtgagcgccctgacccacagccccagcagcagcagcatcagcagcgtgagcagcgtggccagcagcgtgggcggcagacccagcagaagcggcctgctgaccgagaccagcagcagatacgccagaaagatcagcggcaccaccgccctgcaggaggccctgaaggagaagcagcagcacatcgagcagctgctggccgagagagacctggagagagccgaggtggccaaggccaccagccacatctgcgaggtggagaaggagatcgccctgctgaaggcccagcacgagcagtacgtggccgaggccgaggagaagctgcagagagccagactgctggtggagagcgtgagaaaggagaaggtggacctgagcaaccagctggaggaggagagaagaaaggtggaggacctgcagttcagagtggaggaggagagcatcaccaagggcgacctggagctgaccaccgtggccgagaagagcagagtgctgcagctggaggaggagctgaccctgagaagaggcgagatcgaggagctgcagcagtgcctgctgcacagcggcccccccccccccgaccaccccgacgccgccgagatcctgagactgagagagagactgctgagcgccagcaaggagcaccagagagagagcggcgtgctgagagacaagtacgagaaggccctgaaggcctaccaggccgaggtggacaagctgagagccgccaacgagaagtacgcccaggaggtggccggcctgaaggacaaggtgcagcaggccaccagcgagaacatgggcctgatggacaactggaagagcaagctggacagcctggccagcgaccaccagaagagcctggaggacctgaaggccaccctgaacagcggccccggcgcccagcagaaggagatcggcgagctgaaggccgtgatggagggcatcaagatggagcaccagctggagctgggcaacctgcaggccaagcacgacctggagaccgccatgcacgtgaaggagaaggaggccctgagagagaagctgcaggaggcccaggaggagctggccggcctgcagagacactggagagcccagctggaggtgcaggccagccagcacagactggagctgcaggaggcccaggaccagagaagagacgccgagctgagagtgcacgagctggagaagctggacgtggagtacagaggccaggcccaggccatcgagttcctgaaggagcagatcagcctggccgagaagaagatgctggactacgagagactgcagagagccgaggcccagggcaagcaggaggtggagagcctgagagagaagctgctggtggccgagaacagactgcaggccgtggaggccctgtgcagcagccagcacacccacatgatcgagagcaacgacatcagcgaggagaccatcagaaccaaggagaccgtggagggcctgcaggacaagctgaacaagagagacaaggaggtgaccgccctgaccagccagaccgagatgctgagagcccaggtgagcgccctggagagcaagtgcaagagcggcgagaagaaggtggacgccctgctgaaggagaagagaagactggaggccgagctggagaccgtgagcagaaagacccacgacgccagcggccagctggtgctgatcagccaggagctgctgagaaaggagagaagcctgaacgagctgagagtgctgctgctggaggccaacagacacagccccggccccgagagagacctgagcagagaggtgcacaaggccgagtggagaatcaaggagcagaagctgaaggacgacatcagaggcctgagagagaagctgaccggcctggacaaggagaagagcctgagcgaccagagaagatacagcctgatcgacagaagcagcgcccccgagctgctgagactgcagcaccagctgatgagcaccgaggacgccctgagagacgccctggaccaggcccagcaggtggagaagctgatggaggccatgagaagctgccccgacaaggcccagaccatcggcaacagcggcagcgccaacggcatccaccagcaggacaaggcccagaagcaggaggacaagcactag

SEQ ID NO: 75343 - DNA, 3141 bp, synthetic construct
  misc_feature 1..3141: note = Description of Artificial Sequence: Synthetic coding sequence
  source 1..3141: mol_type = other DNA
atgcagaagcccagcggcctgaagccccccggcagaggcggcaagcacagcagccccatgggcagaaccagcaccggcagcgccagcagcagcgccgccgtggccgccagcagcaaggagggcagccccctgcacaagcagagcagcggccccagcagcagccccgccgccgccgccgcccccgagaagcccggccccaaggccgccgaggtgggcgacgacttcctgggcgacttcgtggtgggcgagagagtgtgggtgaacggcgtgaagcccggcgtggtgcagtacctgggcgagacccagttcgcccccggccagtgggccggcgtggtgctggacgaccccgtgggcaagaacgacggcgccgtgggcggcgtgagatacttcgagtgccccgccctgcagggcatcttcaccagacccagcaagctgaccagacagcccaccgccgagggcagcggcagcgacgcccacagcgtggagagcctgaccgcccagaacctgagcctgcacagcggcaccgccaccccccccctgaccagcagagtgatccccctgagagagagcgtgctgaacagcagcgtgaagaccggcaacgagagcggcagcaacctgagcgacagcggcagcgtgaagagaggcgagaaggacctgagactgggcgacagagtgctggtgggcggcaccaagaccggcgtggtgagatacgtgggcgagaccgacttcgccaagggcgagtggtgcggcgtggagctggacgagcccctgggcaagaacgacggcgccgtggccggcaccagatacttccagtgcccccccaagttcggcctgttcgcccccatccacaaggtgatcagaatcggcttccccagcaccagccccgccaaggccaagaagaccaagagaatggccatgggcgtgagcgccctgacccacagccccagcagcagcagcatcagcagcgtgagcagcgtggccagcagcgtgggcggcagacccagcagaagcggcctgctgaccgagaccagcagcagatacgccagaaagatcagcggcaccaccgccctgcaggaggccctgaaggagaagcagcagcacatcgagcagctgctggccgagagagacctggagagagccgaggtggccaaggccaccagccacatctgcgaggtggagaaggagatcgccctgctgaaggcccagcacgagcagtacgtggccgaggccgaggagaagctgcagagagccagactgctggtggagagcgtgagaaaggagaaggtggacctgagcaaccagctggaggaggagagaagaaaggtggaggacctgcagttcagagtggaggaggagagcatcaccaagggcgacctggagacccagacccagctggagcacgccagaatcggcgagctggagcagagcctgctgctggagaaggcccaggccgagagactgctgagagagctggccgacaacagactgaccaccgtggccgagaagagcagagtgctgcagctggaggaggagctgaccctgagaagaggcgagatcgaggagctgcagcagtgcctgctgcacagcggcccccccccccccgaccaccccgacgccgccgagatcctgagactgagagagagactgctgagcgccagcaaggagcaccagagagagagcggcgtgctgagagacaagtacgagaaggccctgaaggcctaccaggccgaggtggacaagctgagagccgccaacgagaagtacgcccaggaggtggccggcctgaaggacaaggtgcagcaggccaccagcgagaacatgggcctgatggacaactggaagagcaagctggacagcctggccagcgaccaccagaagagcctggaggacctgaaggccaccctgaacagcggccccggcgcccagcagaaggagatcggcgagctgaaggccgtgatggagggcatcaagatggagcaccagctggagctgggcaacctgcaggccaagcacgacctggagaccgccatgcacgtgaaggagaaggaggccctgagagagaagctgcaggaggcccaggaggagctggccggcctgcagagacactggagagcccagctggaggtgcaggccagccagcacagactggagctgcaggaggcccaggaccagagaagagacgccgagctgagagtgcacgagctggagaagctggacgtggagtacagaggccaggcccaggccatcgagttcctgaaggagcagatcagcctggccgagaagaagatgctggactacgagagactgcagagagccgaggcccagggcaagcaggaggtggagagcctgagagagaagctgctggtggccgagaacagactgcaggccgtggaggccctgtgcagcagccagcacacccacatgatcgagagcaacgacatcagcgaggagaccatcagaaccaaggagaccgtggagggcctgcaggacaagctgaacaagagagacaaggaggtgaccgccctgaccagccagaccgagatgctgagagcccaggtgagcgccctggagagcaagtgcaagagcggcgagaagaaggtggacgccctgctgaaggagaagagaagactggaggccgagctggagaccgtgagcagaaagacccacgacgccagcggccagctggtgctgatcagccaggagctgctgagaaaggagagaagcctgaacgagctgagagtgctgctgctggaggccaacagacacagccccggccccgagagagacctgagcagagaggtgcacaaggccgagtggagaatcaaggagcagaagctgaaggacgacatcagaggcctgagagagaagctgaccggcctggacaaggagaagagcctgagcgaccagagaagatacagcctgatcgacagaagcagcgcccccgagctgctgagactgcagcaccagctgatgagcaccgaggacgccctgagagacgccctggaccaggcccagcaggtggagaagctgatggaggccatgagaagctgccccgacaaggcccagaccatcggcaacagcggcagcgccaacggcatccaccagcaggacaaggcccagaagcaggaggacaagcactag

SEQ ID NO: 75344 - DNA, 153 bp, synthetic construct
  misc_feature 1..153: note = Description of Artificial Sequence: Synthetic coding sequence
  source 1..153: mol_type = other DNA
ctggaggaggagagaagaaaggtggaggacctgcagttcagagtggaggaggagagcatcaccaagggcgacctggaggccgaggaccacctgagccccgagcccagcatgctgaccaccgtggccgagaagagcagagtgctgcagctgtag

SEQ ID NO: 75345 - DNA, 3141 bp, synthetic construct
  misc_feature 1..3141: note = Description of Artificial Sequence: Synthetic coding sequence
  source 1..3141: mol_type = other DNA
atgcagaagcccagcggcctgaagccccccggcagaggcggcaagcacagcagccccatgggcagaaccagcaccggcagcgccagcagcagcgccgccgtggccgccagcagcaaggagggcagccccctgcacaagcagagcagcggccccagcagcagccccgccgccgccgccgcccccgagaagcccggccccaaggccgccgaggtgggcgacgacttcctgggcgacttcgtggtgggcgagagagtgtgggtgaacggcgtgaagcccggcgtggtgcagtacctgggcgagacccagttcgcccccggccagtgggccggcgtggtgctggacgaccccgtgggcaagaacgacggcgccgtgggcggcgtgagatacttcgagtgccccgccctgcagggcatcttcaccagacccagcaagctgaccagacagcccaccgccgagggcagcggcagcgacgcccacagcgtggagagcctgaccgcccagaacctgagcctgcacagcggcaccgccaccccccccctgaccagcagagtgatccccctgagagagagcgtgctgaacagcagcgtgaagaccggcaacgagagcggcagcaacctgagcgacagcggcagcgtgaagagaggcgagaaggacctgagactgggcgacagagtgctggtgggcggcaccaagaccggcgtggtgagatacgtgggcgagaccgacttcgccaagggcgagtggtgcggcgtggagctggacgagcccctgggcaagaacgacggcgccgtggccggcaccagatacttccagtgcccccccaagttcggcctgttcgcccccatccacaaggtgatcagaatcggcttccccagcaccagccccgccaaggccaagaagaccaagagaatggccatgggcgtgagcgccctgacccacagccccagcagcagcagcatcagcagcgtgagcagcgtggccagcagcgtgggcggcagacccagcagaagcggcctgctgaccgagaccagcagcagatacgccagaaagatcagcggcaccaccgccctgcaggaggccctgaaggagaagcagcagcacatcgagcagctgctggccgagagagacctggagagagccgaggtggccaaggccaccagccacatctgcgaggtggagaaggagatcgccctgctgaaggcccagcacgagcagtacgtggccgaggccgaggagaagctgcagagagccagactgctggtggagagcgtgagaaaggagaaggtggacctgagcaaccagctggaggaggagagaagaaaggtggaggacctgcagttcagagtggaggaggagagcatcaccaagggcgacctggagacccagacccagctggagcacgccagaatcggcgagctggagcagagcctgctgctggagaaggcccaggccgagagactgctgagagagctggccgacaacagactgaccaccgtggccgagaagagcagagtgctgcagctggaggaggagctgaccctgagaagaggcgagatcgaggagctgcagcagtgcctgctgcacagcggcccccccccccccgaccaccccgacgccgccgagatcctgagactgagagagagactgctgagcgccagcaaggagcaccagagagagagcggcgtgctgagagacaagtacgagaaggccctgaaggcctaccaggccgaggtggacaagctgagagccgccaacgagaagtacgcccaggaggtggccggcctgaaggacaaggtgcagcaggccaccagcgagaacatgggcctgatggacaactggaagagcaagctggacagcctggccagcgaccaccagaagagcctggaggacctgaaggccaccctgaacagcggccccggcgcccagcagaaggagatcggcgagctgaaggccgtgatggagggcatcaagatggagcaccagctggagctgggcaacctgcaggccaagcacgacctggagaccgccatgcacgtgaaggagaaggaggccctgagagagaagctgcaggaggcccaggaggagctggccggcctgcagagacactggagagcccagctggaggtgcaggccagccagcacagactggagctgcaggaggcccaggaccagagaagagacgccgagctgagagtgcacgagctggagaagctggacgtggagtacagaggccaggcccaggccatcgagttcctgaaggagcagatcagcctggccgagaagaagatgctggactacgagagactgcagagagccgaggcccagggcaagcaggaggtggagagcctgagagagaagctgctggtggccgagaacagactgcaggccgtggaggccctgtgcagcagccagcacacccacatgatcgagagcaacgacatcagcgaggagaccatcagaaccaaggagaccgtggagggcctgcaggacaagctgaacaagagagacaaggaggtgaccgccctgaccagccagaccgagatgctgagagcccaggtgagcgccctggagagcaagtgcaagagcggcgagaagaaggtggacgccctgctgaaggagaagagaagactggaggccgagctggagaccgtgagcagaaagacccacgacgccagcggccagctggtgctgatcagccaggagctgctgagaaaggagagaagcctgaacgagctgagagtgctgctgctggaggccaacagacacagccccggccccgagagagacctgagcagagaggtgcacaaggccgagtggagaatcaaggagcagaagctgaaggacgacatcagaggcctgagagagaagctgaccggcctggacaaggagaagagcctgagcgaccagagaagatacagcctgatcgacagaagcagcgcccccgagctgctgagactgcagcaccagctgatgagcaccgaggacgccctgagagacgccctggaccaggcccagcaggtggagaagctgatggaggccatgagaagctgccccgacaaggcccagaccatcggcaacagcggcagcgccaacggcatccaccagcaggacaaggcccagaagcaggagaacacccactag

SEQ ID NO: 75346 - DNA, 4827 bp, synthetic construct
  misc_feature 1..4827: note = Description of Artificial Sequence: Synthetic coding sequence
  source 1..4827: mol_type = other DNA
atgtacagcgcccacagacccctgatgcccgccagcagcgccgccagcagaggcctgggcatgttcgtgtggaccaacgtggagcccagaagcgtggccgtgttcccctggcacagcctggtgcccttcctggcccccagccagcccgaccccagcgtgcagcccagcgaggcccagcagcccgccagccaccccgtggccagcaaccagagcaaggagcccgccgagagcgccgccgtggcccacgagagaccccccggcggcaccggcagcgccgaccccgagagaccccccggcgccacctgccccgagagccccggccccggccccccccaccccctgggcgtggtggagagcggcaagggccccccccccaccaccgaggaggaggccagcggcccccccggcgagcccagactggacagcgagaccgagagcgaccacgacgacgccttcctgagcatcatgagccccgagatccagctgcccctgccccccggcaagagaagaacccagagcctgagcgccctgcccaaggagagagacagcagcagcgagaaggacggcagaagccccaacaagagagagaaggaccacatcagaagacccatgaacgccttcatgatcttcagcaagagacacagagccctggtgcaccagagacaccccaaccaggacaacagaaccgtgagcaagatcctgggcgagtggtggtacgccctgggccccaaggagaagcagaagtaccacgacctggccttccaggtgaaggaggcccacttcaaggcccaccccgactggaagtggtgcaacaaggacagaaagaagagcagcagcgaggccaagcccaccagcctgggcctggccggcggccacaaggagaccagagagagaagcatgagcgagaccggcaccgccgccgcccccggcgtgagcagcgagctgctgagcgtggccgcccagaccctgctgagcagcgacaccaaggcccccggcagcagcagctgcggcgccgagagactgcacaccgtgggcggccccggcagcgccagacccagagccttcagccacagcggcgtgcacagcctggacggcggcgaggtggacagccaggccctgcaggagctgacccagatggtgagcggccccgccagctacagcggccccaagcccagcacccagtacggcgcccccggccccttcgccgcccccggcgagggcggcgccctggccgccaccggcagaccccccctgctgcccaccagagccagcagaagccagagagccgccagcgaggacatgaccagcgacgaggagagaatggtgatctgcgaggaggagggcgacgacgacgtgatcgccgacgacggcttcggcaccaccgacatcgacctgaagtgcaaggagagagtgaccgacagcgagagcggcgacagcagcggcgaggaccccgagggcaacaagggcttcggcagaaaggtgttcagccccgtgatcagaagcagcttcacccactgcagaccccccctggaccccgagccccccggcccccccgacccccccgtggccttcggcaagggctacggcagcgcccccagcagcagcgccagcagccccgccagcagcagcgccagcgccgccaccagcttcagcctgggcagcggcaccttcaaggcccaggagagcggccagggcagcaccgccggccccctgagaccccccccccccggcgccggcggccccgccacccccagcaaggccaccagattcctgcccatggaccccgccaccttcagaagaaagagacccgagagcgtgggcggcctggagccccccggccccagcgtgatcgccgccccccccagcggcggcggcaacatcctgcagaccctggtgctgccccccaacaaggaggagcaggagggcggcggcgccagagtgcccagcgcccccgcccccagcctggcctacggcgcccccgccgcccccctgagcagacccgccgccaccatggtgaccaacgtggtgagacccgtgagcagcacccccgtgcccatcgccagcaagcccttccccaccagcggcagagccgaggccagccccaacgacaccgccggcgccagaaccgagatgggcaccggcagcagagtgcccggcggcagccccctgggcgtgagcctggtgtacagcgacaagaagagcgccgccgccaccagccccgccccccacctggtggccggccccctgctgggcaccgtgggcaaggcccccgccaccgtgaccaacctgctggtgggcacccccggctacggcgcccccgccccccccgccgtgcagttcatcgcccagggcgcccccggcggcggcaccaccgccggcagcggcgccggcgccggcagcggccccaacggccccgtgcccctgggcatcctgcagcccggcgccctgggcaaggccggcggcatcacccaggtgcagtacatcctgcccaccctgccccagcagctgcaggtggcccccgcccccgcccccgcccccggcaccaaggccgccgcccccagcggccccgcccccaccaccagcatcagattcaccctgccccccggcaccagcaccaacggcaaggtgctggccgccaccgcccccacccccggcatccccatcctgcagagcgtgcccagcgcccccccccccaaggcccagagcgtgagccccgtgcaggcccccccccccggcggcagcgcccagctgctgcccggcaaggtgctggtgcccctggccgcccccagcatgagcgtgagaggcggcggcgccggccagcccctgcccctggtgagcccccccttcagcgtgcccgtgcagaacggcgcccagccccccagcaagatcatccagctgacccccgtgcccgtgagcacccccagcggcctggtgccccccctgagccccgccaccctgcccggccccaccagccagccccagaaggtgctgctgcccagcagcaccagaatcacctacgtgcagagcgccggcggccacgccctgcccctgggcaccagccccgccagcagccaggccggcaccgtgaccagctacggccccaccagcagcgtggccctgggcttcaccagcctgggccccagcggccccgccttcgtgcagcccctgctgagcgccggccaggcccccctgctggcccccggccaggtgggcgtgagccccgtgcccagcccccagctgccccccgcctgcgccgcccccggcggccccgtgatcaccgccttctacagcggcagccccgcccccaccagcagcgcccccctggcccagcccagccaggccccccccagcctggtgtacaccgtggccaccagcaccaccccccccgccgccaccatcctgcccaagggcccccccgcccccgccaccgccacccccgcccccaccagccccttccccagcgccaccgccggcagcatgacctacagcctggtggcccccaaggcccagagacccagccccaaggccccccagaaggtgaaggccgccatcgccagcatccccgtgggcagcttcgaggccggcgccagcggcagacccggccccgcccccagacagcccctggagcccggccccgtgagagagcccaccgcccccgagagcgagctggagggccagcccaccccccccgcccccccccccctgcccgagacctggacccccaccgccagaagcagcccccccctgcccccccccgccgaggagagaaccagcgccaagggccccgagaccatggccagcaagttccccagcagcagcagcgactggagagtgcccggccagggcctggagaacagaggcgagccccccaccccccccagccccgcccccgcccccgccgtggcccccggcggcagcagcgagagcagcagcggcagagccgccggcgacacccccgagagaaaggaggccgccggcaccggcaagaaggtgaaggtgagacccccccccctgaagaagaccttcgacagcgtggacaacagagtgctgagcgaggtggacttcgaggagagattcgccgagctgcccgagttcagacccgaggaggtgctgcccagccccaccctgcagagcctggccaccagccccagagccatcctgggcagctacagaaagaagagaaagaacagcaccgacctggacagcgcccccgaggaccccaccagccccaagagaaagatgagaagaagaagcagctgcagcagcgagcccaacacccccaagagcgccaagtgcgagggcgacatcttcaccttcgacagaaccggcaccgaggccgaggacgtgctgggcgagctggagtacgacaaggtgccctacagcagcctgagaagaaccctggaccagagaagagccctggtgatgcagctgttccaggaccacggcttcttccccagcgcccaggccaccgccgccttccaggccagatacgccgacatcttccccagcaaggtgtgcctgcagctgaagatcagagaggtgagacagaagatcatgcaggccgccacccccaccgagcagccccccggcgccgaggcccccctgcccgtgcccccccccaccggcaccgccgccgcccccgcccccacccccagccccgccggcggccccgaccccaccagccccagcagcgacagcggcaccgcccaggccgccccccccctgccccccccccccgagagcggccccggccagcccggctgggagggcgccccccagcccagcccccccccccccggccccagcaccgccgccaccggcagatag

SEQ ID NO: 75347 - DNA, 1002 bp, synthetic construct
  misc_feature 1..1002: note = Description of Artificial Sequence: Synthetic coding sequence
  source 1..1002: mol_type = other DNA
atgtacaccgccatcccccagagcggcagccccttccccggcagcgtgcaggaccccggcctgcacgtgtggagagtggagaagctgaagcccgtgcccgtggcccaggagaaccagggcgtgttcttcagcggcgacagctacctggtgctgcacaacggccccgaggaggtgagccacctgcacctgtggatcggccagcagagcagcagagacgagcagggcgcctgcgccgtgctggccgtgcacctgaacaccctgctgggcgagagacccgtgcagcacagagaggtgcagggcaacgagagcgacctgttcatgagctacttccccagaggcctgaagtaccaggagggcggcgtggagagcgccttccacaagaccagcaccggcgcccccgccgccatcaagaagctgtaccaggtgaagggcaagaagaacatcagagccaccgagagagccctgaactgggacagcttcaacaccggcgactgcttcatcctggacctgggccagaacatcttcgcctggtgcggcggcaagagcaacatcctggagagaaacaaggccagagacctggccctggccatcagagacagcgagagacagggcaaggcccaggtgctgggccccaagcccgccctgaaggagggcaaccccgaggaggacctgaccgccgacaaggccaacgcccaggccgccgccctgtacaaggtgagcgacgccaccggccagatgaacctgaccaaggtggccgacagcagccccttcgccctggagctgctgatcagcgacgactgcttcgtgctggacaacggcctgtgcggcaagatctacatctggaagggcagaaaggccaacgagaaggagagacaggccgccctgcaggtggccgagggcttcatcagcagaatgcagtacgcccccaacacccaggtggagatcctgccccagggccacgagagccccatcttcaagcagttcttcaaggactggaagtag

SEQ ID NO: 75348 - DNA, 861 bp, synthetic construct
  misc_feature 1..861: note = Description of Artificial Sequence: Synthetic coding sequence
  source 1..861: mol_type = other DNA
atggccgacttcgacgacagagtgagcgacgaggagaaggtgagaatcgccgccaagttcatcacccacgccccccccggcgagttcaacgaggtgttcaacgacgtgagactgctgctgaacaacgacaacctgctgagagagggcgccgcccacgccttcgcccagtacaacatggaccagttcacccccgtgaagatcgagggctacgaggaccaggtgctgatcaccgagcacggcgacctgggcaacagcagattcctggaccccagaaacaagatcagcttcaagttcgaccacctgagaaaggaggccagcgacccccagcccgaggaggccgacggcggcctgaagagctggagagagagctgcgacagcgccctgagagcctacgtgaaggaccactacagcaacggcttctgcaccgtgtacgccaagaccatcgacggccagcagaccatcatcgcctgcatcgagagccaccagttccagcccaagaacttctggaacggcagatggagaagcgagtggaagttcaccatcaccccccccaccgcccaggtggtgggcgtgctgaagatccaggtgcactactacgaggacggcaacgtgcagctggtgagccacaaggacgtgcaggacagcctgaccgtgagcaacgaggcccagaccgccaaggagttcatcaagatcatcgagaacgccgagaacgagtaccagaccgccatcagcgagaactaccagaccatgagcgacaccaccttcaaggccctgagaagacagctgcccgtgaccagaaccaagatcgactggaacaagatcctgagctacaagatcggcaaggagatgcagaacgcctag

SEQ ID NO: 75349 - DNA, 861 bp, synthetic construct
  misc_feature 1..861: note = Description of Artificial Sequence: Synthetic coding sequence
  source 1..861: mol_type = other DNA
atggccgacctggaggagcagctgagcgacgaggagaaggtgagaatcgccgccaagttcatcatccacgccccccccggcgagttcaacgaggtgttcaacgacgtgagactgctgctgaacaacgacaacctgctgagagagggcgccgcccacgccttcgcccagtacaacctggaccagttcacccccgtgaagatcgagggctacgaggaccaggtgctgatcaccgagcacggcgacctgggcaacggcaagttcctggaccccaagaacagaatctgcttcaagttcgaccacctgagaaaggaggccaccgaccccagaccctgcgaggtggagaacgccgtggagagctggagaaccagcgtggagaccgccctgagagcctacgtgaaggagcactaccccaacggcgtgtgcaccgtgtacggcaagaagatcgacggccagcagaccatcatcgcctgcatcgagagccaccagttccaggccaagaacttctggaacggcagatggagaagcgagtggaagttcaccatcacccccagcaccacccaggtggtgggcatcctgaagatccaggtgcactactacgaggacggcaacgtgcagctggtgagccacaaggacatccaggacagcctgaccgtgagcaacgaggtgcagaccgccaaggagttcatcaagatcgtggaggccgccgagaacgagtaccagaccgccatcagcgagaactaccagaccatgagcgacaccaccttcaaggccctgagaagacagctgcccgtgaccagaaccaagatcgactggaacaagatcctgagctacaagatcggcaaggagatgcagaacgcctag

SEQ ID NO: 75350 - DNA, 519 bp, synthetic construct
  misc_feature 1..519: note = Description of Artificial Sequence: Synthetic coding sequence
  source 1..519: mol_type = other DNA
atggccgacctggaggagcagctgagcgacgaggagaaggtgagaatcgccgccaagttcatcatccacgccccccccggcgagttcaacgaggtgttcaacgacgtgagactgctgctgaacaacgacaacctgctgagagagggcgccgcccacgccttcgcccagtacaacctggaccagttcacccccgtgaagatcgagggctacgaggaccaggtgctgatcaccgagcacggcgacctgggcaacggcaagttcctggaccccaagaacagaatctgcttcaagttcgaccacctgagaaaggaggccaccgaccccagaccctgcgaggtggagaacgccgtggagagctggagaaccagcgtggagaccgccctgagagcctacgtgaaggagcactaccccaacggcgtgtgcaccgagtggagcctggaggtgagaatggaggtgtacaaccacagcttcaaccacagcagcggctggcacctggagaacagcggcagcctgctgtag

SEQ ID NO: 75351 - DNA, 900 bp, synthetic construct
  misc_feature 1..900: note = Description of Artificial Sequence: Synthetic coding sequence
  source 1..900: mol_type = other DNA
atgaccctgagcgtgctgagcagaaaggacaaggagagagtgatcagaagactgctgctgcaggccccccccggcgagttcgtgaacgccttcgacgacctgtgcctgctgatcagagacgagaagctgatgcaccaccagggcgagtgcgccggccaccagcactgccagaagtacagcgtgcccctgtgcatcgacggcaaccccgtgctgctgagccaccacaacgtgatgggcgactacagattcttcgaccaccagagcaagctgagcttcaagtacgacctgctgcagaaccagctgaaggacatccagagccacggcatcatccagaacgaggccgagtacctgagagtggtgctgctgtgcgccctgaagctgtacgtgaacgaccactaccccaagggcaactgcaacatgctgagaaagaccgtgaagagcaaggagtacctgatcgcctgcatcgaggaccacaactacgagaccggcgagtgctggaacggcctgtggaagagcaagtggatcttccaggtgaaccccttcctgacccaggtgaccggcagaatcttcgtgcaggcccacttcttcagatgcgtgaacctgcacatcgagatcagcaaggacctgaaggagagcctggagatcgtgaaccaggcccagctggccctgagcttcgccagactggtggaggagcaggagaacaagttccaggccgccgtgctggaggagctgcaggagctgagcaacgaggccctgagaaagatcctgagaagagacctgcccgtgaccagaaccctgatcgactggcacagaatcctgagcgacctgaacctggtgatgtaccccaagctgggctacgtgatctacagcagaagcgtgctgtgcaactggatcatctag

SEQ ID NO: 75352 - DNA, 834 bp, synthetic construct
  misc_feature 1..834: note = Description of Artificial Sequence: Synthetic coding sequence
  source 1..834: mol_type = other DNA
atgagcgaccagcagctggactgcgccctggacctgatgagaagactgcccccccagcagatcgagaagaacctgagcgacctgatcgacctggtgcccagcctgtgcgaggacctgctgagcagcgtggaccagcccctgaagatcgccagagacaaggtggtgggcaaggactacctgctgtgcgactacaacagagacggcgacagctacagaagcccctggagcaacaagtacgacccccccctggaggacggcgccatgcccagcgccagactgagaaagctggaggtggaggccaacaacgccttcgaccagtacagagacctgtacttcgagggcggcgtgagcagcgtgtacctgtgggacctggaccacggcttcgccggcgtgatcctgatcaagaaggccggcgacggcagcaagaagatcaagggctgctgggacagcatccacgtggtggaggtgcaggagaagagcagcggcagaaccgcccactacaagctgaccagcaccgtgatgctgtggctgcagaccaacaagagcggcagcggcaccatgaacctgggcggcagcctgaccagacagatggagaaggacgagaccgtgagcgactgcagcccccacatcgccaacatcggcagactggtggaggacatggagaacaagatcagaagcaccctgaacgagatctacttcggcaagaccaaggacatcgtgaacggcctgagaagcatcgacgccatccccgacaaccagaagttcaagcagctgcagagagagctgagccaggtgctgacccagagacagatctacatccagcccgacaactag

SEQ ID NO: 75353 - DNA, 783 bp, synthetic construct
  misc_feature 1..783: note = Description of Artificial Sequence: Synthetic coding sequence
  source 1..783: mol_type = other DNA
atgcccagacagttccaggacaccggcttcagcagacccggcctgggccagcccagaagatgcgaccccgagcccagaaagagcgaccagcagctggactgcgccctggacctgatgagaagactgcccccccagcagatcgagaagaacctgagcgacctgatcgacctggtgcccagcctgtgcgaggacctgctgagcagcgtggaccagcccctgaagatcgccagagacaaggtggtgggcaaggactacctgctgtgcgactacaacagagacggcgacagctacagaagcccctggagcaacaagtacgacccccccctggaggacggcgccatgcccagcgccagactgagaaagctggaggtggaggccaacaacgccttcgaccagtacagagacctgtacttcgagggcggcgtgagcagcgtgtacctgtgggacctggaccacggcttcgccggcgtgatcctgatcaagaaggccggcgacggcagcaagaagatcaagggctgctgggacagcatccacgtggtggaggtgcaggagaagagcagcggcagaaccgcccactacaagctgaccagcaccgtgatgctgtggctgcagaccaacaagagcggcagcggcaccatgaacctgggcggcagcctgaccagacagatggagaaggacgagaccgtgagcgactgcagcccccacatcgccaacatcggcagactggtggaggtgtgcgccgacttctgcagacagatcaagaccagaagcagcgaggagtag

SEQ ID NO: 75354 - DNA, 834 bp, synthetic construct; identical to SEQ ID NO: 75352
  misc_feature 1..834: note = Description of Artificial Sequence: Synthetic coding sequence
  source 1..834: mol_type = other DNA

SEQ ID NO: 75355 - DNA, 783 bp, synthetic construct
  misc_feature 1..783: note = Description of Artificial Sequence: Synthetic coding sequence
  source 1..783: mol_type = other DNA
atgagaagactgcccccccagcagatcgagaagaacctgagcgacctgatcgacctggtgcccagcctgtgcgaggacctgctgagcagcgtggaccagcccctgaagatcgccagagacaaggtggtgggcaaggactacctgctgtgcgactacaacagagacggcgacagctacagaagcccctggagcaacaagtacgacccccccctggaggacggcgccatgcccagcgccagactgagaaagctggaggtggaggccaacaacgccttcgaccagtacagagacctgtacttcgagggcggcgtgagcagcgtgtacctgtgggacctggaccacggcttcgccggcgtgatcctgatcaagaaggccggcgacggcagcaagaagatcaagggctgctgggacagcatccacgtggtggaggtgcaggagaagagcagcggcagaaccgcccactacaagctgaccagcaccgtgatgctgtggctgcagaccaacaagagcggcagcggcaccatgaacctgggcggcagcctgaccagacagatggagaaggacgagaccgtgagcgactgcagcccccacatcgccaacatcggcagactggtggaggacatggagaacaagatcagaagcaccctgaacgagatctacttcggcaagaccaaggacatcgtgaacggcctgagaagcgtgcagaccttcgccgacaagagcaagcaggaggccctgaagaacgacctggtggaggccctgaagagaaagcagcagtgctag

SEQ ID NO: 75356 - DNA, 1005 bp, synthetic construct
  misc_feature 1..1005: note = Description of Artificial Sequence: Synthetic coding sequence
  source 1..1005: mol_type = other DNA
atgggcggcccccaggacaaggacgagagaaccatcgccctggtgagaccctggccctggggccaccaggccctggaccccgcctacggcctggacaccatgcaccccagcagaagaagcctgcccttccccctgaactgccagctggccagagtgggcaccgccgactacggcagccccagcgaccagagcgaccagcagctggactgcgccctggacctgatgagaagactgcccccccagcagatcgagaagaacctgagcgacctgatcgacctggtgcccagcctgtgcgaggacctgctgagcagcgtggaccagcccctgaagatcgccagagacaaggtggtgggcaaggactacctgctgtgcgactacaacagagacggcgacagctacagaagcccctggagcaacaagtacgacccccccctggaggacggcgccatgcccagcgccagactgagaaagctggaggtggaggccaacaacgccttcgaccagtacagagacctgtacttcgagggcggcgtgagcagcgtgtacctgtgggacctggaccacggcttcgccggcgtgatcctgatcaagaaggccggcgacggcagcaagaagatcaagggctgctgggacagcatccacgtggtggaggtgcaggagaagagcagcggcagaaccgcccactacaagctgaccagcaccgtgatgctgtggctgcagaccaacaagagcggcagcggcaccatgaacctgggcggcagcctgaccagacagatggagaaggacgagaccgtgagcgactgcagcccccacatcgccaacatcggcagactggtggaggacatggagaacaagatcagaagcaccctgaacgagatctacttcggcaagaccaaggacatcgtgaacggcctgagaagcgtgcagaccttcgccgacaagagcaagcaggaggccctgaagaacgacctggtggaggccctgaagagaaagcagcagtgctag

SEQ ID NO: 75357 - DNA, 819 bp, synthetic construct
  misc_feature 1..819: note = Description of Artificial Sequence: Synthetic coding sequence
  source 1..819: mol_type = other DNA
atgagcgaccagcagctggactgcgccctggacctgatgagaagactgcccccccagcagatcgagaagaacctgagcgacctgatcgacctggtgcccagcctgtgcgaggacctgctgagcagcgtggaccagcccctgaagatcgccagagacaaggtggtgggcaaggactacctgctgtgcgactacaacagagacggcgacagctacagaagcccctggagcaacaagtacgacccccccctggaggacggcgccatgcccagcgccagactgagaaagctggaggtggaggccaacaacgccttcgaccagtacagagacctgtacttcgagggcggcgtgagcagcgtgtacctgtgggacctggaccacggcttcgccggcgtgatcctgatcaagaaggccggcgacggcagcaagaagatcaagggctgctgggacagcatccacgtggtggaggtgcaggagaagagcagcggcagaaccgcccactacaagctgaccagcaccgtgatgctgtggctgcagaccaacaagagcggcagcggcaccatgaacctgggcggcagcctgaccagacagatggagaaggacgagaccgtgagcgactgcagcccccacatcgccaacatcggcagactggtggaggacatggagaacaagatcagaagcaccctgaacgagatctacttcggcaagaccaaggacatcgtgaacggcctgagaagcgtgcagaccttcgccgacaagagcaagcaggaggccctgaagaacgacctggtggaggccctgaagagaaagcagcagtgctag

SEQ ID NO: 75358 - DNA, 621 bp, synthetic construct
  misc_feature 1..621: note = Description of Artificial Sequence: Synthetic coding sequence
  source 1..621: mol_type = other DNA
atgagaagactgcccccccagcagatcgagaagaacctgagcgacctgatcgacctggtgcccagcctgtgcgaggacctgctgagcagcgtggaccagcccctgaagatcgccagagacaaggtggtgggcaaggactacctgctgtgcgactacaacagagacggcgacagctacagaagcccctggagcaacaagtacgacccccccctggaggacggcgccatgcccagcgccagactgagaaagctggaggtggaggccaacaacgccttcgaccagtacagagacctgtacttcgagggcggcgtgagcagcgtgtacctgtgggacctggaccacggcttcgccggcgtgatcctgatcaagaaggccggcgacggcagcaagaagatcaagggctgctgggacagcatccacgtggtggaggtgcaggagaagagcagcggcagaaccgcccactacaagctgaccagcaccgtgatgctgtggctgcagaccaacaagagcggcagcggcaccatgaacctgggcggcagcctgaccagacagatggagaaggacgagaccgtgagcgactgcagcccccacatcgccaacatcggcagactggtggagtag

SEQ ID NO: 75359 - DNA, 906 bp, synthetic construct
  misc_feature 1..906: note = Description of Artificial Sequence: Synthetic coding sequence
  source 1..906: mol_type = other DNA
atgcaccccagcagaagaagcctgcccttccccctgaactgccagctggccagagtgggcaccgccgactacggcagccccagcgaccagagcgaccagcagctggactgcgccctggacctgatgagaagactgcccccccagcagatcgagaagaacctgagcgacctgatcgacctggtgcccagcctgtgcgaggacctgctgagcagcgtggaccagcccctgaagatcgccagagacaaggtggtgggcaaggactacctgctgtgcgactacaacagagacggcgacagctacagaagcccctggagcaacaagtacgacccccccctggaggacggcgccatgcccagcgccagactgagaaagctggaggtggaggccaacaacgccttcgaccagtacagagacctgtacttcgagggcggcgtgagcagcgtgtacctgtgggacctggaccacggcttcgccggcgtgatcctgatcaagaaggccggcgacggcagcaagaagatcaagggctgctgggacagcatccacgtggtggaggtgcaggagaagagcagcggcagaaccgcccactacaagctgaccagcaccgtgatgctgtggctgcagaccaacaagagcggcagcggcaccatgaacctgggcggcagcctgaccagacagatggagaaggacgagaccgtgagcgactgcagcccccacatcgccaacatcggcagactggtggaggacatggagaacaagatcagaagcaccctgaacgagatctacttcggcaagaccaaggacatcgtgaacggcctgagaagcgtgcagaccttcgccgacaagagcaagcaggaggccctgaagaacgacctggtggaggccctgaagagaaagcagcagtgctag

SEQ ID NO: 75360 - DNA, 366 bp, synthetic construct
  misc_feature 1..366: note = Description of Artificial Sequence: Synthetic coding sequence
  source 1..366: mol_type = other DNA
atgctgaaggtgcccagcctgtgcgaggacctgctgagcagcgtggaccagcccctgaagatcgccagagacaaggtggtgggcaaggactacctgctgtgcgactacaacagagacggcgacagctacagaagcccctggagcaacaagtacgacccccccctggaggacggcgccatgcccagcgccagactgagaaagctggaggtggaggccaacaacgccttcgaccagtacagagacctgtacttcgagggcggcgtgagcagcgtgtacctgtgggacctggaccacggcttcgccggcgtgatcctgatcaagaaggccggcgacggcagcaagaagatcaagggctgctgggactag

SEQ ID NO: 75361 - DNA, 1047 bp, synthetic construct
  misc_feature 1..1047: note = Description of Artificial Sequence: Synthetic coding sequence
  source 1..1047: mol_type = other DNA
atgtacaccgccatcccccagagcggcagccccttccccggcagcgtgcaggaccccggcctgcacgtgtggagagtggagaagctgaagcccgtgcccgtggcccaggagaaccagggcgtgttcttcagcggcgacagctacctggtgctgcacaacggccccgaggaggtgagccacctgcacctgtggatcggccagcagagcagcagagacgagcagggcgcctgcgccgtgctggccgtgcacctgaacaccctgctgggcgagagacccgtgcagcacagagaggtgcagggcaacgagagcgacctgttcatgagctacttccccagaggcctgaagtaccaggagggcggcgtggagagcgccttccacaagaccagcaccggcgcccccgccgccatcaagaagctgtaccaggtgaagggcaagaagaacatcagagccaccgagagagccctgaactgggacagcttcaacaccggcgactgcttcatcctggacctgggccagaacatcttcgcctggtgcggcggcaagagcaacatcctggagagaaacaaggccagagacctggccctggccatcagagacagcgagagacagggcaaggcccaggtggagatcgtgaccgacggcgaggagcccgccgagatgatccaggtgctgggccccaagcccgccctgaaggagggcaaccccgaggaggacctgaccgccgacaaggccaacgcccaggccgccgccctgtacaaggtgagcgacgccaccggccagatgaacctgaccaaggtggccgacagcagccccttcgccctggagctgctgatcagcgacgactgcttcgtgctggacaacggcctgtgcggcaagatctacatctggaagggcagaaaggccaacgagaaggagagacaggccgccctgcaggtggccgagggcttcatcagcagaatgcagtacgcccccaacacccaggtggagatcctgccccagggccacgagagccccatcttcaagcagttcttcaaggactggaagtag

SEQ ID NO: 75362 - DNA, 657 bp, synthetic construct
  misc_feature 1..657: note = Description of Artificial Sequence: Synthetic coding sequence
  source 1..657: mol_type = other DNA
atgtacaccgccatcccccagagcggcagccccttccccggcagcgtgcaggaccccggcctgcacgtgtggagagtggagaagctgaagcccgtgcccgtggcccaggagaaccagggcgtgttcttcagcggcgacagctacctggtgctgcacaacggccccgaggaggtgagccacctgcacctgtggatcggccagcagagcagcagagacgagcagggcgcctgcgccgtgctggccgtgcacctgaacaccctgctgggcgagagacccgtgcagcacagagaggtgcagggcaacgagagcgacctgttcatgagctacttccccagaggcctgaagtaccaggagggcggcgtggagagcgccttccacaagaccagcaccggcgcccccgccgccatcaagaagctgtaccaggtgaagggcaagaagaacatcagagccaccgagagagccctgaactgggacagcttcaacaccggcgactgcttcatcctggacctgggccagaacatcttcgcctggtgcggcggcaagagcaacatcctggagagaaacaaggccagagacctggccctggccatcagagacagcgagagacagggcaaggcccaggtggagatcgtgaccgacggcgaggagcccgcctag

SEQ ID NO: 75363 - DNA, 1047 bp, synthetic construct; identical to SEQ ID NO: 75361
  misc_feature 1..1047: note = Description of Artificial Sequence: Synthetic coding sequence
  source 1..1047: mol_type = other DNA

SEQ ID NO: 75364 - DNA, 1047 bp, synthetic construct; identical to SEQ ID NO: 75361
  misc_feature 1..1047: note = Description of Artificial Sequence: Synthetic coding sequence
  source 1..1047: mol_type = other DNA

SEQ ID NO: 75365 - DNA, 762 bp, synthetic construct
  misc_feature 1..762: note = Description of Artificial Sequence: Synthetic coding sequence
  source 1..762: mol_type = other DNA
atgtacaccgccatcccccagagcggcagccccttccccggcagcgtgcaggaccccggcctgcacgtgtggagagtggagaagctgaagcccgtgcccgtggcccaggagaaccagggcgtgttcttcagcggcgacagctacctggtgctgcacaacggccccgaggaggtgagccacctgcacctgtggatcggccagcagagcagcagagacgagcagggcgcctgcgccgtgctggccgtgcacctgaacaccctgctgggcgagagacccgtgcagcacagagaggtgcagggcaacgagagcgacctgttcatgagctacttccccagaggcctgaagtaccaggagggcggcgtggagagcgccttccacaagaccagcaccggcgcccccgccgccatcaagaagctgtaccaggtgaagggcaagaagaacatcagagccaccgagagagccctgaactgggacagcttcaacaccggcgactgcttcatcctggacctgggccagaacatcttcgcctggtgcggcggcaagagcaacatcctggagagaaacaaggccagagacctggccctggccatcagagacagcgagagacagggcaaggcccaggtggagatcgtgaccgacggcgaggagcccgccgagatgatccaggtgctgggccccaagcccgccctgaaggagggcaaccccgaggaggacctgaccgccgacaaggccaacgcccaggccgccgccctgtacaagtag

SEQ ID NO: 75366 - DNA, 762 bp, synthetic construct; identical to SEQ ID NO: 75365
  misc_feature 1..762: note = Description of Artificial Sequence: Synthetic coding sequence
  source 1..762: mol_type = other DNA

SEQ ID NO: 75367 - DNA, 762 bp, synthetic construct; identical to SEQ ID NO: 75365
  misc_feature 1..762: note = Description of Artificial Sequence: Synthetic coding sequence
  source 1..762: mol_type = other DNA

SEQ ID NO: 75368 - DNA, 984 bp, synthetic construct
  misc_feature 1..984: note = Description of Artificial Sequence: Synthetic coding sequence
  source 1..984: mol_type = other DNA
atgtacaccgccatcccccagagcggcagccccttccccggcagcgtgcaggaccccggcctgcacgtgtggagagtggagaagctgaagcccgtgcccgtggcccaggagaaccagggcgtgttcttcagcggcgacagctacctggtgctgcacaacggccccgaggaggtgagccacctgcacctgaacaccctgctgggcgagagacccgtgcagcacagagaggtgcagggcaacgagagcgacctgttcatgagctacttccccagaggcctgaagtaccaggagggcggcgtggagagcgccttccacaagaccagcaccggcgcccccgccgccatcaagaagctgtaccaggtgaagggcaagaagaacatcagagccaccgagagagccctgaactgggacagcttcaacaccggcgactgcttcatcctggacctgggccagaacatcttcgcctggtgcggcggcaagagcaacatcctggagagaaacaaggccagagacctggccctggccatcagagacagcgagagacagggcaaggcccaggtggagatcgtgaccgacggcgaggagcccgccgagatgatccaggtgctgggccccaagcccgccctgaaggagggcaaccccgaggaggacctgaccgccgacaaggccaacgcccaggccgccgccctgtacaaggtgagcgacgccaccggccagatgaacctgaccaaggtggccgacagcagccccttcgccctggagctgctgatcagcgacgactgcttcgtgctggacaacggcctgtgcggcaagatctacatctggaagggcagaaaggccaacgagaaggagagacaggccgccctgcaggtggccgagggcttcatcagcagaatgcagtacgcccccaacacccaggtggagatcctgccccagggccacgagagccccatcttcaagcagttcttcaaggactggaagtag

SEQ ID NO: 75369 - DNA, 654 bp, synthetic construct
  misc_feature 1..654: note = Description of Artificial Sequence: Synthetic coding sequence
  source 1..654: mol_type = other DNA
atggagggcagcttcagcgacggcggcgccctgcccgagggcctggccgaggaggccgagccccagggcgccgcctggagcggcgacagcggcaccgtgagccagagccacagcagcgccagcggcccctgggaggacgagggcgccgaggacggcgcccccggcagagacctgcccctgctgagaagagccgccgccggctacgccgcctgcctgctgcccggcgccggcgccagacccgaggtggaggccctggacgccagcctggaggacctgctgaccagagtggacgagttcgtgggcatgctggacatgctgagaggcgacagcagccacgtggtgagcgagggcgtgcccagaatccacgccaaggccgccgagatgagaagaatctacagcagaatcgacagactggaggccttcgtgagaatggtgggcggcagagtggccagaatggaggagcaggtgaccaaggccgaggccgagctgggcaccttccccagagccttcaagaagctgctgcacaccatgaacgtgcccagcctgttcagcaagagcgcccccagcagaccccagcaggccggctacgaggcccccgtgctgttcagaaccgaggactacttcccctgctgcagcgagagaccccagctgtag

SEQ ID NO: 75370 - DNA, 6678 bp, synthetic construct
  misc_feature 1..6678: note = Description of Artificial Sequence: Synthetic coding sequence
  source 1..6678: mol_type = other DNA
atggccgccctggtgctggaggacggcagcgtgctgagaggccagcccttcggcgccgccgtgagcaccgccggcgaggtggtgttccagaccggcatggtgggctaccccgaggccctgaccgaccccagctacaaggcccagatcctggtgctgacctaccccctgatcggcaactacggcatcccccccgacgagatggacgagttcggcctgtgcaagtggttcgagagcagcggcatccacgtggccgccctggtggtgggcgagtgctgccccacccccagccactggagcgccaccagaaccctgcacgagtggctgcagcagcacggcatccccggcctgcagggcgtggacaccagagagctgaccaagaagctgagagagcagggcagcctgctgggcaagctggtgcagaacggcaccgagcccagcagcctgcccttcctggaccccaacgccagacccctggtgcccgaggtgagcatcaagacccccagagtgttcaacaccggcggcgcccccagaatcctggccctggactgcggcctgaagtacaaccagatcagatgcctgtgccagagaggcgccgaggtgaccgtggtgccctgggaccacgccctggacagccaggagtacgagggcctgttcctgagcaacggccccggcgaccccgccagctaccccagcgtggtgagcaccctgagcagagtgctgagcgagcccaaccccagacccgtgttcggcatctgcctgggccaccagctgctggccctggccatcggcgccaagacctacaagatgagatacggcaacagaggccacaaccagccctgcctgctggtgggcagcggcagatgcttcctgaccagccagaaccacggcttcgccgtggagaccgacagcctgcccgccgactgggcccccctgttcaccaacgccaacgacggcagcaacgagggcatcgtgcacaacagcctgcccttcttcagcgtgcagttccaccccgagcaccaggccggccccagcgacatggagctgctgttcgacatcttcctggagaccgtgaaggaggccaccgccggcaaccccggcggccagaccgtgagagagagactgaccgagagactgtgcccccccggcatccccacccccggcagcggcctgcccccccccagaaaggtgctgatcctgggcagcggcggcctgagcatcggccaggccggcgagttcgactacagcggcagccaggccatcaaggccctgaaggaggagaacatccagaccctgctgatcaaccccaacatcgccaccgtgcagaccagccagggcctggccgacaaggtgtacttcctgcccatcaccccccactacgtgacccaggtgatcagaaacgagagacccgacggcgtgctgctgaccttcggcggccagaccgccctgaactgcggcgtggagctgaccaaggccggcgtgctggccagatacggcgtgagagtgctgggcacccccgtggagaccatcgagctgaccgaggacagaagagccttcgccgccagaatggccgagatcggcgagcacgtggcccccagcgaggccgccaacagcctggagcaggcccaggccgccgccgagagactgggctaccccgtgctggtgagagccgccttcgccctgggcggcctgggcagcggcttcgccagcaacagagaggagctgagcgccctggtggcccccgccttcgcccacaccagccaggtgctggtggacaagagcctgaagggctggaaggagatcgagtacgaggtggtgagagacgcctacggcaactgcgtgaccgtgtgcaacatggagaacctggaccccctgggcatccacaccggcgagagcatcgtggtggcccccagccagaccctgaacgacagagagtaccagctgctgagacagaccgccatcaaggtgacccagcacctgggcatcgtgggcgagtgcaacgtgcagtacgccctgaaccccgagagcgagcagtactacatcatcgaggtgaacgccagactgagcagaagcagcgccctggccagcaaggccaccggctaccccctggcctacgtggccgccaagctggccctgggcatccccctgcccgagctgagaaacagcgtgaccggcggcaccgccgccttcgagcccagcgtggactactgcgtggtgaagatccccagatgggacctgagcaagttcctgagagtgagcaccaagatcggcagctgcatgaagagcgtgggcgaggtgatgggcatcggcagaagcttcgaggaggccttccagaaggccctgagaatggtggacgagaactgcgtgggcttcgaccacaccgtgaagcccgtgagcgacatggagctggagacccccaccgacaagagaatcttcgtggtggccgccgccctgtgggccggctacagcgtggacagactgtacgagctgaccagaatcgacagatggttcctgcacagaatgaagagaatcatcgcccacgcccagctgctggagcagcacagaggccagcccctgccccccgacctgctgcagcaggccaagtgcctgggcttcagcgacaagcagatcgccctggccgtgctgagcaccgagctggccgtgagaaagctgagacaggagctgggcatctgccccgccgtgaagcagatcgacaccgtggccgccgagtggcccgcccagaccaactacctgtacctgacctactggggcaccacccacgacctgaccttcagaaccccccacgtgctggtgctgggcagcggcgtgtacagaatcggcagcagcgtggagttcgactggtgcgccgtgggctgcatccagcagctgagaaagatgggctacaagaccatcatggtgaactacaaccccgagaccgtgagcaccgactacgacatgtgcgacagactgtacttcgacgagatcagcttcgaggtggtgatggacatctacgagctggagaaccccgagggcgtgatcctgagcatgggcggccagctgcccaacaacatggccatggccctgcacagacagcagtgcagagtgctgggcaccagccccgaggccatcgacagcgccgagaacagattcaagttcagcagactgctggacaccatcggcatcagccagccccagtggagagagctgagcgacctggagagcgccagacagttctgccagaccgtgggctacccctgcgtggtgagacccagctacgtgctgagcggcgccgccatgaacgtggcctacaccgacggcgacctggagagattcctgagcagcgccgccgccgtgagcaaggagcaccccgtggtgatcagcaagttcatccaggaggccaaggagatcgacgtggacgccgtggccagcgacggcgtggtggccgccatcgccatcagcgagcacgtggagaacgccggcgtgcacagcggcgacgccaccctggtgacccccccccaggacatcaccgccaagaccctggagagaatcaaggccatcgtgcacgccgtgggccaggagctgcaggtgaccggccccttcaacctgcagctgatcgccaaggacgaccagctgaaggtgatcgagtgcaacgtgagagtgagcagaagcttccccttcgtgagcaagaccctgggcgtggacctggtggccctggccaccagagtgatcatgggcgaggaggtggagcccgtgggcctgatgaccggcagcggcgtggtgggcgtgaaggtgccccagttcagcttcagcagactggccggcgccgacgtggtgctgggcgtggagatgaccagcaccggcgaggtggccggcttcggcgagagcagatgcgaggcctacctgaaggccatgctgagcaccggcttcaagatccccaagaagaacatcctgctgaccatcggcagctacaagaacaagagcgagctgctgcccaccgtgagactgctggagagcctgggctacagcctgtacgccagcctgggcaccgccgacttctacaccgagcacggcgtgaaggtgaccgccgtggactggcacttcgaggaggccgtggacggcgagtgccccccccagagaagcatcctggagcagctggccgagaagaacttcgagctggtgatcaacctgagcatgagaggcgccggcggcagaagactgagcagcttcgtgaccaagggctacagaaccagaagactggccgccgacttcagcgtgcccctgatcatcgacatcaagtgcaccaagctgttcgtggaggccctgggccagatcggccccgccccccccctgaaggtgcacgtggactgcatgaccagccagaagctggtgagactgcccggcctgatcgacgtgcacgtgcacctgagagagcccggcggcacccacaaggaggacttcgccagcggcaccgccgccgccctggccggcggcatcaccatggtgtgcgccatgcccaacaccagaccccccatcatcgacgcccccgccctggccctggcccagaagctggccgaggccggcgccagatgcgacttcgccctgttcctgggcgccagcagcgagaacgccggcaccctgggcaccgtggccggcagcgccgccggcctgaagctgtacctgaacgagaccttcagcgagctgagactggacagcgtggtgcagtggatggagcacttcgagacctggcccagccacctgcccatcgtggcccacgccgagcagcagaccgtggccgccgtgctgatggtggcccagctgacccagagaagcgtgcacatctgccacgtggccagaaaggaggagatcctgctgatcaaggccgccaaggccagaggcctgcccgtgacctgcgaggtggccccccaccacctgttcctgagccacgacgacctggagagactgggccccggcaagggcgaggtgagacccgagctgggcagcagacaggacgtggaggccctgtgggagaacatggccgtgatcgactgcttcgccagcgaccacgccccccacaccctggaggagaagtgcggcagcagacccccccccggcttccccggcctggagaccatgctgcccctgctgctgaccgccgtgagcgagggcagactgagcctggacgacctgctgcagagactgcaccacaaccccagaagaatcttccacctgcccccccaggaggacacctacgtggaggtggacctggagcacgagtggaccatccccagccacatgcccttcagcaaggcccactggacccccttcgagggccagaaggtgaagggcaccgtgagaagagtggtgctgagaggcgaggtggcctacatcgacggccaggtgctggtgccccccggctacggccaggacgtgagaaagtggccccagggcgccgtgccccagctgccccccagcgcccccgccaccagcgagatgaccaccacccccgagagacccagaagaggcatccccggcctgcccgacggcagattccacctgccccccagaatccacagagccagcgaccccggcctgcccgccgaggagcccaaggagaagagcagcagaaaggtggccgagcccgagctgatgggcacccccgacggcacctgctacccccccccccccgtgcccagacaggccagcccccagaacctgggcacccccggcctgctgcacccccagaccagccccctgctgcacagcctggtgggccagcacatcctgagcgtgcagcagttcaccaaggaccagatgagccacctgttcaacgtggcccacaccctgagaatgatggtgcagaaggagagaagcctggacatcctgaagggcaaggtgatggccagcatgttctacgaggtgagcaccagaaccagcagcagcttcgccgccgccatggccagactgggcggcgccgtgctgagcttcagcgaggccaccagcagcgtgcagaagggcgagagcctggccgacagcgtgcagaccatgagctgctacgccgacgtggtggtgctgagacacccccagcccggcgccgtggagctggccgccaagcactgcagaagacccgtgatcaacgccggcgacggcgtgggcgagcaccccacccaggccctgctggacatcttcaccatcagagaggagctgggcaccgtgaacggcatgaccatcaccatggtgggcgacctgaagcacggcagaaccgtgcacagcctggcctgcctgctgacccagtacagagtgagcctgagatacgtggccccccccagcctgagaatgccccccaccgtgagagccttcgtggccagcagaggcaccaagcaggaggagttcgagagcatcgaggaggccctgcccgacaccgacgtgctgtacatgaccagaatccagaaggagagattcggcagcacccaggagtacgaggcctgcttcggccagttcatcctgaccccccacatcatgaccagagccaagaagaagatggtggtgatgcaccccatgcccagagtgaacgagatcagcgtggaggtggacagcgaccccagagccgcctacttcagacaggccgagaacggcatgtacatcagaatggccctgctggccaccgtgctgggcagattctag

SEQ ID NO: 75371 - DNA, 1440 bp, synthetic construct
  misc_feature 1..1440: note = Description of Artificial Sequence: Synthetic coding sequence
  source 1..1440: mol_type = other DNA
atggagaagggcctgaccctgccccaggactgcagagacttcgtgcacagcctgaagatgagaagcaagtacgccctgttcctggtgttcgtggtgatcgtgttcgtgttcatcgagaaggagaacaagatcatcagcagagtgagcgacaagctgaagcagatcccccaggccctggccgacgccaacagcaccgaccccgccctgatcctggccgagaacgccagcctgctgagcctgagcgagctggacagcgccttcagccagctgcagagcagactgagaaacctgagcctgcagctgggcgtggagcccgccatggaggccgccggcgaggaggaggaggagcagagaaaggaggaggagccccccagacccgccgtggccggccccagaagacacgtgctgctgatggccaccaccagaaccggcagcagcttcgtgggcgagttcttcaaccagcagggcaacatcttctacctgttcgagcccctgtggcacatcgagagaaccgtgagcttcgagcccggcggcgccaacgccgccggcagcgccctggtgtacagagacgtgctgaagcagctgttcctgtgcgacctgtacgtgctggagcacttcatcacccccctgcccgaggaccacctgacccagttcatgttcagaagaggcagcagcagaagcctgtgcgaggaccccgtgtgcacccccttcgtgaagaaggtgttcgagaagtaccactgcaagaacagaagatgcggccccctgaacgtgaccctggccgccgaggcctgcagaagaaaggagcacatggccctgaaggccgtgagaatcagacagctggagttcctgcagcccctggccgaggaccccagactggacctgagagtgatccagctggtgagagaccccagagccgtgctggccagcagaatggtggccttcgccggcaagtacaagacctggaagaagtggctggacgacgagggccaggacggcctgagagaggaggaggtgcagagactgagaggcaactgcgagagcatcagactgagcgccgagctgggcctgagacagcccgcctggctgagaggcagatacatgctggtgagatacgaggacgtggccagaggccccctgcagaaggccagagagatgtacagattcgccggcatccccctgaccccccaggtggaggactggatccagaagaacacccaggccgcccacgacggcagcggcatctacagcacccagaagaacagcagcgagcagttcgagaagtggagattcagcatgcccttcaagctggcccaggtggtgcaggccgcctgcggccccgccatgagactgttcggctacaagctggccagagacgccgccgccctgaccaacagaagcgtgagcctgctggaggagagaggcaccttctgggtgacctag

SEQ ID NO: 75372 - DNA, 1236 bp, synthetic construct
  misc_feature 1..1236: note = Description of Artificial Sequence: Synthetic coding sequence
  source 1..1236: mol_type = other DNA
atgcagtgcagctggaaggccgtgctgctgctggccctggccagcatcgccatccagtacaccgccatcagaaccttcaccgccaagagcttccacacctgccccggcctggccgaggccggcctggccgagagactgtgcgaggagagccccaccttcgcctacaacctgagcagaaagacccacatcctgatcctggccaccaccagaagcggcagcagcttcgtgggccagctgttcaaccagcacctggacgtgttctacctgttcgagcccctgtaccacgtgcagaacaccctgatccccagattcacccagggcaagagccccgccgacagaagagtgatgctgggcgccagcagagacctgctgagaagcctgtacgactgcgacctgtacttcctggagaactacatcaagcccccccccgtgaaccacaccaccgacagaatcttcagaagaggcgccagcagagtgctgtgcagcagacccgtgtgcgacccccccggccccgccgacctggtgctggaggagggcgactgcgtgagaaagtgcggcctgctgaacctgaccgtggccgccgaggcctgcagagagagaagccacgtggccatcaagaccgtgagagtgcccgaggtgaacgacctgagagccctggtggaggaccccagactgaacctgaaggtgatccagctggtgagagaccccagaggcatcctggccagcagaagcgagaccttcagagacacctacagactgtggagactgtggtacggcaccggcagaaagccctacaacctggacgtgacccagctgaccaccgtgtgcgaggacttcagcaacagcgtgagcaccggcctgatgagacccccctggctgaagggcaagtacatgctggtgagatacgaggacctggccagaaaccccatgaagaagaccgaggagatctacggcttcctgggcatccccctggacagccacgtggccagatggatccagaacaacaccagaggcgaccccaccctgggcaagcacaagtacggcaccgtgagaaacagcgccgccaccgccgagaagtggagattcagactgagctacgacatcgtggccttcgcccagaacgcctgccagcaggtgctggcccagctgggctacaagatcgccgccagcgaggaggagctgaagaaccccagcgtgagcctggtggaggagagagacttcagacccttcagctag

SEQ ID NO: 75373 - DNA, 1131 bp, synthetic construct
  misc_feature 1..1131: note = Description of Artificial Sequence: Synthetic coding sequence
  source 1..1131: mol_type = other DNA
atgttccccagacccctgacccccctggccgcccccaacggcgccgagcccctgggcagagccctgagaagagcccccctgggcagagccagagccggcctgggcggcccccccctgctgctgcccagcatgctgatgttcgccgtgatcgtggccagcagcggcctgctgctgatgatcgagagaggcatcctggccgagatgaagcccctgcccctgcacccccccggcagagagggcaccgcctggagaggcaaggcccccaagcccggcggcctgagcctgagagccggcgacgccgacctgcaggtgagacaggacgtgagaaacagaaccctgagagccgtgtgcggccagcccggcatgcccagagacccctgggacctgcccgtgggccagagaagaaccctgctgagacacatcctggtgagcgacagatacagattcctgtactgctacgtgcccaaggtggcctgcagcaactggaagagagtgatgaaggtgctggccggcgtgctggacagcgtggacgtgagactgaagatggaccacagaagcgacctggtgttcctggccgacctgagacccgaggagatcagatacagactgcagcactacttcaagttcctgttcgtgagagagcccctggagagactgctgagcgcctacagaaacaagttcggcgagatcagagagtaccagcagagatacggcgccgagatcgtgagaagatacagagccggcgccggccccagccccgccggcgacgacgtgaccttccccgagttcctgagatacctggtggacgaggaccccgagagaatgaacgagcactggatgcccgtgtaccacctgtgccagccctgcgccgtgcactacgacttcgtgggcagctacgagagactggaggccgacgccaaccaggtgctggagtgggtgagagcccccccccacgtgagattccccgccagacaggcctggtacagacccgccagccccgagagcctgcactaccacctgtgcagcgcccccagagccctgctgcaggacgtgctgcccaagtacatcctggacttcagcctgttcgcctaccccctgcccaacgtgaccaaggaggcctgccagcagtag

SEQ ID NO: 75374 - DNA, 1275 bp, synthetic construct
  misc_feature 1..1275: note = Description of Artificial Sequence: Synthetic coding sequence
  source 1..1275: mol_type = other DNA
atgaccctgagacccggcaccatgagactggcctgcatgttcagcagcatcctgctgttcggcgccgccggcctgctgctgttcatcagcctgcaggaccccaccgagctggccccccagcaggtgcccggcatcaagttcaacatcagacccagacagccccaccacgacctgccccccggcggcagccaggacggcgacctgaaggagcccaccgagagagtgaccagagacctgagcagcggcgcccccagaggcagaaacctgcccgcccccgaccagccccagccccccctgcagagaggcaccagactgagactgagacagagaagaagaagactgctgatcaagaagatgcccgccgccgccaccatccccgccaacagcagcgacgcccccttcatcagacccggccccggcaccctggacggcagatgggtgagcctgcacagaagccagcaggagagaaagagagtgatgcaggaggcctgcgccaagtacagagccagcagcagcagaagagccgtgacccccagacacgtgagcagaatcttcgtggaggacagacacagagtgctgtactgcgaggtgcccaaggccggctgcagcaactggaagagagtgctgatggtgctggccggcctggccagcagcaccgccgacatccagcacaacaccgtgcactacggcagcgccctgaagagactggacaccttcgacagacagggcatcctgcacagactgagcacctacaccaagatgctgttcgtgagagagcccttcgagagactggtgagcgccttcagagacaagttcgagcaccccaacagctactaccaccccgtgttcggcaaggccatcctggccagatacagagccaacgccagcagagaggccctgagaaccggcagcggcgtgagattccccgagttcgtgcagtacctgctggacgtgcacagacccgtgggcatggacatccactgggaccacgtgagcagactgtgcagcccctgcctgatcgactacgacttcgtgggcaagttcgagagcatggaggacgacgccaacttcttcctgagcctgatcagagcccccagaaacctgaccttccccagattcaaggacagacacagccaggaggccagaaccaccgccagaatcgcccaccagtacttcgcccagctgagcgccctgcagagacagagaacctacgacttctactacatggactacctgatgttcaactacagcaagcccttcgccgacctgtactag

SEQ ID NO: 75375 - DNA, 1275 bp, synthetic construct; identical to SEQ ID NO: 75374
  misc_feature 1..1275: note = Description of Artificial Sequence: Synthetic coding sequence
  source 1..1275: mol_type = other DNA

SEQ ID NO: 75376 - DNA, 1275 bp, synthetic construct; identical to SEQ ID NO: 75374
  misc_feature 1..1275: note = Description of Artificial Sequence: Synthetic coding sequence
  source 1..1275: mol_type = other DNA

SEQ ID NO: 75377 - DNA, 1686 bp, synthetic construct
  misc_feature 1..1686: note = Description of Artificial Sequence: Synthetic coding sequence
  source 1..1686: mol_type = other DNA
atgagacactgcatcaactgctgcatccagctgctgcccgacggcgcccacaagcagcaggtgaactgccagggcggcccccaccacggccaccaggcctgccccacctgcaagggcgagaacaagatcctgttcagagtggacagcaagcagatgaacctgctggccgtgctggaggtgagaaccgagggcaacgagaactggggcggcttcctgagattcaagaagggcaagagatgcagcctggtgttcggcctgatcatcatgaccctggtgatggccagctacatcctgagcggcgcccaccaggagctgctgatcagcagccccttccactacggcggcttccccagcaaccccagcctgatggacagcgagaaccccagcgacaccaaggagcaccaccaccagagcagcgtgaacaacatcagctacatgaaggactaccccagcatcaagctgatcatcaacagcatcaccaccagaatcgagttcaccaccagacagctgcccgacctggaggacctgaagaagcaggagctgcacatgttcagcgtgatccccaacaagttcctgcccaacagcaagagcccctgctggtacgaggagttcagcggccagaacaccaccgacccctacctgaccaacagctacgtgctgtacagcaagagattcagaagcaccttcgacgccctgagaaaggccttctggggccacctggcccacgcccacggcaagcacttcagactgagatgcctgccccacttctacatcatcggccagcccaagtgcggcaccaccgacctgtacgacagactgagactgcaccccgaggtgaagttcagcgccatcaaggagccccactggtggaccagaaagagattcggcatcgtgagactgagagacggcctgagagacagataccccgtggaggactacctggacctgttcgacctggccgcccaccagatccaccagggcctgcaggccagcagcgccaaggagcagagcaagatgaacaccatcatcatcggcgaggccagcgccagcaccatgtgggacaacaacgcctggaccttcttctacgacaacagcaccgacggcgagccccccttcctgacccaggacttcatccacgccttccagcccaacgccagactgatcgtgatgctgagagaccccgtggagagactgtacagcgactacctgtacttcgccagcagcaacaagagcgccgacgacttccacgagaaggtgaccgaggccctgcagctgttcgagaactgcatgctggactacagcctgagagcctgcgtgtacaacaacaccctgaacaacgccatgcccgtgagactgcaggtgggcctgtacgccgtgtacctgctggactggctgagcgtgttcgacaagcagcagttcctgatcctgagactggaggaccacgccagcaacgtgaagtacaccatgcacaaggtgttccagttcctgaacctgggccccctgagcgagaagcaggaggccctgatgaccaagagccccgccagcaacgccagaagacccgaggacagaaacctgggccccatgtggcccatcacccagaagatcctgagagacttctacagacccttcaacgccagactggcccaggtgctggccgacgaggccttcgcctggaagaccacctag

SEQ ID NO: 75378 - DNA, 1521 bp, synthetic construct
  misc_feature 1..1521: note = Description of Artificial Sequence: Synthetic coding sequence
  source 1..1521: mol_type = other DNA
atgagacactgcatcaactgctgcatccagctgctgcccgacggcgcccacaagcagcaggtgaactgccagggcggcccccaccacggccaccaggcctgccccacctgcaagggcgagaacaagatcctgttcagagtggacagcaagcagatgaacctgctggccgtgctggaggtgagaaccgagggcaacgagaactggggcggcttcctgagattcaagaagggcaagagatgcagcctggtgttcggcctgatcatcatgaccctggtgatggccagctacatcctgagcggcgcccaccaggagctgctgatcagcagccccttccactacggcggcttccccagcaaccccagcctgatggacagcgagaaccccagcgacaccaaggagcaccaccaccagagcagcgtgaacaacatcagctacatgaaggactaccccagcatcaagctgatcatcaacagcatcaccaccagaatcgagttcaccaccagacagctgcccgacctggaggacctgaagaagcaggagctgcacatgttcagcgtgatccccaacaagttcctgcccaacagcaagagcccctgctggtacgaggagttcagcggccagaacaccaccgacccctacctgaccaacagctacgtgctgtacagcaagagattcagaagcaccttcgacgccctgagaaaggccttctggggccacctggcccacgcccacggcaagcacttcagactgagatgcctgccccacttctacatcatcggccagcccaagtgcggcaccaccgacctgtacgacagactgagactgcaccccgaggtgaagttcagcgccatcaaggagccccactggtggaccagaaagagattcggcatcgtgagactgagagacggcctgagagacagataccccgtggaggactacctggacctgttcgacctggccgcccaccagatccaccagggcctgcaggccagcagcgccaaggagcagagcaagatgaacaccatcatcatcggcgaggccagcgccagcaccatgtgggacaacaacgcctggaccttcttctacgacaacagcaccgacggcgagccccccttcctgacccaggacttcatccacgccttccagcccaacgccagactgatcgtgatgctgagagaccccgtggagagactgtacagcgactacctgtacttcgccagcagcaacaagagcgccgacgacttccacgagaaggtgaccgaggccctgcagctgttcgagaactgcatgctggactacagcctgagagcctgcgtgtacaacaacaccctgaacaacgccatgcccgtgtgcacccccccccccagaacccccagagccggcccctggcagaaggagctggtgtgctgctactacgccagcggcatcgtgggcctgagattcagcatcggcaccgagagaagcgtgctgatgtgcaagtgctgcagccccctgttcatggacgtgaaggccgagaactag

SEQ ID NO: 75379 - DNA, 624 bp, synthetic construct
  misc_feature 1..624: note = Description of Artificial Sequence: Synthetic coding sequence
  source 1..624: mol_type = other DNA
atgagacactgcatcaactgctgcatccagctgctgcccgacggcgcccacaagcagcaggtgaactgccagggcggcccccaccacggccaccaggcctgccccacctgcaagggcgagaacaagatcctgttcagagtggacagcaagcagatgaacctgctggccgtgctggaggtgagaaccgagggcaacgagaactggggcggcttcctgagattcaagaagggcaagagatgcagcctggtgttcggcctgatcatcatgaccctggtgatggccagctacatcctgagcggcgcccaccaggagctgctgatcagcagccccttccactacggcggcttccccagcaaccccagcctgatggacagcgagaaccccagcgacaccaaggagcaccaccaccagagcagcgtgaacaacatcagctacatgaaggactaccccagcatcaagctgatcatcaacagcatcaccaccagaatcgagttcaccaccagacagctgcccgacctggaggacctgaagaagcaggagctgcacatgttcagcgtgatccccaacaagttcctgcccaagcacaacgcccaggccgagctgggcctgaacgtggcctgctag

SEQ ID NO: 75380 - DNA, 1686 bp, synthetic construct; identical to SEQ ID NO: 75377
  misc_feature 1..1686: note = Description of Artificial Sequence: Synthetic coding sequence
  source 1..1686: mol_type = other DNA

SEQ ID NO: 75381 - DNA, 1449 bp, synthetic construct
  misc_feature 1..1449: note = Description of Artificial Sequence: Synthetic coding sequence
  source 1..1449: mol_type = other DNA
atgagacactgcatcaactgctgcatccagctgctgcccgacggcgcccacaagcagcaggtgaactgccagggcggcccccaccacggccaccaggcctgccccacctgcaagggcgagaacaagatcctgttcagagtggacagcaagcagatgaacctgctggccgtgctggaggtgagaaccgagggcaacgagaactggggcggcttcctgagattcaagaagggcaagagatgcagcctggtgttcggcctgatcatcatgaccctggtgatggccagctacatcctgagcggcgcccaccaggagctgctgatcagcagccccttccactacggcggcttccccagcaaccccagcctgatggacagcgagaaccccagcgacaccaaggagcaccaccaccagagcagcgtgaacaacatcagctacatgaaggactaccccagcatcaagctgatcatcaacagcatcaccaccagaatcgagttcaccaccagacagctgcccgacctggaggacctgaagaagcaggagctgcacatgttcagcgtgatccccaacaagttcctgcccaacagcaagagcccctgctggtacgaggagttcagcggccagaacaccaccgacccctacctgaccaacagctacgtgctgtacagcaagagattcagaagcaccttcgacgccctgagaaaggccttctggggccacctggcccacgcccacggcaagcacttcagactgagatgcctgccccacttctacatcatcggccagcccaagtgcggcaccaccgacctgtacgacagactgagactgcaccccgaggtgaagttcagcgccatcaaggagccccactggtggaccagaaagagattcggcatcgtgagactgagagacggcctgagagacagataccccgtggaggactacctggacctgttcgacctggccgcccaccagatccaccagggcctgcaggccagcagcgccaaggagcagagcaagatgaacaccatcatcatcggcgaggccagcgccagcaccatgtgggacaacaacgcctggaccttcttctacgacaacagcaccgacggcgagccccccttcctgacccaggacttcatccacgccttccagcccaacgccagactgatcgtgatgctgagagaccccgtggagagactgtacagcgactacctgtacttcgccagcagcaacaagagcgccgacgacttccacgagaaggtgaccgaggccctgcagctgttcgagaactgcatgctggactacagcctgagagcctgcgtgtacaacaacaccctgaacaacgccatgcccgtgtgcacccccccccccgtgccccccgagctggcccccggcagaagaagctggttcgtggtgatcatgcaggccgccctgtgggtgtgcgtgagcgcctag

SEQ ID NO: 75382 - DNA, 1236 bp, synthetic construct
  misc_feature 1..1236: note = Description of Artificial Sequence: Synthetic coding sequence
  source 1..1236: mol_type = other DNA
atgggcatgagagccagagtgcccaaggtggcccacagcaccagaagaccccccgccgccagaatgtggctgcccagattcagcagcaagaccgtgaccgtgctgctgctggcccagaccacctgcctgctgctgttcatcatcagcagacccggccccagcagccccgccggcggcgaggacagagtgcacgtgctggtgctgagcagctggagaagcggcagcagcttcctgggccagctgttcagccagcaccccgacgtgttctacctgatggagcccgcctggcacgtgtggaccaccctgagccagggcagcgccgccaccctgcacatggccgtgagagacctgatgagaagcatcttcctgtgcgacatggacgtgttcgacgcctacatgccccagagcagaaacctgagcgccttcttcaactgggccaccagcagagccctgtgcagcccccccgcctgcagcgccttccccagaggcaccatcagcaagcaggacgtgtgcaagaccctgtgcaccagacagcccttcagcctggccagagaggcctgcagaagctacagccacgtggtgctgaaggaggtgagattcttcaacctgcaggtgctgtaccccctgctgagcgaccccgccctgaacctgagaatcgtgcacctggtgagagaccccagagccgtgctgagaagcagagaggccgccggccccatcctggccagagacaacggcatcgtgctgggcaccaacggcaagtgggtggaggccgacccccacctgagactgatcagagaggtgtgcagaagccacgtgagaatcgccgaggccgccaccctgaagcccccccccttcctgagaggcagatacagactggtgagattcgaggacctggccagagagcccctggccgagatcagagccctgtacgccttcaccggcctgaccctgaccccccagctggaggcctggatccacaacatcacccacggcagcggcatcggcaagcccatcgaggccttccacaccagcagcagaaacgccagaaacgtgagccaggcctggagacacgccctgcccttcaccaagatcctgagagtgcaggaggtgtgcgccggcgccctgcagctgctgggctacagacccgtgtacagcgccgaccagcagagagacctgaccctggacctggtgctgcccagaggccccgaccacttcagctgggccagccccgactag

SEQ ID NO: 75383 - DNA, 1254 bp, synthetic construct
  misc_feature 1..1254: note = Description of Artificial Sequence: Synthetic coding sequence
  source 1..1254: mol_type = other DNA
atgagcagacacctgccctggatctgcgaccagagatgcagcagccccagcagccccggcagatggccccccgccgccagaatgtggctgcccagattcagcagcaagaccgtgaccgtgctgctgctggcccagaccacctgcctgctgctgttcatcatcagcagacccggccccagcagccccgccggcggcgaggacagagtgcacgtgctggtgctgagcagctggagaagcggcagcagcttcctgggccagctgttcagccagcaccccgacgtgttctacctgatggagcccgcctggcacgtgtggaccaccctgagccagggcagcgccgccaccctgcacatggccgtgagagacctgatgagaagcatcttcctgtgcgacatggacgtgttcgacgcctacatgccccagagcagaaacctgagcgccttcttcaactgggccaccagcagagccctgtgcagcccccccgcctgcagcgccttccccagaggcaccatcagcaagcaggacgtgtgcaagaccctgtgcaccagacagcccttcagcctggccagagaggcctgcagaagctacagccacgtggtgctgaaggaggtgagattcttcaacctgcaggtgctgtaccccctgctgagcgaccccgccctgaacctgagaatcgtgcacctggtgagagaccccagagccgtgctgagaagcagagaggccgccggccccatcctggccagagacaacggcatcgtgctgggcaccaacggcaagtgggtggaggccgacccccacctgagactgatcagagaggtgtgcagaagccacgtgagaatcgccgaggccgccaccctgaagcccccccccttcctgagaggcagatacagactggtgagattcgaggacctggccagagagcccctggccgagatcagagccctgtacgccttcaccggcctgaccctgaccccccagctggaggcctggatccacaacatcacccacggcagcggcatcggcaagcccatcgaggccttccacaccagcagcagaaacgccagaaacgtgagccaggcctggagacacgccctgcccttcaccaagatcctgagagtgcaggaggtgtgcgccggcgccctgcagctgctgggctacagacccgtgtacagcgccgaccagcagagagacctgaccctggacctggtgctgcccagaggccccgaccacttcagctgggccagccccgactag

SEQ ID NO: 75384 - DNA, 1188 bp, synthetic construct
  misc_feature 1..1188: note = Description of Artificial Sequence: Synthetic coding sequence
  source 1..1188: mol_type = other DNA
atgtggctgcccagagtgagcagcaccgccgtgaccgccctgctgctggcccagaccttcctgctgctgttcctggtgagcagacccggccccagcagccccgccggcggcgaggccagagtgcacgtgctggtgctgagcagctggagaagcggcagcagcttcgtgggccagctgttcaaccagcaccccgacgtgttctacctgatggagcccgcctggcacgtgtggaccaccctgagccagggcagcgccgccaccctgcacatggccgtgagagacctggtgagaagcgtgttcctgtgcgacatggacgtgttcgacgcctacctgccctggagaagaaacctgagcgacctgttccagtgggccgtgagcagagccctgtgcagcccccccgcctgcagcgccttccccagaggcgccatcagcagcgaggccgtgtgcaagcccctgtgcgccagacagagcttcaccctggccagagaggcctgcagaagctacagccacgtggtgctgaaggaggtgagattcttcaacctgcaggtgctgtaccccctgctgagcgaccccgccctgaacctgagaatcgtgcacctggtgagagaccccagagccgtgctgagaagcagagagcagaccgccaaggccctggccagagacaacggcatcgtgctgggcaccaacggcacctgggtggaggccgaccccggcctgagagtggtgagagaggtgtgcagaagccacgtgagaatcgccgaggccgccaccctgaagcccccccccttcctgagaggcagatacagactggtgagattcgaggacctggccagagagcccctggccgagatcagagccctgtacgccttcaccggcctgagcctgaccccccagctggaggcctggatccacaacatcacccacggcagcggccccggcgccagaagagaggccttcaagaccagcagcagaaacgccctgaacgtgagccaggcctggagacacgccctgcccttcgccaagatcagaagagtgcaggagctgtgcgccggcgccctgcagctgctgggctacagacccgtgtacagcgaggacgagcagagaaacctggccctggacctggtgctgcccagaggcctgaacggcttcacctgggccagcagcaccgccagccaccccagaaactag

SEQ ID NO: 75385 - DNA, 1188 bp, synthetic construct; identical to SEQ ID NO: 75384
  misc_feature 1..1188: note = Description of Artificial Sequence: Synthetic coding sequence
  source 1..1188: mol_type = other DNA

SEQ ID NO: 75386 - DNA, 1461 bp, synthetic construct
  misc_feature 1..1461: note = Description of Artificial Sequence: Synthetic coding sequence
  source 1..1461: mol_type = other DNA
atgaagggcagaagaagaagaagaagagagtactgcaagttcgccctgctgctggtgctgtacaccctggtgctgctgctggtgcccagcgtgctggacggcggcagagacggcgacaagggcgccgagcactgccccggcctgcagagaagcctgggcgtgtggagcctggaggccgccgccgccggcgagagagagcagggcgccgaggccagagccgccgaggagggcggcgccaaccagagccccagattccccagcaacctgagcggcgccgtgggcgaggccgtgagcagagagaagcagcacatctacgtgcacgccacctggagaaccggcagcagcttcctgggcgagctgttcaaccagcaccccgacgtgttctacctgtacgagcccatgtggcacctgtggcaggccctgtaccccggcgacgccgagagcctgcagggcgccctgagagacatgctgagaagcctgttcagatgcgacttcagcgtgctgagactgtacgccccccccggcgaccccgccgccagagcccccgacaccgccaacctgaccaccgccgccctgttcagatggagaaccaacaaggtgatctgcagcccccccctgtgccccggcgcccccagagccagagccgaggtgggcctggtggaggacaccgcctgcgagagaagctgcccccccgtggccatcagagccctggaggccgagtgcagaaagtaccccgtggtggtgatcaaggacgtgagactgctggacctgggcgtgctggtgcccctgctgagagaccccggcctgaacctgaaggtggtgcagctgttcagagaccccagagccgtgcacaacagcagactgaagagcagacagggcctgctgagagagagcatccaggtgctgagaaccagacagagaggcgacagattccacagagtgctgctggcccacggcgtgggcgccagacccggcggccagagcagagccctgcccgccgcccccagagccgacttcttcctgaccggcgccctggaggtgatctgcgaggcctggctgagagacctgctgttcgccagaggcgcccccgcctggctgagaagaagatacctgagactgagatacgaggacctggtgagacagcccagagcccagctgagaagactgctgagattcagcggcctgagagccctggccgccctggacgccttcgccctgaacatgaccagaggcgccgcctacggcgccgacagacccttccacctgagcgccagagacgccagagaggccgtgcacgcctggagagagagactgagcagagagcaggtgagacaggtggaggccgcctgcgcccccgccatgagactgctggcctaccccagaagcggcgaggagggcgacgccgagcagcccagagagggcgagacccccctggagatggacgccgacggcgccacctag

SEQ ID NO: 75387 - DNA, 1593 bp, synthetic construct
  misc_feature 1..1593: note = Description of Artificial Sequence: Synthetic coding sequence
  source 1..1593: mol_type = other DNA
atgagcagaagcccccagagagccctgccccccggcgccctgcccagactgctgcaggccgcccccgccgccgcccccagagccctgctgccccagtggcccagaagacccggcagaagatggcccgccagccccctgggcatgaaggtgttcagaagaaaggccctggtgctgtgcgccggctacgccctgctgctggtgctgaccatgctgaacctgctggactacaagtggcacaaggagcccctgcagcagtgcaaccccgacggccccctgggcgccgccgccggcgccgccggcggcagctggggcagacccggccccccccccgccggcccccccagagcccacgccagactggacctgagaaccccctacagaccccccgccgccgccgtgggcgccgcccccgccgccgccgccggcatggccggcgtggccgccccccccggcaacggcaccagaggcaccggcggcgtgggcgacaagagacagctggtgtacgtgttcaccacctggagaagcggcagcagcttcttcggcgagctgttcaaccagaaccccgaggtgttcttcctgtacgagcccgtgtggcacgtgtggcagaagctgtaccccggcgacgccgtgagcctgcagggcgccgccagagacatgctgagcgccctgtacagatgcgacctgagcgtgttccagctgtacagccccgccggcagcggcggcagaaacctgaccaccctgggcatcttcggcgccgccaccaacaaggtggtgtgcagcagccccctgtgccccgcctacagaaaggaggtggtgggcctggtggacgacagagtgtgcaagaagtgccccccccagagactggccagattcgaggaggagtgcagaaagtacagaaccctggtgatcaagggcgtgagagtgttcgacgtggccgtgctggcccccctgctgagagaccccgccctggacctgaaggtgatccacctggtgagagaccccagagccgtggccagcagcagaatcagaagcagacacggcctgatcagagagagcctgcaggtggtgagaagcagagaccccagagcccacagaatgcccttcctggaggccgccggccacaagctgggcgccaagaaggagggcgtgggcggccccgccgactaccacgccctgggcgccatggaggtgatctgcaacagcatggccaagaccctgcagaccgccctgcagccccccgactggctgcagggccactacctggtggtgagatacgaggacctggtgggcgaccccgtgaagaccctgagaagagtgtacgacttcgtgggcctgctggtgagccccgagatggagcagttcgccctgaacatgaccagcggcagcggcagcagcagcaagcccttcgtggtgagcgccagaaacgccacccaggccgccaacgcctggagaaccgccctgaccttccagcagatcaagcaggtggaggagttctgctaccagcccatggccgtgctgggctacgagagagtgaacagccccgaggaggtgaaggacctgagcaagaccctgctgagaaagcccagactgtag

SEQ ID NO: 75388 - DNA, 1071 bp, synthetic construct
  misc_feature 1..1071: note = Description of Artificial Sequence: Synthetic coding sequence
  source 1..1071: mol_type = other DNA
atgcaccaccagtggctgctgctggccgcctgcttctgggtgatcttcatgttcatggtggccagcaagttcatcaccctgaccttcaaggaccccgacgtgtacagcgccaagcaggagttcctgttcctgaccaccatgcccgaggtgagaaagctgcccgaggagaagcacatccccgaggagctgaagcccaccggcaaggagctgcccgacagccagctggtgcagcccctggtgtacatggagagactggagctgatcagaaacgtgtgcagagacgacgccctgaagaacctgagccacacccccgtgagcaagttcgtgctggacagaatcttcgtgtgcgacaagcacaagatcctgttctgccagacccccaaggtgggcaacacccagtggaagaaggtgctgatcgtgctgaacggcgccttcagcagcatcgaggagatccccgagaacgtggtgcacgaccacgagaagaacggcctgcccagactgagcagcttcagcgacgccgagatccagaagagactgaagacctacttcaagttcttcatcgtgagagaccccttcgagagactgatcagcgccttcaaggacaagttcgtgcacaaccccagattcgagccctggtacagacacgagatcgcccccggcatcatcagaaagtacagaagaaacagaaccgagaccagaggcatccagttcgaggacttcgtgagatacctgggcgaccccaaccacagatggctggacctgcagttcggcgaccacatcatccactgggtgacctacgtggagctgtgcgccccctgcgagatcatgtacagcgtgatcggccaccacgagaccctggaggacgacgccccctacatcctgaaggaggccggcatcgaccacctggtgagctaccccaccatcccccccggcatcaccgtgtacaacagaaccaaggtggagcactacttcctgggcatcagcaagagagacatcagaagactgtacgccagattcgagggcgacttcaagctgttcggctaccagaagcccgacttcctgctgaactag

SEQ ID NO: 75389 - DNA, 426 bp, synthetic construct
  misc_feature 1..426: note = Description of Artificial Sequence: Synthetic coding sequence
  source 1..426: mol_type = other DNA
atgcaccaccagtggctgctgctggccgcctgcttctgggtgatcttcatgttcatggtggccagcaagttcatcaccctgaccttcaaggaccccgacgtgtacagcgccaagcaggagttcctgttcctgaccaccatgcccgaggtgagaaagctgcccgaggagaagcacatccccgaggagctgaagcccaccggcaaggagctgcccgacagccagctggtgcagcccctggtgtacatggagagactggagctgatcagaaacgtgtgcagagacgacgccctgaagaacctgagccacacccccgtgagcaagttcgtgctggacagaatcttcgtgtgcgacaagcacaagatcctgttctgccagacccccaaggtgggcaacacccagtggaagaaggtgctgatcgtgctgtag

SEQ ID NO: 75390 - DNA, 1071 bp, synthetic construct; identical to SEQ ID NO: 75388
  misc_feature 1..1071: note = Description of Artificial Sequence: Synthetic coding sequence
  source 1..1071: mol_type = other DNA

SEQ ID NO: 75391 - DNA, 195 bp, synthetic construct
  misc_feature 1..195: note = Description of Artificial Sequence: Synthetic coding sequence
  source 1..195: mol_type = other DNA
atgcaccaccagtggctgctgctggccgcctgcttctgggtgatcttcatgttcatggtggccagcaagttcatcaccctgaccttcaaggaccccgacgtgtacagcgccaagcaggagttcctgttcctgaccaccatgcccgaggtgagaaagctgcccgaggagaagcacatccccgaggagctgaagtag

SEQ ID NO: 75392 - DNA, 402 bp, synthetic construct
  misc_feature 1..402: note = Description of Artificial Sequence: Synthetic coding sequence
  source 1..402: mol_type = other DNA
atgcaccaccagtggctgctgctggccgcctgcttctgggtgatcttcatgttcatggtggccagcaagttcatcaccctgaccttcaaggaccccgacgtgtacagcgccaagcaggagttcctgttcctgaccaccatgcccgaggtgagaaagctgcccgaggagaagcacatccccgaggagctgaagcccaccggcaaggagctgcccgacagccagctggtgcagcccctggtgtacatggagagactggagctgatcagaaacgtgtgcagagacgacgccctgaagaacctgagccacacccccgtgagcaagttcgtgctggacagaatcttcgtgtgcgacaagcacaagatcctgttctgccagacccccaaggtgggcaacacccagtag

SEQ ID NO: 75393 - DNA, 258 bp, synthetic construct
  misc_feature 1..258: note = Description of Artificial Sequence: Synthetic coding sequence
  source 1..258: mol_type = other DNA
atgcaccaccagtggctgctgctggccgcctgcttctgggtgatcttcatgttcatggtggccagcaagttcatcaccctgaccttcaaggaccccgacgtgtacagcgccaagcaggagttcctgttcctgaccaccatgcccgaggtgagaaagctgcccgaggagaagcacatccccgaggagctgaagcccaccggcaaggagctgcccgacagccagctggtgcagcccctggtgtacatggagagactgtag

SEQ ID NO: 75394 - DNA, 102 bp, synthetic construct
  misc_feature 1..102: note = Description of Artificial Sequence: Synthetic coding sequence
  source 1..102: mol_type = other DNA
atgcaccaccagtggctgctgctggccgcctgcttctgggtgatcttcatgttcatggtggccagcaagttcatcaccctgaccttcaaggaccccgactag

SEQ ID NO: 75395 - DNA, 1215 bp, synthetic construct
  misc_feature 1..1215: note = Description of Artificial Sequence: Synthetic coding sequence
  source 1..1215: mol_type = other DNA
atgcagagaaaggccggcaagaaggagcacgtgcagctgagagacaagagaaaccaggagccccagttcagaggcaacaccgccagaaagtgcgagccccaggccgccgagggcagagtgagcgagtggctgagatgcgacaacatgcaccaccagtggctgctgctggccgcctgcttctgggtgatcttcatgttcatggtggccagcaagttcatcaccctgaccttcaaggaccccgacgtgtacagcgccaagcaggagttcctgttcctgaccaccatgcccgaggtgagaaagctgcccgaggagaagcacatccccgaggagctgaagcccaccggcaaggagctgcccgacagccagctggtgcagcccctggtgtacatggagagactggagctgatcagaaacgtgtgcagagacgacgccctgaagaacctgagccacacccccgtgagcaagttcgtgctggacagaatcttcgtgtgcgacaagcacaagatcctgttctgccagacccccaaggtgggcaacacccagtggaagaaggtgctgatcgtgctgaacggcgccttcagcagcatcgaggagatccccgagaacgtggtgcacgaccacgagaagaacggcctgcccagactgagcagcttcagcgacgccgagatccagaagagactgaagacctacttcaagttcttcatcgtgagagaccccttcgagagactgatcagcgccttcaaggacaagttcgtgcacaaccccagattcgagccctggtacagacacgagatcgcccccggcatcatcagaaagtacagaagaaacagaaccgagaccagaggcatccagttcgaggacttcgtgagatacctgggcgaccccaaccacagatggctggacctgcagttcggcgaccacatcatccactgggtgacctacgtggagctgtgcgccccctgcgagatcatgtacagcgtgatcggccaccacgagaccctggaggacgacgccccctacatcctgaaggaggccggcatcgaccacctggtgagctaccccaccatcccccccggcatcaccgtgtacaacagaaccaaggtggagcactacttcctgggcatcagcaagagagacatcagaagactgtacgccagattcgagggcgacttcaagctgttcggctaccagaagcccgacttcctgctgaactag

SEQ ID NO: 75396 - DNA, 786 bp, synthetic construct
  misc_feature 1..786: note = Description of Artificial Sequence: Synthetic coding sequence
  source 1..786: mol_type = other DNA
atggccagccccgactggggctacgacgacaagaacggccccgagcagtggagcaagctgtaccccatcgccaacggcaacaaccagagccccgtggacatcaagaccagcgagaccaagcacgacaccagcctgaagcccatcagcgtgagctacaaccccgccaccgccaaggagatcatcaacgtgggccacagcttccacgtgaacttcgaggacaacgacaacagaagcgtgctgaagggcggccccttcagcgacagctacagactgttccagttccacttccactggggcagcaccaacgagcacggcagcgagcacaccgtggacggcgtgaagtacagcgccgagctgcacgtggcccactggaacagcgccaagtacagcagcctggccgaggccgccagcaaggccgacggcctggccgtgatcggcgtgctgatgaaggtgggcgaggccaaccccaagctgcagaaggtgctggacgccctgcaggccatcaagaccaagggcaagagagcccccttcaccaacttcgaccccagcaccctgctgcccagcagcctggacttctggacctaccccggcagcctgacccacccccccctgtacgagagcgtgacctggatcatctgcaaggagagcatcagcgtgagcagcgagcagctggcccagttcagaagcctgctgagcaacgtggagggcgacaacgccgtgcccatgcagcacaacaacagacccacccagcccctgaagggcagaaccgtgagagccagcttctag

SEQ ID NO: 75397 - DNA, 786 bp, synthetic construct; identical to SEQ ID NO: 75396
  misc_feature 1..786: note = Description of Artificial Sequence: Synthetic coding sequence
  source 1..786: mol_type = other DNA

SEQ ID NO: 75398 - DNA, 786 bp, synthetic construct; identical to SEQ ID NO: 75396
  misc_feature 1..786: note = Description of Artificial Sequence: Synthetic coding sequence
  source 1..786: mol_type = other DNA

SEQ ID NO: 75399 - DNA, 531 bp, synthetic construct
  misc_feature 1..531: note = Description of Artificial Sequence: Synthetic coding sequence
  source 1..531: mol_type = other DNA
atggccagccccgactggggctacgacgacaagaacggccccgagcagtggagcaagctgtaccccatcgccaacggcaacaaccagagccccgtggacatcaagaccagcgagaccaagcacgacaccagcctgaagcccatcagcgtgagctacaaccccgccaccgccaaggagatcatcaacgtgggccacagcttccacgtgaacttcgaggacaacgacaacagaagcgtgctgaagggcggccccttcagcgacagctacagactgttccagttccacttccactggggcagcaccaacgagcacggcagcgagcacaccgtggacggcgtgaagtacagcgccgagctgcacgtggcccactggaacagcgccaagtacagcagcctggccgaggccgccagcaaggccgacggcctggccgtgatcggcgtgctgatgaaggtgggcgaggccaaccccaagctgcagaaggtgctggacgccctgcaggccatcaagaccaagggcaagagagccccctag

SEQ ID NO: 75400 - DNA, 756 bp, synthetic construct
  misc_feature 1..756: note = Description of Artificial Sequence: Synthetic coding sequence
  source 1..756: mol_type = other DNA
atggccagccccgactggggctacgacgacaagaacggccccgagcagtggagcaagctgtaccccatcgccaacggcaacaaccagagccccgtggacatcaagaccagcgagaccaagcacgacaccagcctgaagcccatcagcgtgagctacaaccccgccaccgccaaggagatcatcaacgtgggccacagcttccacgtgaacttcgaggacaacgacaacagaagcgtgctgaagggcggccccttcagcgacagctacagactgttccagttccacttccactggggcagcaccaacgagcacggcagcgagcacaccgtggacggcgtgaagtacagcgccgagctgcacgtggcccactggaacagcgccaagtacagcagcctggccgaggccgccagcaaggccgacggcctggccgtgatcggcgtgctgatgaaggtgggcgaggccaaccccaagctgcagaaggtgctggacgccctgcaggccatcaagaccaagggcaagagagcccccttcaccaacttcgaccccagcaccctgctgcccagcagcctggacttctggacctaccccggcagcctgacccacccccccctgtacgagagcgtgacctggatcatctgcaaggagagcatcagcgtgagcagcgagcagctggcccagttcagaagcctgctgagcaacgtggagggcgacaacgccgtgcccatgcagcacaacaacagacccacccagccctag

SEQ ID NO: 75401 - DNA, 69 bp, synthetic construct
  misc_feature 1..69: note = Description of Artificial Sequence: Synthetic coding sequence
  source 1..69: mol_type = other DNA
atggccagccccgactggggctacgacgacaagaacggccccgagcagtggagcaagctgtacccctag

SEQ ID NO: 75402 - DNA, 450 bp, synthetic construct
  misc_feature 1..450: note = Description of Artificial Sequence: Synthetic coding sequence
  source 1..450: mol_type = other DNA
atggccagccccgactggggctacgacgacaagaacggccccgagcagtggagcaagctgtaccccatcgccaacggcaacaaccagagccccgtggacatcaagaccagcgagaccaagcacgacaccagcctgaagcccatcagcgtgagctacaaccccgccaccgccaaggagatcatcaacgtgggccacagcttccacgtgaacttcgaggacaacgacaacagaagcgtgctgaagggcggccccttcagcgacagctacagactgttccagttccacttccactggggcagcaccaacgagcacggcagcgagcacaccgtggacggcgtgaagtacagcgccgagctgcacgtggcccactggaacagcgccaagtacagcagcctggccgaggccgccagcaaggccgacggcctggccgtgatcggcgtgctgatgtag

SEQ ID NO: 75403 - DNA, 450 bp, synthetic construct; identical to SEQ ID NO: 75402
  misc_feature 1..450: note = Description of Artificial Sequence: Synthetic coding sequence
  source 1..450: mol_type = other DNA

SEQ ID NO: 75404 - DNA, 357 bp, synthetic construct
  misc_feature 1..357: note = Description of Artificial Sequence: Synthetic coding sequence
  source 1..357: mol_type = other DNA
atggccagccccgactggggctacgacgacaagaacggccccgagcagtggagcaagctgtaccccatcgccaacggcaacaaccagagccccgtggacatcaagaccagcgagaccaagcacgacaccagcctgaagcccatcagcgtgagctacaaccccgccaccgccaaggagatcatcaacgtgggccacagcttccacgtgaacttcgaggacaacgacaacagaagcgtgctgaagggcggccccttcagcgacagctacagactgttccagttccacttccactggggcagcaccaacgagcacggcagcgagcacaccgtggacggcgtgaagtacagcgccgagtag

SEQ ID NO: 75405 - DNA, 447 bp, synthetic construct
  misc_feature 1..447: note = Description of Artificial Sequence: Synthetic coding sequence
  source 1..447: mol_type = other DNA
atggccagccccgactggggctacgacgacaagaacggccccgagcagtggagcaagctgtaccccatcgccaacggcaacaaccagagccccgtggacatcaagaccagcgagaccaagcacgacaccagcctgaagcccatcagcgtgagctacaaccccgccaccgccaaggagatcatcaacgtgggccacagcttccacgtgaacttcgaggacaacgacaacagaagcgtgctgaagggcggccccttcagcgacagctacagactgttccagttccacttccactggggcagcaccaacgagcacggcagcgagcacaccgtggacggcgtgaagtacagcgccgagctgcacgtggcccactggaacagcgccaagtacagcagcctggccgaggccgccagcaaggccgacggcctggccgtgatcggcgtgctgtag

SEQ ID NO: 75406 - DNA, 786 bp, synthetic construct; identical to SEQ ID NO: 75396
  misc_feature 1..786: note = Description of Artificial Sequence: Synthetic coding sequence
  source 1..786: mol_type = other DNA

SEQ ID NO: 75407 - DNA, 300 bp, synthetic construct
  misc_feature 1..300: note = Description of Artificial Sequence: Synthetic coding sequence
  source 1..300: mol_type = other DNA
atggccagccccgactggggctacgacgacaagaacggccccgagcagtggagcaagctgtaccccatcgccaacggcaacaaccagagccccgtggacatcaagaccagcgagaccaagcacgacaccagcctgaagcccatcagcgtgagctacaaccccgccaccgccaaggagatcatcaacgtgggccacagcttccacgtgaacttcgaggacaacgacaacagaagcgtgctgaagggcggccccttcagcgacagctacagactgttccagttccacttccactggggctag

SEQ ID NO: 75408 - DNA, 786 bp, synthetic construct; identical to SEQ ID NO: 75396
  misc_feature 1..786: note = Description of Artificial Sequence: Synthetic coding sequence
  source 1..786: mol_type = other DNA

SEQ ID NO: 75409 - DNA, 786 bp, synthetic construct; identical to SEQ ID NO: 75396
  misc_feature 1..786: note = Description of Artificial Sequence: Synthetic coding sequence
  source 1..786: mol_type = other DNA

SEQ ID NO: 75410 - DNA, 783 bp, synthetic construct
  misc_feature 1..783: note = Description of Artificial Sequence: Synthetic coding sequence
  source 1..783: mol_type = other DNA
atgagccaccactggggctacggcaagcacaacggccccgagcactggcacaaggacttccccatcgccaagggcgagagacagagccccgtggacatcgacacccacaccgccaagtacgaccccagcctgaagcccctgagcgtgagctacgaccaggccaccagcctgagaatcctgaacaacggccacgccttcaacgtggagttcgacgacagccaggacaaggccgtgctgaagggcggccccctggacggcacctacagactgatccagttccacttccactggggcagcctggacggccagggcagcgagcacaccgtggacaagaagaagtacgccgccgagctgcacctggtgcactggaacaccaagtacggcgacttcggcaaggccgtgcagcagcccgacggcctggccgtgctgggcatcttcctgaaggtgggcagcgccaagcccggcctgcagaaggtggtggacgtgctggacagcatcaagaccaagggcaagagcgccgacttcaccaacttcgaccccagaggcctgctgcccgagagcctggactactggacctaccccggcagcctgaccaccccccccctgctggagtgcgtgacctggatcgtgctgaaggagcccatcagcgtgagcagcgagcaggtgctgaagttcagaaagctgaacttcaacggcgagggcgagcccgaggagctgatggtggacaactggagacccgcccagcccctgaagaacagacagatcaaggccagcttcaagtag

SEQ ID NO: 75411 - DNA, 783 bp, synthetic construct
  misc_feature 1..783: note = Description of Artificial Sequence: Synthetic coding sequence
  source 1..783: mol_type = other DNA
atggccaaggagtggggctacgccagccacaacggccccgaccactggcacgagctgttccccaacgccaagggcgagaaccagagccccgtggagctgcacaccaaggacatcagacacgaccccagcctgcagccctggagcgtgagctacgacggcggcagcgccaagaccatcctgaacaacggcaagacctgcagagtggtgttcgacgacacctacgacagaagcatgctgagaggcggccccctgcccggcccctacagactgagacagttccacctgcactggggcagcagcgacgaccacggcagcgagcacaccgtggacggcgtgaagtacgccgccgagctgcacctggtgcactggaaccccaagtacaacaccttcaaggaggccctgaagcagagagacggcatcgccgtgatcggcatcttcctgaagatcggccacgagaacggcgagttccagatcttcctggacgccctggacaagatcaagaccaagggcaaggaggcccccttcaccaagttcgaccccagctgcctgttccccgcctgcagagactactggacctaccagggcagcttcaccacccccccctgcgaggagtgcatcgtgtggctgctgctgaaggagcccatgaccgtgagcagcgaccagatggccaagctgagaagcctgctgagcagcgccgagaacgagccccccgtgcccctggtgagcaactggagacccccccagcccatcaacaacagagtggtgagagccagcttcaagtag

SEQ ID NO: 75412 - DNA, 735 bp, synthetic construct
  misc_feature 1..735: note = Description of Artificial Sequence: Synthetic coding sequence
  source 1..735: mol_type = other DNA
atggccaaggagtggggctacgccagccacaacggccccgaccactggcacgagctgttccccaacgccaagggcgagaaccagagcccctggagcgtgagctacgacggcggcagcgccaagaccatcctgaacaacggcaagacctgcagagtggtgttcgacgacacctacgacagaagcatgctgagaggcggccccctgcccggcccctacagactgagacagttccacctgcactggggcagcagcgacgaccacggcagcgagcacaccgtggacggcgtgaagtacgccgccgagctgcacctggtgcactggaaccccaagtacaacaccttcaaggaggccctgaagcagagagacggcatcgccgtgatcggcatcttcctgaagatcggccacgagaacggcgagttccagatcttcctggacgccctggacaagatcaagaccaagggcaaggaggcccccttcaccaagttcgaccccagctgcctgttccccgcctgcagagactactggacctaccagggcagcttcaccacccccccctgcgaggagtgcatcgtgtggctgctgctgaaggagcccatgaccgtgagcagcgaccagatggccaagctgagaagcctgctgagcagcgccgagaacgagccccccgtgcccctggtgagcaactggagacccccccagcccatcaacaacagagtggtgagagccagcttcaagtag

SEQ ID NO: 75413 - DNA, 954 bp, synthetic construct
  misc_feature 1..954: note = Description of Artificial Sequence: Synthetic coding sequence
  source 1..954: mol_type = other DNA
atggtggtgatgaacagcctgagagtgatcctgcaggccagccccggcaagctgctgtggagaaagttccagatccccagattcatgcccgccagaccctgcagcctgtacacctgcacctacaagaccagaaacagagccctgcaccccctgtgggagagcgtggacctggtgcccggcggcgacagacagagccccatcaacatcagatggagagacagcgtgtacgaccccggcctgaagcccctgaccatcagctacgaccccgccacctgcctgcacgtgtggaacaacggctacagcttcctggtggagttcgaggacagcaccgacaagagcgtgatcaagggcggccccctggagcacaactacagactgaagcagttccacttccactggggcgccatcgacgcctggggcagcgagcacaccgtggacagcaagtgcttccccgccgagctgcacctggtgcactggaacgccgtgagattcgagaacttcgaggacgccgccctggaggagaacggcctggccgtgatcggcgtgttcctgaagctgggcaagcaccacaaggagctgcagaagctggtggacaccctgcccagcatcaagcacaaggacgccctggtggagttcggcagcttcgaccccagctgcctgatgcccacctgccccgactactggacctacagcggcagcctgaccaccccccccctgagcgagagcgtgacctggatcatcaagaagcagcccgtggaggtggaccacgaccagctggagcagttcagaaccctgctgttcaccagcgagggcgagaaggagaagagaatggtggacaacttcagacccctgcagcccctgatgaacagaaccgtgagaagcagcttcagacacgactacgtgctgaacgtgcaggccaagcccaagcccgccaccagccaggccaccccctag

SEQ ID NO: 75414 - DNA, 954 bp, synthetic construct; identical to SEQ ID NO: 75413
  misc_feature 1..954: note = Description of Artificial Sequence: Synthetic coding sequence
  source 1..954: mol_type = other DNA

SEQ ID NO: 75415 - DNA, 411 bp, synthetic construct
  misc_feature 1..411: note = Description of Artificial Sequence: Synthetic coding sequence
  source 1..411: mol_type = other DNA
atggtggtgatgaacagcctgagagtgatcctgcaggccagccccggcaagctgctgtggagaaagttccagatccccagattcatgcccgccagaccctgcagcctgtacacctgcacctacaagaccagaaacagagccctgcaccccctgtgggagagcgtggacctggtgcccggcggcgacagacagagccccatcaacatcagatggagagacagcgtgtacgaccccggcctgaagcccctgaccatcagctacgaccccgccacctgcctgcacgtgtggaacaacggctacagcttcctggtggagttcgaggacagcaccgacaagagcgtgatcaagggcggccccctggagcacaactacagactgaagcagttccacttccactggggcgccatctag

SEQ ID NO: 75416 - DNA, 231 bp, synthetic construct
  misc_feature 1..231: note = Description of Artificial Sequence: Synthetic coding sequence
  source 1..231: mol_type = other DNA
atggtggtgatgaacagcctgagagtgatcctgcaggccagccccggcaagctgctgtggagaaagttccagatccccagattcatgcccgccagaccctgcagcctgtacacctgcacctacaagaccagaaacagagccctgcaccccctgtgggagagcgtggacctggtgcccggcggcgacagacagagccccatcaacatcagatggagagacagcgtgtactag

SEQ ID NO: 75417 - DNA, 540 bp, synthetic construct
  misc_feature 1..540: note = Description of Artificial Sequence: Synthetic coding sequence
  source 1..540: mol_type = other DNA
atgagagccctggtgctgctgctgagcctgttcctgctgggcggccaggcccagcacgtgagcgactggacctacagcgagggcgccctggacgaggcccactggccccagcactaccccgcctgcggcggccagagacagagccccatcaacctgcagagaaccaaggtgagatacaaccccagcctgaagggcctgaacatgaccggctacgagacccaggccggcgagttccccatggtgaacaacggccacaccgactggcaggccgagctgttcctgcccagcctgagcagcccctgcggcgagggcgccaagcacaagggccagagacagtggctgtgcagccccagcctggacagctggtgggaggccatcatcgacggcggcagcctgtgggccaccctggccgagtgcggcctgagagccgagggccccgaggagggcagacacatggaggagaagagccccgccagccagggcgcctgcagcggcagcagactgcccatcagcagaggcccctgcaccttcttcctgtag

SEQ ID NO: 75418 - DNA, 942 bp, synthetic construct
  misc_feature 1..942: note = Description of Artificial Sequence: Synthetic coding sequence
  source 1..942: mol_type = other DNA
atgagagccctggtgctgctgctgagcctgttcctgctgggcggccaggcccagcacgtgagcgactggacctacagcgagggcgccctggacgaggcccactggccccagcactaccccgcctgcggcggccagagacagagccccatcaacctgcagagaaccaaggtgagatacaaccccagcctgaagggcctgaacatgaccggctacgagacccaggccggcgagttccccatggtgaacaacggccacaccgtgcagatcagcctgcccagcaccatgagaatgaccgtggccgacggcaccgtgtacatcgcccagcagatgcacttccactggggcggcgccagcagcgagatcagcggcagcgagcacaccgtggacggcatcagacacgtgatcgagatccacatcgtgcactacaacagcaagtacaagagctacgacatcgcccaggacgcccccgacggcctggccgtgctggccgccttcgtggaggtgaagaactaccccgagaacacctactacagcaacttcatcagccacctggccaacatcaagtaccccggccagagaaccaccctgaccggcctggacgtgcaggacatgctgcccagaaacctgcagcactactacacctaccacggcagcctgaccacccccccctgcaccgagaacgtgcactggttcgtgctggccgacttcgtgaagctgagcagaacccaggtgtggaagctggagaacagcctgctggaccacagaaacaagaccatccacaacgactacagaagaacccagcccctgaaccacagagtggtggagagcaacttccccaaccagggcaagggccacggcggccacagaggcagaagccagaaccccagagtgcagcccaccagcaccagacaccccctggccctgggcagcctggaggcctag

SEQ ID NO: 75419 - DNA, 927 bp, synthetic construct
  misc_feature 1..927: note = Description of Artificial Sequence: Synthetic coding sequence
  source 1..927: mol_type = other DNA
atgagagccctggtgctgctgctgagcctgttcctgctgggcggccaggcccagcacgtgagcgactggacctacagcgagggcgccctggacgaggcccactggccccagcactaccccgcctgcggcggccagagacagagccccatcaacctgcagagaaccaaggtgagatacaaccccagcctgaagggcctgaacatgaccggctacgagacccaggccggcgagttccccatggtgaacaacggccacaccgtgcagatcagcctgcccagcaccatgagaatgaccgtggccgacggcaccgtgtacatcgcccagcagatgcacttccactggggcggcgccagcagcgagatcagcggcagcgagcacaccgtggacggcatcagacacgtgatcgagatccacatcgtgcactacaacagcaagtacaagagctacgacatcgcccaggacgcccccgacggcctggccgtgctggccgccttcgtggaggtgaagaactaccccgagaacacctactacagcaacttcatcagccacctggccaacatcaagtaccccggccagagaaccaccctgaccggcctggacgtgcaggacatgctgcccagaaacctgcagcactactacacctaccacggcagcctgaccacccccccctgcaccgagaacgtgcactggttcgtgctggccgacttcgtgaagctgagcagaacccaggtgtggaagctggagaacagcctgctggaccacagaaacaagaccatccacaacgactacagaagaacccagcccctgaaccacagagtggtggagagcaacttccccaaccaggagtacaccctgggcagcgagttccagttctacctgcacaagatcgaggagatcctggactacctgagaagagccctgaactag

SEQ ID NO: 75420 - DNA, 795 bp, synthetic construct
  misc_feature 1..795: note = Description of Artificial Sequence: Synthetic coding sequence
  source 1..795: mol_type = other DNA
atgaccggccaccacggctggggctacggccaggacgacggccccagccactggcacaagctgtaccccatcgcccagggcgacagacagagccccatcaacatcatcagcagccaggccgtgtacagccccagcctgcagcccctggagctgagctacgaggcctgcatgagcctgagcatcaccaacaacggccacagcgtgcaggtggacttcaacgacagcgacgacagaaccgtggtgaccggcggccccctggagggcccctacagactgaagcagttccacttccactggggcaagaagcacgacgtgggcagcgagcacaccgtggacggcaagagcttccccagcgagctgcacctggtgcactggaacgccaagaagtacagcaccttcggcgaggccgccagcgcccccgacggcctggccgtggtgggcgtgttcctggagaccggcgacgagcaccccagcatgaacagactgaccgacgccctgtacatggtgagattcaagggcaccaaggcccagttcagctgcttcaaccccaagtgcctgctgcccgccagcagacactactggacctaccccggcagcctgaccaccccccccctgagcgagagcgtgacctggatcgtgctgagagagcccatctgcatcagcgagagacagatgggcaagttcagaagcctgctgttcaccagcgaggacgacgagagaatccacatggtgaacaacttcagacccccccagcccctgaagggcagagtggtgaaggccagcttcagagcctag

SEQ ID NO: 75421 - DNA, 627 bp, synthetic construct
  misc_feature 1..627: note = Description of Artificial Sequence: Synthetic coding sequence
  source 1..627: mol_type = other DNA
atgagcctgagcatcaccaacaacggccacagcgtgcaggtggacttcaacgacagcgacgacagaaccgtggtgaccggcggccccctggagggcccctacagactgaagcagttccacttccactggggcaagaagcacgacgtgggcagcgagcacaccgtggacggcaagagcttccccagcgagctgcacctggtgcactggaacgccaagaagtacagcaccttcggcgaggccgccagcgcccccgacggcctggccgtggtgggcgtgttcctggagaccggcgacgagcaccccagcatgaacagactgaccgacgccctgtacatggtgagattcaagggcaccaaggcccagttcagctgcttcaaccccaagtgcctgctgcccgccagcagacactactggacctaccccggcagcctgaccaccccccccctgagcgagagcgtgacctggatcgtgctgagagagcccatctgcatcagcgagagacagatgggcaagttcagaagcctgctgttcaccagcgaggacgacgagagaatccacatggtgaacaacttcagacccccccagcccctgaagggcagagtggtgaaggccagcttcagagcctag

SEQ ID NO: 75422 - DNA, 873 bp, synthetic construct
  misc_feature 1..873: note = Description of Artificial Sequence: Synthetic coding sequence
  source 1..873: mol_type = other DNA
atggccgacctgagcttcatcgaggacaccgtggccttccccgagaaggaggaggacgaggaggaggaggaggagggcgtggagtggggctacgaggagggcgtggagtggggcctggtgttccccgacgccaacggcgagtaccagagccccatcaacctgaacagcagagaggccagatacgaccccagcctgctggacgtgagactgagccccaactacgtggtgtgcagagactgcgaggtgaccaacgacggccacaccatccaggtgatcctgaagagcaagagcgtgctgagcggcggccccctgccccagggccacgagttcgagctgtacgaggtgagattccactggggcagagagaaccagagaggcagcgagcacaccgtgaacttcaaggccttccccatggagctgcacctgatccactggaacagcaccctgttcggcagcatcgacgaggccgtgggcaagccccacggcatcgccatcatcgccctgttcgtgcagatcggcaaggagcacgtgggcctgaaggccgtgaccgagatcctgcaggacatccagtacaagggcaagagcaagaccatcccctgcttcaaccccaacaccctgctgcccgaccccctgctgagagactactgggtgtacgagggcagcctgaccatccccccctgcagcgagggcgtgacctggatcctgttcagataccccctgaccatcagccagctgcagatcgaggagttcagaagactgagaacccacgtgaagggcgccgagctggtggagggctgcgacggcatcctgggcgacaacttcagacccacccagcccctgagcgacagagtgatcagagccgccttccagtag

SEQ ID NO: 75423 - DNA, 987 bp, synthetic construct
  misc_feature 1..987: note = Description of Artificial Sequence: Synthetic coding sequence
  source 1..987: mol_type = other DNA
atggagatcgtgtgggaggtgctgttcctgctgcaggccaacttcatcgtgtgcatcagcgcccagcagaacagccccaagatccacgagggctggtgggcctacaaggaggtggtgcagggcagcttcgtgcccgtgcccagcttctggggcctggtgaacagcgcctggaacctgtgcagcgtgggcaagagacagagccccgtgaacatcgagaccagccacatgatcttcgaccccttcctgacccccctgagaatcaacaccggcggcagaaaggtgagcggcaccatgtacaacaccggcagacacgtgagcctgagactggacaaggagcacctggtgaacatcagcggcggccccatgacctacagccacagactggaggagatcagactgcacttcggcagcgaggacagccagggcagcgagcacctgctgaacggccaggccttcagcggcgaggtgcagctgatccactacaaccacgagctgtacaccaacgtgaccgaggccgccaagagccccaacggcctggtggtggtgagcatcttcatcaaggtgagcgacagcagcaaccccttcctgaacagaatgctgaacagagacaccatcaccagaatcacctacaagaacgacgcctacctgctgcagggcctgaacatcgaggagctgtaccccgagaccagcagcttcatcacctacgacggcagcatgaccatccccccctgctacgagaccgccagctggatcatcatgaacaagcccgtgtacatcaccagaatgcagatgcacagcctgagactgctgagccagaaccagcccagccagatcttcctgagcatgagcgacaacttcagacccgtgcagcccctgaacaacagatgcatcagaaccaacatcaacttcagcctgcagggcaaggactgccccaacaacagagcccagaagctgcagtacagagtgaacgagtggctgctgaagtag

SEQ ID NO: 75424 - DNA, 1005 bp, synthetic construct
  misc_feature 1..1005: note = Description of Artificial Sequence: Synthetic coding sequence
  source 1..1005: mol_type = other DNA
atggccagcatcagaagcagaagcggctgcggcttcaccgagcccgacgagctgtgcatggtgggcgtgagagagaacgcccagcagaacagccccaagatccacgagggctggtgggcctacaaggaggtggtgcagggcagcttcgtgcccgtgcccagcttctggggcctggtgaacagcgcctggaacctgtgcagcgtgggcaagagacagagccccgtgaacatcgagaccagccacatgatcttcgaccccttcctgacccccctgagaatcaacaccggcggcagaaaggtgagcggcaccatgtacaacaccggcagacacgtgagcctgagactggacaaggagcacctggtgaacatcagcggcggccccatgacctacagccacagactggaggagatcagactgcacttcggcagcgaggacagccagggcagcgagcacctgctgaacggccaggccttcagcggcgaggtgcagctgatccactacaaccacgagctgtacaccaacgtgaccgaggccgccaagagccccaacggcctggtggtggtgagcatcttcatcaaggtgagcgacagcagcaaccccttcctgaacagaatgctgaacagagacaccatcaccagaatcacctacaagaacgacgcctacctgctgcagggcctgaacatcgaggagctgtaccccgagaccagcagcttcatcacctacgacggcagcatgaccatccccccctgctacgagaccgccagctggatcatcatgaacaagcccgtgtacatcaccagaatgcagatgcacagcctgagactgctgagccagaaccagcccagccagatcttcctgagcatgagcgacaacttcagacccgtgcagcccctgaacaacagatgcatcagaaccaacatcaacttcagcctgcagggcaaggactgccccaacaacagagcccagaagctgcagtacagagtgaacgagtggctgctgaagtag

SEQ ID NO: 75425 - DNA, 987 bp, synthetic construct; identical to SEQ ID NO: 75423
  misc_feature 1..987: note = Description of Artificial Sequence: Synthetic coding sequence
  source 1..987: mol_type = other DNA

SEQ ID NO: 75426 - DNA, 987 bp, synthetic construct; identical to SEQ ID NO: 75423
  misc_feature 1..987: note = Description of Artificial Sequence: Synthetic coding sequence
  source 1..987: mol_type = other DNA

SEQ ID NO: 75427 - DNA, 987 bp, synthetic construct
  misc_feature 1..987: note = Description of Artificial Sequence: Synthetic coding sequence
  source 1..987: mol_type = other DNA
atgggcgccgccgccagactgagcgcccccagagccctggtgctgtgggccgccctgggcgccgccgcccacatcggccccgcccccgaccccgaggactggtggagctacaaggacaacctgcagggcaacttcgtgcccggcccccccttctggggcctggtgaacgccgcctggagcctgtgcgccgtgggcaagagacagagccccgtggacgtggagctgaagagagtgctgtacgaccccttcctgccccccctgagactgagcaccggcggcgagaagctgagaggcaccctgtacaacaccggcagacacgtgagcttcctgcccgcccccagacccgtggtgaacgtgagcggcggccccctgctgtacagccacagactgagcgagctgagactgctgttcggcgccagagacggcgccggcagcgagcaccagatcaaccaccagggcttcagcgccgaggtgcagctgatccacttcaaccaggagctgtacggcaacttcagcgccgccagcagaggccccaacggcctggccatcctgagcctgttcgtgaacgtggccagcaccagcaaccccttcctgagcagactgctgaacagagacaccatcaccagaatcagctacaagaacgacgcctacttcctgcaggacctgagcctggagctgctgttccccgagagcttcggcttcatcacctaccagggcagcctgagcacccccccctgcagcgagaccgtgacctggatcctgatcgacagagccctgaacatcaccagcctgcagatgcacagcctgagactgctgagccagaacccccccagccagatcttccagagcctgagcggcaacagcagacccctgcagcccctggcccacagagccctgagaggcaacagagaccccagacaccccgagagaagatgcagaggccccaactacagactgcacgtggacggcgtgccccacggcagatag

SEQ ID NO: 75428 - DNA, 1065 bp, synthetic construct
  misc_feature 1..1065: note = Description of Artificial Sequence: Synthetic coding sequence
  source 1..1065: mol_type = other DNA
atgcccagaagaagcctgcacgccgccgccgtgctgctgctggtgatcctgaaggagcagcccagcagccccgcccccgtgaacggcagcaagtggacctacttcggccccgacggcgagaacagctggagcaagaagtaccccagctgcggcggcctgctgcagagccccatcgacctgcacagcgacatcctgcagtacgacgccagcctgacccccctggagttccagggctacaacctgagcgccaacaagcagttcctgctgaccaacaacggccacagcgtgaagctgaacctgcccagcgacatgcacatccagggcctgcagagcagatacagcgccacccagctgcacctgcactggggcaaccccaacgacccccacggcagcgagcacaccgtgagcggccagcacttcgccgccgagctgcacatcgtgcactacaacagcgacctgtaccccgacgccagcaccgccagcaacaagagcgagggcctggccgtgctggccgtgctgatcgagatgggcagcttcaaccccagctacgacaagatcttcagccacctgcagcacgtgaagtacaagggccaggaggccttcgtgcccggcttcaacatcgaggagctgctgcccgagagaaccgccgagtactacagatacagaggcagcctgaccacccccccctgcaaccccaccgtgctgtggaccgtgttcagaaaccccgtgcagatcagccaggagcagctgctggccctggagaccgccctgtactgcacccacatggacgaccccagccccagagagatgatcaacaacttcagacaggtgcagaagttcgacgagagactggtgtacaccagcttcagccaggtgcaggtgtgcaccgccgccggcctgagcctgggcatcatcctgagcctggccctggccggcatcctgggcatctgcatcgtggtggtggtgagcatctggctgttcagaagaaagagcatcaagaagggcgacaacaagggcgtgatctacaagcccgccaccaagatggagaccgaggcccacgcctag

SEQ ID NO: 75429 - DNA, 1032 bp, synthetic construct
  misc_feature 1..1032: note = Description of Artificial Sequence: Synthetic coding sequence
  source 1..1032: mol_type = other DNA
atgcccagaagaagcctgcacgccgccgccgtgctgctgctggtgatcctgaaggagcagcccagcagccccgcccccgtgaacggcagcaagtggacctacttcggccccgacggcgagaacagctggagcaagaagtaccccagctgcggcggcctgctgcagagccccatcgacctgcacagcgacatcctgcagtacgacgccagcctgacccccctggagttccagggctacaacctgagcgccaacaagcagttcctgctgaccaacaacggccacagcgtgaagctgaacctgcccagcgacatgcacatccagggcctgcagagcagatacagcgccacccagctgcacctgcactggggcaaccccaacgacccccacggcagcgagcacaccgtgagcggccagcacttcgccgccgagctgcacatcgtgcactacaacagcgacctgtaccccgacgccagcaccgccagcaacaagagcgagggcctggccgtgctggccgtgctgatcgagatgggcagcttcaaccccagctacgacaagatcttcagccacctgcagcacgtgaagtacaagggccaggaggccttcgtgcccggcttcaacatcgaggagctgctgcccgagagaaccgccgagtactacagatacagaggcagcctgaccacccccccctgcaaccccaccgtgctgtggaccgtgttcagaaaccccgtgcagatcagccaggagcagctgctggccctggagaccgccctgtactgcacccacatggacgaccccagccccagagagatgatcaacaacttcagacaggtgcagaagttcgacgagagactggtgtacaccagcttcagccagggcatcatcctgagcctggccctggccggcatcctgggcatctgcatcgtggtggtggtgagcatctggctgttcagaagaaagagcatcaagaagggcgacaacaagggcgtgatctacaagcccgccaccaagatggagaccgaggcccacgcctag

SEQ ID NO: 75430 - DNA, 852 bp, synthetic construct
  misc_feature 1..852: note = Description of Artificial Sequence: Synthetic coding sequence
  source 1..852: mol_type = other DNA
atgcccagaagaagcctgcacgccgccgccgtgctgctgctggtgatcctgaaggagcagcccagcagccccgcccccgtgaacggcagcaagtggacctacttcgtgaagctgaacctgcccagcgacatgcacatccagggcctgcagagcagatacagcgccacccagctgcacctgcactggggcaaccccaacgacccccacggcagcgagcacaccgtgagcggccagcacttcgccgccgagctgcacatcgtgcactacaacagcgacctgtaccccgacgccagcaccgccagcaacaagagcgagggcctggccgtgctggccgtgctgatcgagatgggcagcttcaaccccagctacgacaagatcttcagccacctgcagcacgtgaagtacaagggccaggaggccttcgtgcccggcttcaacatcgaggagctgctgcccgagagaaccgccgagtactacagatacagaggcagcctgaccacccccccctgcaaccccaccgtgctgtggaccgtgttcagaaaccccgtgcagatcagccaggagcagctgctggccctggagaccgccctgtactgcacccacatggacgaccccagccccagagagatgatcaacaacttcagacaggtgcagaagttcgacgagagactggtgtacaccagcttcagccagggcatcatcctgagcctggccctggccggcatcctgggcatctgcatcgtggtggtggtgagcatctggctgttcagaagaaagagcatcaagaagggcgacaacaagggcgtgatctacaagcccgccaccaagatggagaccgaggcccacgcctag

SEQ ID NO: 75431 - DNA, 1014 bp, synthetic construct
  misc_feature 1..1014: note = Description of Artificial Sequence: Synthetic coding sequence
  source 1..1014: mol_type = other DNA
atgctgttcagcgccctgctgctggaggtgatctggatcctggccgccgacggcggccagcactggacctacgagggcccccacggccaggaccactggcccgccagctaccccgagtgcggcaacaacgcccagagccccatcgacatccagaccgacagcgtgaccttcgaccccgacctgcccgccctgcagccccacggctacgaccagcccggcaccgagcccctggacctgcacaacaacggccacaccgtgcagctgagcctgcccagcaccctgtacctgggcggcctgcccagaaagtacgtggccgcccagctgcacctgcactggggccagaagggcagccccggcggcagcgagcaccagatcaacagcgaggccaccttcgccgagctgcacatcgtgcactacgacagcgacagctacgacagcctgagcgaggccgccgagagaccccagggcctggccgtgctgggcatcctgatcgaggtgggcgagaccaagaacatcgcctacgagcacatcctgagccacctgcacgaggtgagacacaaggaccagaagaccagcgtgccccccttcaacctgagagagctgctgcccaagcagctgggccagtacttcagatacaacggcagcctgaccacccccccctgctaccagagcgtgctgtggaccgtgttctacagaagaagccagatcagcatggagcagctggagaagctgcagggcaccctgttcagcaccgaggaggagcccagcaagctgctggtgcagaactacagagccctgcagcccctgaaccagagaatggtgttcgccagcttcatccaggccggcagcagctacaccaccggcgagatgctgagcctgggcgtgggcatcctggtgggctgcctgtgcctgctgctggccgtgtacttcatcgccagaaagatcagaaagaagagactggagaacagaaagagcgtggtgttcaccagcgcccaggccaccaccgaggcctag

SEQ ID NO: 75432 - DNA, 834 bp, synthetic construct
  misc_feature 1..834: note = Description of Artificial Sequence: Synthetic coding sequence
  source 1..834: mol_type = other DNA
atgagcagcggcatccacgtggccctggtgaccggcggcaacaagggcatcggcctggccatcgtgagagacctgtgcagactgttcagcggcgacgtggtgctgaccgccagagacgtgaccagaggccaggccgccgtgcagcagctgcaggccgagggcctgagccccagattccaccagctggacatcgacgacctgcagagcatcagagccctgagagacttcctgagaaaggagtacggcggcctggacgtgctggtgaacaacgccggcatcgccttcaaggtggccgaccccacccccttccacatccaggccgaggtgaccatgaagaccaacttcttcggcaccagagacgtgtgcaccgagctgctgcccctgatcaagccccagggcagagtggtgaacgtgagcagcatcatgagcgtgagagccctgaagagctgcagccccgagctgcagcagaagttcagaagcgagaccatcaccgaggaggagctggtgggcctgatgaacaagttcgtggaggacaccaagaagggcgtgcaccagaaggagggctggcccagcagcgcctacggcgtgaccaagatcggcgtgaccgtgctgagcagaatccacgccagaaagctgagcgagcagagaaagggcgacaagatcctgctgaacgcctgctgccccggctgggtgagaaccgacatggccggccccaaggccaccaagagccccgaggagggcgccgagacccccgtgtacctggccctgctgccccccgacgccgagggcccccacggccagttcgtgagcgagaagagagtggagcagtggtag

SEQ ID NO: 75433 - DNA, 834 bp, synthetic construct
  misc_feature 1..834: note = Description of Artificial Sequence: Synthetic coding sequence
  source 1..834: mol_type = other DNA
atgagcagctgcagcagagtggccctggtgaccggcgccaacagaggcatcggcctggccatcgccagagagctgtgcagacagttcagcggcgacgtggtgctgaccgccagagacgtggccagaggccaggccgccgtgcagcagctgcaggccgagggcctgagccccagattccaccagctggacatcgacgacctgcagagcatcagagccctgagagacttcctgagaaaggagtacggcggcctgaacgtgctggtgaacaacgccgccgtggccttcaagagcgacgaccccatgcccttcgacatcaaggccgagatgaccctgaagaccaacttcttcgccaccagaaacatgtgcaacgagctgctgcccatcatgaagccccacggcagagtggtgaacatcagcagcctgcagtgcctgagagccttcgagaactgcagcgaggacctgcaggagagattccacagcgagaccctgaccgagggcgacctggtggacctgatgaagaagttcgtggaggacaccaagaacgaggtgcacgagagagagggctggcccaacagcccctacggcgtgagcaagctgggcgtgaccgtgctgagcagaatcctggccagaagactggacgagaagagaaaggccgacagaatcctggtgaacgcctgctgccccggccccgtgaagaccgacatggacggcaaggacagcatcagaaccgtggaggagggcgccgagacccccgtgtacctggccctgctgccccccgacgccaccgagccccagggccagctggtgcacgacaaggtggtgcagaactggtag

SEQ ID NO: 75434 - DNA, 2169 bp, synthetic construct
  misc_feature 1..2169: note = Description of Artificial Sequence: Synthetic coding sequence
  source 1..2169: mol_type = other DNA
atgctgaccatgggcagactgcagctggtggtgctgggcctgacctgctgctgggccgtggccagcgccgccaagctgggcgccgtgtacaccgagggcggcttcgtggagggcgtgaacaagaagctgggcctgctgggcgacagcgtggacatcttcaagggcatccccttcgccgcccccaccaaggccctggagaacccccagccccaccccggctggcagggcaccctgaaggccaagaacttcaagaagagatgcctgcaggccaccatcacccaggacagcacctacggcgacgaggactgcctgtacctgaacatctgggtgccccagggcagaaagcaggtgagcagagacctgcccgtgatgatctggatctacggcggcgccttcctgatgggcagcggccacggcgccaacttcctgaacaactacctgtacgacggcgaggagatcgccaccagaggcaacgtgatcgtggtgaccttcaactacagagtgggccccctgggcttcctgagcaccggcgacgccaacctgcccggcaactacggcctgagagaccagcacatggccatcgcctgggtgaagagaaacatcgccgccttcggcggcgaccccaacaacatcaccctgttcggcgagagcgccggcggcgccagcgtgagcctgcagaccctgagcccctacaacaagggcctgatcagaagagccatcagccagagcggcgtggccctgagcccctgggtgatccagaagaaccccctgttctgggccaagaaggtggccgagaaggtgggctgccccgtgggcgacgccgccagaatggcccagtgcctgaaggtgaccgaccccagagccctgaccctggcctacaaggtgcccctggccggcctggagtaccccatgctgcactacgtgggcttcgtgcccgtgatcgacggcgacttcatccccgccgaccccatcaacctgtacgccaacgccgccgacatcgactacatcgccggcaccaacaacatggacggccacatcttcgccagcatcgacatgcccgccatcaacaagggcaacaagaaggtgaccgaggacttctacaagctggtgagcgagttcaccatcaccaagggcctgagaggcgccaagaccaccttcgacgtgtacaccgagagctgggcccaggaccccagccaggagaacaagaagaagaccgtggtggacttcgagaccgacgtgctgttcctggtgcccaccgagatcgccctggcccagcacagagccaacgccaagagcgccaagacctacgcctacctgttcagccaccccagcagaatgcccgtgtaccccaagtgggtgggcgccgaccacgccgacgacatccagtacgtgttcggcaagcccttcgccacccccaccggctacagaccccaggacagaaccgtgagcaaggccatgatcgcctactggaccaacttcgccaagaccggcgaccccaacatgggcgacagcgccgtgcccacccactgggagccctacaccaccgagaacagcggctacctggagatcaccaagaagatgggcagcagcagcatgaagagaagcctgagaaccaacttcctgagatactggaccctgacctacctggccctgcccaccgtgaccgaccaggaggccacccccgtgccccccaccggcgacagcgaggccacccccgtgccccccaccggcgacagcgagaccgcccccgtgccccccaccggcgacagcggcgccccccccgtgccccccaccggcgacagcggcgccccccccgtgccccccaccggcgacagcggcgccccccccgtgccccccaccggcgacagcggcgccccccccgtgccccccaccggcgacagcggcgccccccccgtgccccccaccggcgacgccggccccccccccgtgccccccaccggcgacagcggcgccccccccgtgccccccaccggcgacagcggcgccccccccgtgacccccaccggcgacagcgagaccgcccccgtgccccccaccggcgacagcggcgccccccccgtgccccccaccggcgacagcgaggccgcccccgtgccccccaccgacgacagcaaggaggcccagatgcccgccgtgatcagattctag

SEQ ID NO: 75435 - DNA, 2064 bp, synthetic construct
  misc_feature 1..2064: note = Description of Artificial Sequence: Synthetic coding sequence
  source 1..2064: mol_type = other DNA
atgggcagactgcagctggtggtgctgggcctgacctgctgctgggccgtggccagcgccgccaagctgggcgccgtgtacaccgagggcggcttcgtggagggcgtgaacaagaagctgggcctgctgggcgacagcgtggacatcttcaagggcatccccttcgccgcccccaccaaggccctggagaacccccagccccaccccggctggcagggcaccctgaaggccaagaacttcaagaagagatgcctgcaggccaccatcacccaggacagcacctacggcgacgaggactgcctgtacctgaacatctgggtgccccagggcagaaagcaggtgagcagagacctgcccgtgatgatctggatctacggcggcgccttcctgatgggcagcggccacggcgccaacttcctgaacaactacctgtacgacggcgaggagatcgccaccagaggcaacgtgatcgtggtgaccttcaactacagagtgggccccctgggcttcctgagcaccggcgacgccaacctgcccggcaactacggcctgagagaccagcacatggccatcgcctgggtgaagagaaacatcgccgccttcggcggcgaccccaacaacatcaccctgttcggcgagagcgccggcggcgccagcgtgagcctgcagaccctgagcccctacaacaagggcctgatcagaagagccatcagccagagcggcgtggccctgagcccctgggtgatccagaagaaccccctgttctgggccaagaaggtggccgagaaggtgggctgccccgtgggcgacgccgccagaatggcccagtgcctgaaggtgaccgaccccagagccctgaccctggcctacaaggtgcccctggccggcctggagtaccccatgctgcactacgtgggcttcgtgcccgtgatcgacggcgacttcatccccgccgaccccatcaacctgtacgccaacgccgccgacatcgactacatcgccggcaccaacaacatggacggccacatcttcgccagcatcgacatgcccgccatcaacaagggcaacaagaaggtgaccgaggaggacttctacaagctggtgagcgagttcaccatcaccaagggcctgagaggcgccaagaccaccttcgacgtgtacaccgagagctgggcccaggaccccagccaggagaacaagaagaagaccgtggtggacttcgagaccgacgtgctgttcctggtgcccaccgagatcgccctggcccagcacagagccaacgccaaggaccccaacatgggcgacagcgccgtgcccacccactgggagccctacaccaccgagaacagcggctacctggagatcaccaagaagatgggcagcagcagcatgaagagaagcctgagaaccaacttcctgagatactggaccctgacctacctggccctgcccaccgtgaccgaccaggaggccacccccgtgccccccaccggcgacagcgaggccacccccgtgccccccaccggcgacagcgagaccgcccccgtgccccccaccggcgacagcggcgccccccccgtgccccccaccggcgacagcggcgccccccccgtgccccccaccggcgacagcggcgccccccccgtgccccccaccggcgacagcggcgccccccccgtgccccccaccggcgacagcggcgccccccccgtgccccccaccggcgacagcggcgccccccccgtgccccccaccggcgacagcggcgccccccccgtgccccccaccggcgacagcggcgccccccccgtgccccccaccggcgacgccggccccccccccgtgccccccaccggcgacagcggcgccccccccgtgccccccaccggcgacagcggcgccccccccgtgacccccaccggcgacagcgagaccgcccccgtgccccccaccggcgacagcggcgccccccccgtgccccccaccggcgacagcgaggccgcccccgtgccccccaccgacgacagcaaggaggcccagatgcccgccgtgatcagattctag

SEQ ID NO: 75436 - DNA, 2271 bp, synthetic construct
  misc_feature 1..2271: note = Description of Artificial Sequence: Synthetic coding sequence
  source 1..2271: mol_type = other DNA
atgctgaccatgggcagactgcagctggtggtgctgggcctgacctgctgctgggccgtggccagcgccgccaagctgggcgccgtgtacaccgagggcggcttcgtggagggcgtgaacaagaagctgggcctgctgggcgacagcgtggacatcttcaagggcatccccttcgccgcccccaccaaggccctggagaacccccagccccaccccggctggcagggcaccctgaaggccaagaacttcaagaagagatgcctgcaggccaccatcacccaggacagcacctacggcgacgaggactgcctgtacctgaacatctgggtgccccagggcagaaagcaggtgagcagagacctgcccgtgatgatctggatctacggcggcgccttcctgatgggcagcggccacggcgccaacttcctgaacaactacctgtacgacggcgaggagatcgccaccagaggcaacgtgatcgtggtgaccttcaactacagagtgggccccctgggcttcctgagcaccggcgacgccaacctgcccggcaactacggcctgagagaccagcacatggccatcgcctgggtgaagagaaacatcgccgccttcggcggcgaccccaacaacatcaccctgttcggcgagagcgccggcggcgccagcgtgagcctgcagaccctgagcccctacaacaagggcctgatcagaagagccatcagccagagcggcgtggccctgagcccctgggtgatccagaagaaccccctgttctgggccaagaaggtggccgagaaggtgggctgccccgtgggcgacgccgccagaatggcccagtgcctgaaggtgaccgaccccagagccctgaccctggcctacaaggtgcccctggccggcctggagtaccccatgctgcactacgtgggcttcgtgcccgtgatcgacggcgacttcatccccgccgaccccatcaacctgtacgccaacgccgccgacatcgactacatcgccggcaccaacaacatggacggccacatcttcgccagcatcgacatgcccgccatcaacaagggcaacaagaaggtgaccgaggaggacttctacaagctggtgagcgagttcaccatcaccaagggcctgagaggcgccaagaccaccttcgacgtgtacaccgagagctgggcccaggaccccagccaggagaacaagaagaagaccgtggtggacttcgagaccgacgtgctgttcctggtgcccaccgagatcgccctggcccagcacagagccaacgccaagagcgccaagacctacgcctacctgttcagccaccccagcagaatgcccgtgtaccccaagtgggtgggcgccgaccacgccgacgacatccagtacgtgttcggcaagcccttcgccacccccaccggctacagaccccaggacagaaccgtgagcaaggccatgatcgcctactggaccaacttcgccaagaccggcgaccccaacatgggcgacagcgccgtgcccacccactgggagccctacaccaccgagaacagcggctacctggagatcaccaagaagatgggcagcagcagcatgaagagaagcctgagaaccaacttcctgagatactggaccctgacctacctggccctgcccaccgtgaccgaccaggaggccacccccgtgccccccaccggcgacagcgaggccacccccgtgccccccaccggcgacagcgagaccgcccccgtgccccccaccggcgacagcggcgccccccccgtgccccccaccggcgacagcggcgccccccccgtgccccccaccggcgacagcggcgccccccccgtgccccccaccggcgacagcggcgccccccccgtgccccccaccggcgacagcggcgccccccccgtgccccccaccggcgacagcggcgccccccccgtgccccccaccggcgacagcggcgccccccccgtgccccccaccggcgacagcggcgccccccccgtgccccccaccggcgacgccggccccccccccgtgccccccaccggcgacagcggcgccccccccgtgccccccaccggcgacagcggcgccccccccgtgacccccaccggcgacagcgagaccgcccccgtgccccccaccggcgacagcggcgccccccccgtgccccccaccggcgacagcgaggccgcccccgtgccccccaccgacgacagcaaggaggcccagatgcccgccgtgatcagattctag

SEQ ID NO: 75437 - DNA, 1707 bp, synthetic construct
  misc_feature 1..1707: note = Description of Artificial Sequence: Synthetic coding sequence
  source 1..1707: mol_type = other DNA
atgtggctgagagccttcatcctggccaccctgagcgccagcgccgcctgggccggccaccccagcagcccccccgtggtggacaccgtgcacggcaaggtgctgggcaagttcgtgagcctggagggcttcgcccagcccgtggccatcttcctgggcatccccttcgccaagccccccctgggccccctgagattcacccccccccagcccgccgagccctggagcttcgtgaagaacgccaccagctacccccccatgtgcacccaggaccccaaggccggccagctgctgagcgagctgttcaccaacagaaaggagaacatccccctgaagctgagcgaggactgcctgtacctgaacatctacacccccgccgacctgaccaagaagaacagactgcccgtgatggtgtggatccacggcggcggcctgatggtgggcgccgccagcacctacgacggcctggccctggccgcccacgagaacgtggtggtggtgaccatccagtacagactgggcatctggggcttcttcagcaccggcgacgagcacagcagaggcaactggggccacctggaccaggtggccgccctgagatgggtgcaggacaacatcgccagcttcggcggcaaccccggcagcgtgaccatcttcggcgagagcgccggcggcgagagcgtgagcgtgctggtgctgagccccctggccaagaacctgttccacagagccatcagcgagagcggcgtggccctgaccagcgtgctggtgaagaagggcgacgtgaagcccctggccgagcagatcgccatcaccgccggctgcaagaccaccaccagcgccgtgatggtgcactgcctgagacagaagaccgaggaggagctgctggagaccaccctgaagatgaagttcctgagcctggacctgcagggcgaccccagagagagccagcccctgctgggcaccgtgatcgacggcatgctgctgctgaagacccccgaggagctgcaggccgagagaaacttccacaccgtgccctacatggtgggcatcaacaagcaggagttcggctggctgatccccatgcagctgatgagctaccccctgagcgagggccagctggaccagaagaccgccatgagcctgctgtggaagagctaccccctggtgtgcatcgccaaggagctgatccccgaggccaccgagaagtacctgggcggcaccgacgacaccgtgaagaagaaggacctgttcctggacctgatcgccgacgtgatgttcggcgtgcccagcgtgatcgtggccagaaaccacagagacgccggcgcccccacctacatgtacgagttccagtacagacccagcttcagcagcgacatgaagcccaagaccgtgatcggcgaccacggcgacgagctgttcagcgtgttcggcgcccccttcctgaaggagggcgccagcgaggaggagatcagactgagcaagatggtgatgaagttctgggccaacttcgccagaaacggcaaccccaacggcgagggcctgccccactggcccgagtacaaccagaaggagggctacctgcagatcggcgccaacacccaggccgcccagaagctgaaggacaaggaggtggccttctggaccaacctgttcgccaagaaggccgtggagaagcccccccagaccgagcacatcgagctgtag

SEQ ID NO: 75438 - DNA, 1704 bp, synthetic construct
  misc_feature 1..1704: note = Description of Artificial Sequence: Synthetic coding sequence
  source 1..1704: mol_type = other DNA
atgtggctgagagccttcatcctggccaccctgagcgccagcgccgcctggggccaccccagcagcccccccgtggtggacaccgtgcacggcaaggtgctgggcaagttcgtgagcctggagggcttcgcccagcccgtggccatcttcctgggcatccccttcgccaagccccccctgggccccctgagattcacccccccccagcccgccgagccctggagcttcgtgaagaacgccaccagctacccccccatgtgcacccaggaccccaaggccggccagctgctgagcgagctgttcaccaacagaaaggagaacatccccctgaagctgagcgaggactgcctgtacctgaacatctacacccccgccgacctgaccaagaagaacagactgcccgtgatggtgtggatccacggcggcggcctgatggtgggcgccgccagcacctacgacggcctggccctggccgcccacgagaacgtggtggtggtgaccatccagtacagactgggcatctggggcttcttcagcaccggcgacgagcacagcagaggcaactggggccacctggaccaggtggccgccctgagatgggtgcaggacaacatcgccagcttcggcggcaaccccggcagcgtgaccatcttcggcgagagcgccggcggcgagagcgtgagcgtgctggtgctgagccccctggccaagaacctgttccacagagccatcagcgagagcggcgtggccctgaccagcgtgctggtgaagaagggcgacgtgaagcccctggccgagcagatcgccatcaccgccggctgcaagaccaccaccagcgccgtgatggtgcactgcctgagacagaagaccgaggaggagctgctggagaccaccctgaagatgaagttcctgagcctggacctgcagggcgaccccagagagagccagcccctgctgggcaccgtgatcgacggcatgctgctgctgaagacccccgaggagctgcaggccgagagaaacttccacaccgtgccctacatggtgggcatcaacaagcaggagttcggctggctgatccccatgcagctgatgagctaccccctgagcgagggccagctggaccagaagaccgccatgagcctgctgtggaagagctaccccctggtgtgcatcgccaaggagctgatccccgaggccaccgagaagtacctgggcggcaccgacgacaccgtgaagaagaaggacctgttcctggacctgatcgccgacgtgatgttcggcgtgcccagcgtgatcgtggccagaaaccacagagacgccggcgcccccacctacatgtacgagttccagtacagacccagcttcagcagcgacatgaagcccaagaccgtgatcggcgaccacggcgacgagctgttcagcgtgttcggcgcccccttcctgaaggagggcgccagcgaggaggagatcagactgagcaagatggtgatgaagttctgggccaacttcgccagaaacggcaaccccaacggcgagggcctgccccactggcccgagtacaaccagaaggagggctacctgcagatcggcgccaacacccaggccgcccagaagctgaaggacaaggaggtggccttctggaccaacctgttcgccaagaaggccgtggagaagcccccccagaccgagcacatcgagctgtag

SEQ ID NO: 75439 - DNA, 1701 bp, synthetic construct
  misc_feature 1..1701: note = Description of Artificial Sequence: Synthetic coding sequence
  source 1..1701: mol_type = other DNA
atgtggctgagagccttcatcctggccaccctgagcgccagcgccgcctggggccaccccagcagcccccccgtggtggacaccgtgcacggcaaggtgctgggcaagttcgtgagcctggagggcttcgcccagcccgtggccatcttcctgggcatccccttcgccaagccccccctgggccccctgagattcacccccccccagcccgccgagccctggagcttcgtgaagaacgccaccagctacccccccatgtgcacccaggaccccaaggccggccagctgctgagcgagctgttcaccaacagaaaggagaacatccccctgaagctgagcgaggactgcctgtacctgaacatctacacccccgccgacctgaccaagaagaacagactgcccgtgatggtgtggatccacggcggcggcctgatggtgggcgccgccagcacctacgacggcctggccctggccgcccacgagaacgtggtggtggtgaccatccagtacagactgggcatctggggcttcttcagcaccggcgacgagcacagcagaggcaactggggccacctggaccaggtggccgccctgagatgggtgcaggacaacatcgccagcttcggcggcaaccccggcagcgtgaccatcttcggcgagagcgccggcggcgagagcgtgagcgtgctggtgctgagccccctggccaagaacctgttccacagagccatcagcgagagcggcgtggccctgaccagcgtgctggtgaagaagggcgacgtgaagcccctggccgagcagatcgccatcaccgccggctgcaagaccaccaccagcgccgtgatggtgcactgcctgagacagaagaccgaggaggagctgctggagaccaccctgaagatgaagttcctgagcctggacctgcagggcgaccccagagagagccagcccctgctgggcaccgtgatcgacggcatgctgctgctgaagacccccgaggagctgcaggccgagagaaacttccacaccgtgccctacatggtgggcatcaacaagcaggagttcggctggctgatccccatgctgatgagctaccccctgagcgagggccagctggaccagaagaccgccatgagcctgctgtggaagagctaccccctggtgtgcatcgccaaggagctgatccccgaggccaccgagaagtacctgggcggcaccgacgacaccgtgaagaagaaggacctgttcctggacctgatcgccgacgtgatgttcggcgtgcccagcgtgatcgtggccagaaaccacagagacgccggcgcccccacctacatgtacgagttccagtacagacccagcttcagcagcgacatgaagcccaagaccgtgatcggcgaccacggcgacgagctgttcagcgtgttcggcgcccccttcctgaaggagggcgccagcgaggaggagatcagactgagcaagatggtgatgaagttctgggccaacttcgccagaaacggcaaccccaacggcgagggcctgccccactggcccgagtacaaccagaaggagggctacctgcagatcggcgccaacacccaggccgcccagaagctgaaggacaaggaggtggccttctggaccaacctgttcgccaagaaggccgtggagaagcccccccagaccgagcacatcgagctgtag

SEQ ID NO: 75440 - DNA, 1299 bp, synthetic construct
  misc_feature 1..1299: note = Description of Artificial Sequence: Synthetic coding sequence
  source 1..1299: mol_type = other DNA
atggtgtggatccacggcggcggcctgatggtgggcgccgccagcacctacgacggcctggccctggccgcccacgagaacgtggtggtggtgaccatccagtacagactgggcatctggggcttcttcagcaccggcgacgagcacagcagaggcaactggggccacctggaccaggtggccgccctgagatgggtgcaggacaacatcgccagcttcggcggcaaccccggcagcgtgaccatcttcggcgagagcgccggcggcgagagcgtgagcgtgctggtgctgagccccctggccaagaacctgttccacagagccatcagcgagagcggcgtggccctgaccagcgtgctggtgaagaagggcgacgtgaagcccctggccgagcagatcgccatcaccgccggctgcaagaccaccaccagcgccgtgatggtgcactgcctgagacagaagaccgaggaggagctgctggagaccaccctgaagatgaagttcctgagcctggacctgcagggcgaccccagagagagccagcccctgctgggcaccgtgatcgacggcatgctgctgctgaagacccccgaggagctgcaggccgagagaaacttccacaccgtgccctacatggtgggcatcaacaagcaggagttcggctggctgatccccatgcagctgatgagctaccccctgagcgagggccagctggaccagaagaccgccatgagcctgctgtggaagagctaccccctggtgtgcatcgccaaggagctgatccccgaggccaccgagaagtacctgggcggcaccgacgacaccgtgaagaagaaggacctgttcctggacctgatcgccgacgtgatgttcggcgtgcccagcgtgatcgtggccagaaaccacagagacgccggcgcccccacctacatgtacgagttccagtacagacccagcttcagcagcgacatgaagcccaagaccgtgatcggcgaccacggcgacgagctgttcagcgtgttcggcgcccccttcctgaaggagggcgccagcgaggaggagatcagactgagcaagatggtgatgaagttctgggccaacttcgccagaaacggcaaccccaacggcgagggcctgccccactggcccgagtacaaccagaaggagggctacctgcagatcggcgccaacacccaggccgcccagaagctgaaggacaaggaggtggccttctggaccaacctgttcgccaagaaggccgtggagaagcccccccagaccgagcacatcgagctgtag

SEQ ID NO: 75441 - DNA, 1716 bp, synthetic construct
  misc_feature 1..1716: note = Description of Artificial Sequence: Synthetic coding sequence
  source 1..1716: mol_type = other DNA
atggagagagccgtgagagtggagagcggcgtgctggtgggcgtggtgtgcctgctgctggcctgccccgccaccgccaccggccccgaggtggcccagcccgaggtggacaccaccctgggcagagtgagaggcagacaggtgggcgtgaagggcaccgacagactggtgaacgtgttcctgggcatccccttcgcccagccccccctgggccccgacagattcagcgccccccaccccgcccagccctgggagggcgtgagagacgccagcaccgccccccccatgtgcctgcaggacgtggagagcatgaacagcagcagattcgtgctgaacggcaagcagcagatcttcagcgtgagcgaggactgcctggtgctgaacgtgtacagccccgccgaggtgcccgccggcagcggcagacccgtgatggtgtgggtgcacggcggcgccctgatcaccggcgccgccaccagctacgacggcagcgccctggccgcctacggcgacgtggtggtggtgaccgtgcagtacagactgggcgtgctgggcttcttcagcaccggcgacgagcacgcccccggcaaccagggcttcctggacgtggtggccgccctgagatgggtgcaggagaacatcgcccccttcggcggcgacctgaactgcgtgaccgtgttcggcggcagcgccggcggcagcatcatcagcggcctggtgctgagccccgtggccgccggcctgttccacagagccatcacccagagcggcgtgatcaccacccccggcatcatcgacagccacccctggcccctggcccagaagatcgccaacaccctggcctgcagcagcagcagccccgccgagatggtgcagtgcctgcagcagaaggagggcgaggagctggtgctgagcaagaagctgaagaacaccatctaccccctgaccgtggacggcaccgtgttccccaagagccccaaggagctgctgaaggagaagcccttccacagcgtgcccttcctgatgggcgtgaacaaccacgagttcagctggctgatccccagaggctggggcctgctggacaccatggagcagatgagcagagaggacatgctggccatcagcacccccgtgctgaccagcctggacgtgccccccgagatgatgcccaccgtgatcgacgagtacctgggcagcaacagcgacgcccaggccaagtgccaggccttccaggagttcatgggcgacgtgttcatcaacgtgcccaccgtgagcttcagcagatacctgagagacagcggcagccccgtgttcttctacgagttccagcacagacccagcagcttcgccaagatcaagcccgcctgggtgaaggccgaccacggcgccgagggcgccttcgtgttcggcggccccttcctgatggacgagagcagcagactggccttccccgaggccaccgaggaggagaagcagctgagcctgaccatgatggcccagtggacccacttcgccagaaccggcgaccccaacagcaaggccctgcccccctggccccagttcaaccaggccgagcagtacctggagatcaaccccgtgcccagagccggccagaagttcagagaggcctggatgcagttctggagcgagaccctgcccagcaagatccagcagtggcaccagaagcagaagaacagaaaggcccaggaggacctgtag

SEQ ID NO: 75442 - DNA, 633 bp, synthetic construct
  misc_feature 1..633: note = Description of Artificial Sequence: Synthetic coding sequence
  source 1..633: mol_type = other DNA
atggagcagatgagcagagaggacatgctggccatcagcacccccgtgctgaccagcctggacgtgccccccgagatgatgcccaccgtgatcgacgagtacctgggcagcaacagcgacgcccaggccaagtgccaggccttccaggagttcatgggcgacgtgttcatcaacgtgcccaccgtgagcttcagcagatacctgagagacagcggcagccccgtgttcttctacgagttccagcacagacccagcagcttcgccaagatcaagcccgcctgggtgaaggccgaccacggcgccgagggcgccttcgtgttcggcggccccttcctgatggacgagagcagcagactggccttccccgaggccaccgaggaggagaagcagctgagcctgaccatgatggcccagtggacccacttcgccagaaccggcgaccccaacagcaaggccctgcccccctggccccagttcaaccaggccgagcagtacctggagatcaaccccgtgcccagagccggccagaagttcagagaggcctggatgcagttctggagcgagaccctgcccagcaagatccagcagtggcaccagaagcagaagaacagaaaggcccaggaggacctgtag

SEQ ID NO: 75443 - DNA, 1707 bp, synthetic construct
  misc_feature 1..1707: note = Description of Artificial Sequence: Synthetic coding sequence
  source 1..1707: mol_type = other DNA
atggagagagccgtgagagtggagagcggcgtgctggtgggcgtggtgtgcctgctgctggcctgccccgccaccgccaccggccccgaggtggcccagcccgaggtggacaccaccctgggcagagtgagaggcagacaggtgggcgtgaagggcaccgacagactggtgaacgtgttcctgggcatccccttcgcccagccccccctgggccccgacagattcagcgccccccaccccgcccagccctgggagggcgtgagagacgccagcaccgccccccccatgtgcctgcaggacgtggagagcatgaacagcagcagattcgtgctgaacggcaagcagcagatcttcagcgtgagcgaggactgcctggtgctgaacgtgtacagccccgccgaggtgcccgccggcagcggcagacccgtgatggtgtgggtgcacggcggcgccctgatcaccggcgccgccaccagctacgacggcagcgccctggccgcctacggcgacgtggtggtggtgaccgtgcagtacagactgggcgtgctgggcttcttcagcaccggcgacgagcacgcccccggcaaccagggcttcctggacgtggtggccgccctgagatgggtgcaggagaacatcgcccccttcggcggcgacctgaactgcgtgaccgtgttcggcggcagcgccggcggcagcatcatcagcggcctggtgctgagccccgtggccgccggcctgttccacagagccatcacccagagcggcgtgatcaccacccccggcatcatcgacagccacccctggcccctggcccagaagatcgccaacaccctggcctgcagcagcagcagccccgccgagatggtgcagtgcctgcagcagaaggagggcgaggagctggtgctgagcaagaagctgaagaacaccatctaccccctgaccgtggacggcaccgtgttccccaagagccccaaggagctgctgaaggagaagcccttccacagcgtgcccttcctgatgggcgtgaacaaccacgagttcagctggctgatccccagaggctggggcctgctggacaccatggagcagatgagcagagaggacatgctggccatcagcacccccgtgctgaccagcctggacgtgccccccgagatgatgcccaccgtgatcgacgagtacctgggcagcaacagcgacgcccaggccaagtgccaggccttccaggagttcatgggcgacgtgttcatcaacgtgcccaccgtgagcttcagcagatacctgagagacagcggcagccccgtgttcttctacgagttccagcacagacccagcagcttcgccaagatcaagcccgcctgggtgaaggccgaccacggcgccgagggcgccttcgtgttcggcggccccttcctgatggacgagagcagcagactggaggccaccgaggaggagaagcagctgagcctgaccatgatggcccagtggacccacttcgccagaaccggcgaccccaacagcaaggccctgcccccctggccccagttcaaccaggccgagcagtacctggagatcaaccccgtgcccagagccggccagaagttcagagaggcctggatgcagttctggagcgagaccctgcccagcaagatccagcagtggcaccagaagcagaagaacagaaaggcccaggaggacctgtag

SEQ ID NO: 75444 - DNA, 738 bp, synthetic construct
  misc_feature 1..738: note = Description of Artificial Sequence: Synthetic coding sequence
  source 1..738: mol_type = other DNA
atggccaacgaggcctacccctgcccctgcgacatcggccacagactggagtacggcggcctgggcagagaggtgcaggtggagcacatcaaggcctacgtgaccaagagccccgtggacgccggcaaggccgtgatcgtgatccaggacatcttcggctggcagctgcccaacaccagatacatcgccgacatgatcagcggcaacggctacaccaccatcgtgcccgacttcttcgtgggccaggagccctgggaccccagcggcgactggagcatcttccccgagtggctgaagaccagaaacgcccagaagatcgacagagagatcagcgccatcctgaagtacctgaagcagcagtgccacgcccagaagatcggcatcgtgggcttctgctggggcggcaccgccgtgcaccacctgatgatgaagtacagcgagttcagagccggcgtgagcgtgtacggcatcgtgaaggacagcgaggacatctacaacctgaagaaccccaccctgttcatcttcgccgagaacgacgtggtgatccccctgaaggacgtgagcctgctgacccagaagctgaaggagcactgcaaggtggagtaccagatcaagaccttcagcggccagacccacggcttcgtgcacagaaagagagaggactgcagccccgccgacaagccctacatcgacgaggccagaagaaacctgatcgagtggctgaacaagtacatgtag

SEQ ID NO: 75445 - DNA, 1260 bp, synthetic construct
  misc_feature 1..1260: note = Description of Artificial Sequence: Synthetic coding sequence
  source 1..1260: mol_type = other DNA
atgagaggcctgctggtgctgagcgtgctgctgggcgccgtgttcggcaaggaggacttcgtgggccaccaggtgctgagaatcagcgtggccgacgaggcccaggtgcagaaggtgaaggagctggaggacctggagcacctgcagctggacttctggagaggccccgcccaccccggcagccccatcgacgtgagagtgcccttccccagcatccaggccgtgaagatcttcctggagagccacggcatcagctacgagaccatgatcgaggacgtgcagagcctgctggacgaggagcaggagcagatgttcgccttcagaagcagagccagaagcaccgacaccttcaactacgccacctaccacaccctggaggagatctacgacttcctggacctgctggtggccgagaacccccacctggtgagcaagatccagatcggcaacacctacgagggcagacccatctacgtgctgaagttcagcaccggcggcagcaagagacccgccatctggatcgacaccggcatccacagcagagagtgggtgacccaggccagcggcgtgtggttcgccaagaagatcacccaggactacggccaggacgccgccttcaccgccatcctggacaccctggacatcttcctggagatcgtgaccaaccccgacggcttcgccttcacccacagcaccaacagaatgtggagaaagaccagaagccacaccgccggcagcctgtgcatcggcgtggaccccaacagaaactgggacgccggcttcggcctgagcggcgccagcagcaacccctgcagcgagacctaccacggcaagttcgccaacagcgaggtggaggtgaagagcatcgtggacttcgtgaaggaccacggcaacatcaaggccttcatcagcatccacagctacagccagctgctgatgtacccctacggctacaagaccgagcccgtgcccgaccaggacgagctggaccagctgagcaaggccgccgtgaccgccctggccagcctgtacggcaccaagttcaactacggcagcatcatcaaggccatctaccaggccagcggcagcaccatcgactggacctacagccagggcatcaagtacagcttcaccttcgagctgagagacaccggcagatacggcttcctgctgcccgccagccagatcatccccaccgccaaggagacctggctggccctgctgaccatcatggagcacaccctgaaccacccctactag

SEQ ID NO: 75446 - DNA, 1098 bp, synthetic construct
  misc_feature 1..1098: note = Description of Artificial Sequence: Synthetic coding sequence
  source 1..1098: mol_type = other DNA
atggacagagccgccctgctgggcctggccagactgtgcgccctgtgggccgccctgctggtgctgttcccctacggcgcccagggcaactggatgtggctgggcatcgccagcttcggcgtgcccgagaagctgggctgcgccaacctgcccctgaacagcagacagaaggagctgtgcaagagaaagccctacctgctgcccagcatcagagagggcgccagactgggcatccaggagtgcggcagccagttcagacacgagagatggaactgcatgatcaccgccgccgccaccaccgcccccatgggcgccagccccctgttcggctacgagctgagcagcggcaccaaggagaccgccttcatctacgccgtgatggccgccggcctggtgcacagcgtgaccagaagctgcagcgccggcaacatgaccgagtgcagctgcgacaccaccctgcagaacggcggcagcgccagcgagggctggcactggggcggctgcagcgacgacgtgcagtacggcatgtggttcagcagaaagttcctggacttccccatcggcaacaccaccggcaaggagaacaaggtgctgctggccatgaacctgcacaacaacgaggccggcagacaggccgtggccaagctgatgagcgtggactgcagatgccacggcgtgagcggcagctgcgccgtgaagacctgctggaagaccatgagcagcttcgagaagatcggccacctgctgaaggacaagtacgagaacagcatccagatcagcgacaagaccaagagaaagatgagaagaagagagaaggaccagagaaagatccccatccacaaggacgacctgctgtacgtgaacaagagccccaactactgcgtggaggacaagaagctgggcatccccggcacccagggcagagagtgcaacagaaccagcgagggcgccgacggctgcaacctgctgtgctgcggcagaggctacaacacccacgtggtgagacacgtggagagatgcgagtgcaagttcatctggtgctgctacgtgagatgcagaagatgcgagagcatgaccgacgtgcacacctgcaagtag

SEQ ID NO: 75447 - DNA, 1254 bp, synthetic construct
  misc_feature 1..1254: note = Description of Artificial Sequence: Synthetic coding sequence
  source 1..1254: mol_type = other DNA
atgagactgatcctgcccgtgggcctgatcgccaccaccctggccatcgcccccgtgagattcgacagagagaaggtgttcagagtgaagccccaggacgagaagcaggccgacatcatcaaggacctggccaagaccaacgagctggacttctggtaccccggcgccacccaccacgtggccgccaacatgatggtggacttcagagtgagcgagaaggagagccaggccatccagagcgccctggaccagaacaagatgcactacgagatcctgatccacgacctgcaggaggagatcgagaagcagttcgacgtgaaggaggacatccccggcagacacagctacgccaagtacaacaactgggagaagatcgtggcctggaccgagaagatgatggacaagtaccccgagatggtgagcagaatcaagatcggcagcaccgtggaggacaaccccctgtacgtgctgaagatcggcgagaagaacgagagaagaaaggccatcttcaccgactgcggcatccacgccagagagtgggtgagccccgccttctgccagtggttcgtgtaccaggccaccaagacctacggcagaaacaagatcatgaccaagctgctggacagaatgaacttctacatcctgcccgtgttcaacgtggacggctacatctggagctggaccaagaacagaatgtggagaaagaacagaagcaagaaccagaacagcaagtgcatcggcaccgacctgaacagaaacttcaacgccagctggaacagcatccccaacaccaacgacccctgcgccgacaactacagaggcagcgcccccgagagcgagaaggagaccaaggccgtgaccaacttcatcagaagccacctgaacgagatcaaggtgtacatcaccttccacagctacagccagatgctgctgttcccctacggctacaccagcaagctgccccccaaccacgaggacctggccaaggtggccaagatcggcaccgacgtgctgagcaccagatacgagaccagatacatctacggccccatcgagagcaccatctaccccatcagcggcagcagcctggactgggcctacgacctgggcatcaagcacaccttcgccttcgagctgagagacaagggcaagttcggcttcctgctgcccgagagcagaatcaagcccacctgcagagagaccatgctggccgtgaagttcatcgccaagtacatcctgaagcacaccagctag

SEQ ID NO: 75448 - DNA, 1260 bp, synthetic construct
  misc_feature 1..1260: note = Description of Artificial Sequence: Synthetic coding sequence
  source 1..1260: mol_type = other DNA
atggccatgagactgatcctgttcttcggcgccctgttcggccacatctactgcctggagaccttcgtgggcgaccaggtgctggagatcgtgcccagcaacgaggagcagatcaagaacctgctgcagctggaggcccaggagcacctgcagctggacttctggaagagccccaccacccccggcgagaccgcccacgtgagagtgcccttcgtgaacgtgcaggccgtgaaggtgttcctggagagccagggcatcgcctacagcatcatgatcgaggacgtgcaggtgctgctggacaaggagaacgaggagatgctgttcaacagaagaagagagagaagcggcaacttcaacttcggcgcctaccacaccctggaggagatcagccaggagatggacaacctggtggccgagcaccccggcctggtgagcaaggtgaacatcggcagcagcttcgagaacagacccatgaacgtgctgaagttcagcaccggcggcgacaagcccgccatctggctggacgccggcatccacgccagagagtgggtgacccaggccaccgccctgtggaccgccaacaagatcgtgagcgactacggcaaggaccccagcatcaccagcatcctggacgccctggacatcttcctgctgcccgtgaccaaccccgacggctacgtgttcagccagaccaagaacagaatgtggagaaagaccagaagcaaggtgagcggcagcctgtgcgtgggcgtggaccccaacagaaactgggacgccggcttcggcggccccggcgccagcagcaacccctgcagcgacagctaccacggccccagcgccaacagcgaggtggaggtgaagagcatcgtggacttcatcaagagccacggcaaggtgaaggccttcatcaccctgcacagctacagccagctgctgatgttcccctacggctacaagtgcaccaagctggacgacttcgacgagctgagcgaggtggcccagaaggccgcccagagcctgagaagcctgcacggcaccaagtacaaggtgggccccatctgcagcgtgatctaccaggccagcggcggcagcatcgactggagctacgactacggcatcaagtacagcttcgccttcgagctgagagacaccggcagatacggcttcctgctgcccgccagacagatcctgcccaccgccgaggagacctggctgggcctgaaggccatcatggagcacgtgagagaccacccctactag

SEQ ID NO: 75449 - DNA, 1167 bp, synthetic construct
  misc_feature 1..1167: note = Description of Artificial Sequence: Synthetic coding sequence
  source 1..1167: mol_type = other DNA
atgagatggatcctgttcatcggcgccctgatcggcagcagcatctgcggccaggagaagttcttcggcgaccaggtgctgagaatcaacgtgagaaacggcgacgagatcagcaagctgagccagctggtgaacagcaacaacctgaagctgaacttctggaagagccccagcagcttcaacagacccgtggacgtgctggtgcccagcgtgagcctgcaggccttcaagagcttcctgagaagccagggcctggagtacgccgtgaccatcgaggacctgcagatctaccacgagatggacaacatcgccgccgacttccccgacctggccagaagagtgaagatcggccacagcttcgagaacagacccatgtacgtgctgaagttcagcaccggcaagggcgtgagaagacccgccgtgtggctgaacgccggcatccacagcagagagtggatcagccaggccaccgccatctggaccgccagaaagatcgtgagcgactaccagagagaccccgccatcaccagcatcctggagaagatggacatcttcctgctgcccgtggccaaccccgacggctacgtgtacacccagacccagaacagactgtggagaaagaccagaagcagaaaccccggcagcagctgcatcggcgccgaccccaacagaaactggaacgccagcttcgccggcaagggcgccagcgacaacccctgcagcgaggtgtaccacggcccccacgccaacagcgaggtggaggtgaagagcgtggtggacttcatccagaagcacggcaacttcaagggcttcatcgacctgcacagctacagccagctgctgatgtacccctacggctacagcgtgaagaaggcccccgacgccgaggagctggacaaggtggccagactggccgccaaggccctggccagcgtgagcggcaccgagtaccaggtgggccccacctgcaccaccgtgtaccccgccagcggcagcagcatcgactgggcctacgacaacggcatcaagttcgccttcaccttcgagctgagagacaccggcacctacggcttcctgctgcccgccaaccagatcatccccaccgccgaggagacctggctgggcctgaagaccatcatggagcacgtgagagacaacctgtactag

SEQ ID NO: 75450 - DNA, 681 bp, synthetic construct
  misc_feature 1..681: note = Description of Artificial Sequence: Synthetic coding sequence
  source 1..681: mol_type = other DNA
atgaagatcgtgagcgactaccagagagaccccgccatcaccagcatcctggagaagatggacatcttcctgctgcccgtggccaaccccgacggctacgtgtacacccagacccagaacagactgtggagaaagaccagaagcagaaaccccggcagcagctgcatcggcgccgaccccaacagaaactggaacgccagcttcgccggcaagggcgccagcgacaacccctgcagcgaggtgtaccacggcccccacgccaacagcgaggtggaggtgaagagcgtggtggacttcatccagaagcacggcaacttcaagggcttcatcgacctgcacagctacagccagctgctgatgtacccctacggctacagcgtgaagaaggcccccgacgccgaggagctggacaaggtggccagactggccgccaaggccctggccagcgtgagcggcaccgagtaccaggtgggccccacctgcaccaccgtgtaccccgccagcggcagcagcatcgactgggcctacgacaacggcatcaagttcgccttcaccttcgagctgagagacaccggcacctacggcttcctgctgcccgccaaccagatcatccccaccgccgaggagacctggctgggcctgaagaccatcatggagcacgtgagagacaacctgtactag

SEQ ID NO: 75451 - DNA, 582 bp, synthetic construct
  misc_feature 1..582: note = Description of Artificial Sequence: Synthetic coding sequence
  source 1..582: mol_type = other DNA
atgcaccacctgaacaagacccacagcggcctgatccacatgttcagcatcggcagaagctacgagggcagaagcctgttcatcctgaagctgggcagaagaagcagactgaagagagccgtgtggatcgactgcggcatccacgccagagagtggatcggccccgccttctgccagtggttcgtgaaggaggccctgctgacctacaagagcgaccccgccatgagaaagatgctgaaccacctgtacttctacatcatgcccgtgttcaacgtggacggctaccacttcagctggaccaacgacagattctggagaaagaccagaagcagaaacagcagattcagatgcagaggcgtggacgccaacagaaactggaaggtgaagtggtgcgacgtgagcagcggcagcagcatggactgggcctacaagaacggcatcccctacgccttcgccttcgagctgagagacaccggctacttcggcttcctgctgcccgagatgctgatcaagcccacctgcaccgagaccatgctggccgtgaagaacatcaccatgcacctgctgaagaagtgcccctag

SEQ ID NO: 75452 - DNA, 1314 bp, synthetic construct
  misc_feature 1..1314: note = Description of Artificial Sequence: Synthetic coding sequence
  source 1..1314: mol_type = other DNA
atgaagtgcctgggcaagagaagaggccaggccgccgccttcctgcccctgtgctggctgttcctgaagatcctgcagcccggccacagccacctgtacaacaacagatacgccggcgacaaggtgatcagattcatccccaagaccgaggaggaggcctacgccctgaagaagatcagctaccagctgaaggtggacctgtggcagcccagcagcatcagctacgtgagcgagggcaccgtgaccgacgtgcacatcccccagaacggcagcagagccctgctggccttcctgcaggaggccaacatccagtacaaggtgctgatcgaggacctgcagaagaccctggagaagggcagcagcctgcacacccagagaaacagaagaagcctgagcggctacaactacgaggtgtaccacagcctggaggagatccagaactggatgcaccacctgaacaagacccacagcggcctgatccacatgttcagcatcggcagaagctacgagggcagaagcctgttcatcctgaagctgggcagaagaagcagactgaagagagccgtgtggatcgactgcggcatccacgccagagagtggatcggccccgccttctgccagtggttcgtgaaggaggccctgctgacctacaagagcgaccccgccatgagaaagatgctgaaccacctgtacttctacatcatgcccgtgttcaacgtggacggctaccacttcagctggaccaacgacagattctggagaaagaccagaagcagaaacagcagattcagatgcagaggcgtggacgccaacagaaactggaaggtgaagtggtgcgacgagggcgccagcatgcacccctgcgacgacacctactgcggccccttccccgagagcgagcccgaggtgaaggccgtggccaacttcctgagaaagcacagaaagcacatcagagcctacctgagcttccacgcctacgcccagatgctgctgtacccctacagctacaagtacgccaccatccccaacttcagatgcgtggagagcgccgcctacaaggccgtgaacgccctgcagagcgtgtacggcgtgagatacagatacggccccgccagcaccaccctgtacgtgagcagcggcagcagcatggactgggcctacaagaacggcatcccctacgccttcgccttcgagctgagagacaccggctacttcggcttcctgctgcccgagatgctgatcaagcccacctgcaccgagaccatgctggccgtgaagaacatcaccatgcacctgctgaagaagtgcccctag

SEQ ID NO: 75453 - DNA, 948 bp, synthetic construct
  misc_feature 1..948: note = Description of Artificial Sequence: Synthetic coding sequence
  source 1..948: mol_type = other DNA
atgaagtgcctgggcaagagaagaggccaggccgccgccttcctgcccctgtgctggctgttcctgaagatcctgcagcccggccacagccacctgtacaacaacagatacgccggcgacaaggtgatcagattcatccccaagaccgaggaggaggcctacgccctgaagaagatcagctaccagctgaaggtggacctgtggcagcccagcagcatcagctacgtgagcgagggcaccgtgaccgacgtgcacatcccccagaacggcagcagagccctgctggccttcctgcaggaggccaacatccagtacaaggtgctgatcgaggacctgcagaagaccctggagaagggcagcagcctgcacacccagagaaacagaagaagcctgagcggctacaactacgaggtgtaccacagcctggaggagatccagaactggatgcaccacctgaacaagacccacagcggcctgatccacatgttcagcatcggcagaagctacgagggcagaagcctgttcatcctgaagctgggcagaagaagcagactgaagagagccgtgtggatcgactgcggcatccacgccagagagtggatcggccccgccttctgccagtggttcgtgaaggaggccctgctgacctacaagagcgaccccgccatgagaaagatgctgaaccacctgtacttctacatcatgcccgtgttcaacgtggacggctaccacttcagctggaccaacgacagattctggagaaagaccagaagcagaaacagcagattcagatgcagaggcgtggacgccaacagaaactggaaggtgaagtggtgcggcaagttcggcaccaactgggaccccgaccccaaggtgagcgccggcttcaccctgcagaacatgagccccgaggacagccacggcagactgatgttcttctgcatgtag

SEQ ID NO: 75454 - DNA, 1272 bp, synthetic construct
  misc_feature 1..1272: note = Description of Artificial Sequence: Synthetic coding sequence
  source 1..1272: mol_type = other DNA
atgaagctgtgcagcctggccgtgctggtgcccatcgtgctgttctgcgagcagcacgtgttcgccttccagagcggccaggtgctggccgccctgcccagaaccagcagacaggtgcaggtgctgcagaacctgaccaccacctacgagatcgtgctgtggcagcccgtgaccgccgacctgatcgtgaagaagaagcaggtgcacttcttcgtgaacgccagcgacgtggacaacgtgaaggcccacctgaacgtgagcggcatcccctgcagcgtgctgctggccgacgtggaggacctgatccagcagcagatcagcaacgacaccgtgagccccagagccagcgccagctactacgagcagtaccacagcctgaacgagatctacagctggatcgagttcatcaccgagagacaccccgacatgctgaccaagatccacatcggcagcagcttcgagaagtaccccctgtacgtgctgaaggtgagcggcaaggagcaggccgccaagaacgccatctggatcgactgcggcatccacgccagagagtggatcagccccgccttctgcctgtggttcatcggccacatcacccagttctacggcatcatcggccagtacaccaacctgctgagactggtggacttctacgtgatgcccgtggtgaacgtggacggctacgactacagctggaagaagaacagaatgtggagaaagaacagaagcttctacgccaacaaccactgcatcggcaccgacctgaacagaaacttcgccagcaagcactggtgcgaggagggcgccagcagcagcagctgcagcgagacctactgcggcctgtaccccgagagcgagcccgaggtgaaggccgtggccagcttcctgagaagaaacatcaaccagatcaaggcctacatcagcatgcacagctacagccagcacatcgtgttcccctacagctacaccagaagcaagagcaaggaccacgaggagctgagcctggtggccagcgaggccgtgagagccatcgagaagatcagcaagaacaccagatacacccacggccacggcagcgagaccctgtacctggcccccggcggcggcgacgactggatctacgacctgggcatcaagtacagcttcaccatcgagctgagagacaccggcacctacggcttcctgctgcccgagagatacatcaagcccacctgcagagaggccttcgccgccgtgagcaagatcgcctggcacgtgatcagaaacgtgtag

SEQ ID NO: 75455 - DNA, 1083 bp, synthetic construct
  misc_feature 1..1083: note = Description of Artificial Sequence: Synthetic coding sequence
  source 1..1083: mol_type = other DNA
atgaagctgtgcagcctggccgtgctggtgcccatcgtgctgttctgcgagcagcacgtgttcgccttccagagcggccaggtgctggccgccctgcccagaaccagcagacaggtgcaggtgctgcagaacctgaccaccacctacgagatcgtgctgtggcagcccgtgaccgccgacctgatcgtgaagaagaagcaggtgcacttcttcgtgaacgccagcgacgtggacaacgtgaaggcccacctgaacgtgagcggcatcccctgcagcgtgctgctggccgacgtggaggacctgatccagcagcagatcagcaacgacaccgtgagccccagagccagcgccagctactacgagcagtaccacagcctgaacgagatctacagctggatcgagttcatcaccgagagacaccccgacatgctgaccaagatccacatcggcagcagcttcgagaagtaccccctgtacgtgctgaaggtgagcggcaaggagcaggccgccaagaacgccatctggatcgactgcggcatccacgccagagagtggatcagccccgccttctgcctgtggttcatcggccacaacagaatgtggagaaagaacagaagcttctacgccaacaaccactgcatcggcaccgacctgaacagaaacttcgccagcaagcactggtgcgaggagggcgccagcagcagcagctgcagcgagacctactgcggcctgtaccccgagagcgagcccgaggtgaaggccgtggccagcttcctgagaagaaacatcaaccagatcaaggcctacatcagcatgcacagctacagccagcacatcgtgttcccctacagctacaccagaagcaagagcaaggaccacgaggagctgagcctggtggccagcgaggccgtgagagccatcgagaagatcagcaagaacaccagatacacccacggccacggcagcgagaccctgtacctggcccccggcggcggcgacgactggatctacgacctgggcatcaagtacagcgtgaccagcaacccccccgtggagaagctgctgcccctgagcctgaagtag

SEQ ID NO: 75456 - DNA, 849 bp, synthetic construct
  misc_feature 1..849: note = Description of Artificial Sequence: Synthetic coding sequence
  source 1..849: mol_type = other DNA
atgctgcccctgctgagatgcgtgcccagagtgctgggcagcagcgtggccggcctgagagccgccgcccccgccagccccttcagacagctgctgcagcccgcccccagactgtgcaccagacccttcggcctgctgagcgtgagagccggcagcgagagaagacccggcctgctgagacccagaggcccctgcgcctgcggctgcggctgcggcagcctgcacaccgacggcgacaaggccttcgtggacttcctgagcgacgagatcaaggaggagagaaagatccagaagcacaagaccctgcccaagatgagcggcggctgggagctggagctgaacggcaccgaggccaagctggtgagaaaggtggccggcgagaagatcaccgtgaccttcaacatcaacaacagcatcccccccaccttcgacggcgaggaggagcccagccagggccagaaggtggaggagcaggagcccgagctgaccagcacccccaacttcgtggtggaggtgatcaagaacgacgacggcaagaaggccctggtgctggactgccactaccccgaggacgaggtgggccaggaggacgaggccgagagcgacatcttcagcatcagagaggtgagcttccagagcaccggcgagagcgagtggaaggacaccaactacaccctgaacaccgacagcctggactgggccctgtacgaccacctgatggacttcctggccgacagaggcgtggacaacaccttcgccgacgagctggtggagctgagcaccgccctggagcaccaggagtacatcaccttcctggaggacctgaagagcttcgtgaagagccagtag

SEQ ID NO: 75457 - DNA, 3402 bp, synthetic construct
  misc_feature 1..3402: note = Description of Artificial Sequence: Synthetic coding sequence
  source 1..3402: mol_type = other DNA
atgagattcgtgctgagcggcaacctgcacggcggcagcgtggtggccagctaccccttcgacgacagccccgagcacaaggccaccggcatctacagcaagaccagcgacgacgaggtgttcaagtacctggccaaggcctacgccagcaaccaccccatcatgaagaccggcgagccccactgccccggcgacgaggacgagaccttcaaggacggcatcaccaacggcgcccactggtacgacgtggagggcggcatgcaggactacaactacgtgtgggccaactgcttcgagatcaccctggagctgagctgctgcaagtacccccccgccagccagctgagacaggagtgggagaacaacagagagagcctgatcaccctgatcgagaaggtgcacatcggcgtgaagggcttcgtgaaggacagcatcaccggcagcggcctggagaacgccaccatcagcgtggccggcatcaaccacaacatcaccaccggcagattcggcgacttctacagactgctggtgcccggcacctacaacctgaccgtggtgctgaccggctacatgcccctgaccgtgaccaacgtggtggtgaaggagggccccgccaccgaggtggacttcagcctgagacccaccgtgaccagcgtgatccccgacaccaccgaggccgtgagcaccgccagcaccgtggccatccccaacatcctgagcggcaccagcagcagctaccagcccatccagcccaaggacttccaccaccaccacttccccgacatggagatcttcctgagaagattcgccaacgagtaccccaacatcaccagactgtacagcctgggcaagagcgtggagagcagagagctgtacgtgatggagatcagcgacaaccccggcgtgcacgagcccggcgagcccgagttcaagtacatcggcaacatgcacggcaacgaggtggtgggcagagagctgctgctgaacctgatcgagtacctgtgcaagaacttcggcaccgaccccgaggtgaccgacctggtgcacaacaccagaatccacctgatgcccagcatgaaccccgacggctacgagaagagccaggagggcgacagcatcagcgtgatcggcagaaacaacagcaacaacttcgacctgaacagaaacttccccgaccagttcgtgcagatcaccgaccccacccagcccgagaccatcgccgtgatgagctggatgaagagctaccccttcgtgctgagcgccaacctgcacggcggcagcctggtggtgaactaccccttcgacgacgacgagcagggcctggccacctacagcaagagccccgacgacgccgtgttccagcagatcgccctgagctacagcaaggagaacagccagatgttccagggcagaccctgcaagaacatgtaccccaacgagtacttcccccacggcatcaccaacggcgccagctggtacaacgtgcccggcggcatgcaggactggaactacctgcagaccaactgcttcgaggtgaccatcgagctgggctgcgtgaagtaccccctggagaaggagctgcccaacttctgggagcagaacagaagaagcctgatccagttcatgaagcaggtgcaccagggcgtgagaggcttcgtgctggacgccaccgacggcagaggcatcctgaacgccaccatcagcgtggccgagatcaaccaccccgtgaccacctacaagaccggcgactactggagactgctggtgcccggcacctacaagatcaccgccagcgccagaggctacaaccccgtgaccaagaacgtgaccgtgaagagcgagggcgccatccaggtgaacttcaccctggtgagaagcagcaccgacagcaacaacgagagcaagaagggcaagggcgccagcagcagcaccaacgacgccagcgaccccaccaccaaggagttcgagaccctgatcaaggacctgagcgccgagaacggcctggagagcctgatgctgagaagcagcagcaacctggccctggccctgtacagataccacagctacaaggacctgagcgagttcctgagaggcctggtgatgaactacccccacatcaccaacctgaccaacctgggccagagcaccgagtacagacacatctggagcctggagatcagcaacaagcccaacgtgagcgagcccgaggagcccaagatcagattcgtggccggcatccacggcaacgcccccgtgggcaccgagctgctgctggccctggccgagttcctgtgcctgaactacaagaagaaccccgccgtgacccagctggtggacagaaccagaatcgtgatcgtgcccagcctgaaccccgacggcagagagagagcccaggagaaggactgcaccagcaagatcggccagaccaacgccagaggcaaggacctggacaccgacttcaccaacaacgccagccagcccgagaccaaggccatcatcgagaacctgatccagaagcaggacttcagcctgagcgtggccctggacggcggcagcatgctggtgacctacccctacgacaagcccgtgcagaccgtggagaacaaggagaccctgaagcacctggccagcctgtacgccaacaaccaccccagcatgcacatgggccagcccagctgccccaacaagagcgacgagaacatccccggcggcgtgatgagaggcgccgagtggcacagccacctgggcagcatgaaggactacagcgtgacctacggccactgccccgagatcaccgtgtacaccagctgctgctacttccccagcgccgccagactgcccagcctgtgggccgacaacaagagaagcctgctgagcatgctggtggaggtgcacaagggcgtgcacggcttcgtgaaggacaagaccggcaagcccatcagcaaggccgtgatcgtgctgaacgagggcatcaaggtgcagaccaaggagggcggctacttccacgtgctgctggcccccggcgtgcacaacatcatcgccatcgccgacggctaccagcagcagcacagccaggtgttcgtgcaccacgacgccgccagcagcgtggtgatcgtgttcgacaccgacaacagaatcttcggcctgcccagagagctggtggtgaccgtgagcggcgccaccatgagcgccctgatcctgaccgcctgcatcatctggtgcatctgcagcatcaagagcaacagacacaaggacggcttccacagactgagacagcaccacgacgagtacgaggacgagatcagaatgatgagcaccggcagcaagaagagcctgctgagccacgagttccaggacgagaccgacaccgaggaggagaccctgtacagcagcaagcactag

SEQ ID NO: 75458 - DNA, 1149 bp, synthetic construct
  misc_feature 1..1149: note = Description of Artificial Sequence: Synthetic coding sequence
  source 1..1149: mol_type = other DNA
atgagaagaagaagaagactgcagcaggaggacggcatcagcttcgagtaccacagataccccgagctgagagaggccctggtgagcgtgtggctgcagtgcaccgccatcagcagaatctacaccgtgggcagaagcttcgagggcagagagctgctggtgatcgagctgagcgacaaccccggcgtgcacgagcccggcgagcccgagttcaagtacatcggcaacatgcacggcaacgaggccgtgggcagagagctgctgatcttcctggcccagtacctgtgcaacgagtaccagaagggcaacgagaccatcgtgaacctgatccacagcaccagaatccacatcatgcccagcctgaaccccgacggcttcgagaaggccgccagccagcccggcgagctgaaggactggttcgtgggcagaagcaacgcccagggcatcgacctgaacagaaacttccccgacctggacagaatcgtgtacgtgaacgagaaggagggcggccccaacaaccacctgctgaagaacatgaagaagatcgtggaccagaacaccaagctggcccccgagaccaaggccgtgatccactggatcatggacatccccttcgtgctgagcgccaacctgcacggcggcgacctggtggccaactacccctacgacgagaccagaagcggcagcgcccacgagtacagcagcagccccgacgacgccatcttccagagcctggccagagcctacagcagcttcaaccccgccatgagcgaccccaacagacccccctgcagaaagaacgacgacgacagcagcttcgtggacggcaccaccaacggcggcgcctggtacagcgtgcccggcggcatgcaggacttcaactacctgagcagcaactgcttcgagatcaccgtggagctgagctgcgagaagttcccccccgaggagaccctgaagacctactgggaggacaacaagaacagcctgatcagctacctggagcagatccacagaggcgtgaagggcttcgtgagagacctgcagggcaaccccatcgccaacgccaccatcagcgtggagggcatcgaccacgacgtgaccagcgccaaggacggcgactactggagactgctgacctggaagctgtag

SEQ ID NO: 75459 - DNA, 1431 bp, synthetic construct
  misc_feature 1..1431: note = Description of Artificial Sequence: Synthetic coding sequence
  source 1..1431: mol_type = other DNA
atggccggcagaggcggcagcgccctgctggccctgtgcggcgccctggccgcctgcggctggctgctgggcgccgaggcccaggagcccggcgcccccgccgccggcatgagaagaagaagaagactgcagcaggaggacggcatcagcttcgagtaccacagataccccgagctgagagaggccctggtgagcgtgtggctgcagtgcaccgccatcagcagaatctacaccgtgggcagaagcttcgagggcagagagctgctggtgatcgagctgagcgacaaccccggcgtgcacgagcccggcgagcccgagttcaagtacatcggcaacatgcacggcaacgaggccgtgggcagagagctgctgatcttcctggcccagtacctgtgcaacgagtaccagaagggcaacgagaccatcgtgaacctgatccacagcaccagaatccacatcatgcccagcctgaaccccgacggcttcgagaaggccgccagccagcccggcgagctgaaggactggttcgtgggcagaagcaacgcccagggcatcgacctgaacagaaacttccccgacctggacagaatcgtgtacgtgaacgagaaggagggcggccccaacaaccacctgctgaagaacatgaagaagatcgtggaccagaacaccaagctggcccccgagaccaaggccgtgatccactggatcatggacatccccttcgtgctgagcgccaacctgcacggcggcgacctggtggccaactacccctacgacgagaccagaagcggcagcgcccacgagtacagcagcagccccgacgacgccatcttccagagcctggccagagcctacagcagcttcaaccccgccatgagcgaccccaacagacccccctgcagaaagaacgacgacgacagcagcttcgtggacggcaccaccaacggcggcgcctggtacagcgtgcccggcggcatgcaggacttcaactacctgagcagcaactgcttcgagatcaccgtggagctgagctgcgagaagttcccccccgaggagaccctgaagacctactgggaggacaacaagaacagcctgatcagctacctggagcagatccacagaggcgtgaagggcttcgtgagagacctgcagggcaaccccatcgccaacgccaccatcagcgtggagggcatcgaccacgacgtgaccagcgccaaggacggcgactactggagactgctgatccccggcaactacaagctgaccgccagcgcccccggctacctggccatcaccaagaaggtggccgtgccctacagccccgccgccggcgtggacttcgagctggagagcttcagcgagagaaaggaggaggagaaggaggagctgatggagtggtggaagatgatgagcgagaccctgaacttctag

SEQ ID NO: 75460 - DNA, 1332 bp, synthetic construct
  misc_feature 1..1332: note = Description of Artificial Sequence: Synthetic coding sequence
  source 1..1332: mol_type = other DNA
atggacttcccctgcctgtggctgggcctgctgctgcccctggtggccgccctggacttcaactaccacagacaggagggcatggaggccttcctgaagaccgtggcccagaactacagcagcgtgacccacctgcacagcatcggcaagagcgtgaagggcagaaacctgtgggtgctggtggtgggcagattccccaaggagcacagaatcggcatccccgagttcaagtacgtggccaacatgcacggcgacgagaccgtgggcagagagctgctgctgcacctgatcgactacctggtgaccagcgacggcaaggaccccgagatcaccaacctgatcaacagcaccagaatccacatcatgcccagcatgaaccccgacggcttcgaggccgtgaagaagcccgactgctactacagcatcggcagagagaactacaaccagtacgacctgaacagaaacttccccgacgccttcgagtacaacaacgtgagcagacagcccgagaccgtggccgtgatgaagtggctgaagaccgagaccttcgtgctgagcgccaacctgcacggcggcgccctggtggccagctaccccttcgacaacggcgtgcaggccaccggcgccctgtacagcagaagcctgacccccgacgacgacgtgttccagtacctggcccacacctacgccagcagaaaccccaacatgaagaagggcgacgagtgcaagaacaagatgaacttccccaacggcgtgaccaacggctacagctggtaccccctgcagggcggcatgcaggactacaactacatctgggcccagtgcttcgagatcaccctggagctgagctgctgcaagtaccccagagaggagaagctgcccagcttctggaacaacaacaaggccagcctgatcgagtacatcaagcaggtgcacctgggcgtgaagggccaggtgttcgaccagaacggcaaccccctgcccaacgtgatcgtggaggtgcaggacagaaagcacatctgcccctacagaaccaacaagtacggcgagtactacctgctgctgctgcccggcagctacatcatcaacgtgaccgtgcccggccacgacccccacatcaccaaggtgatcatccccgagaagagccagaacttcagcgccctgaagaaggacatcctgctgcccttccagggccagctggacagcatccccgtgagcaaccccagctgccccatgatccccctgtacagaaacctgcccgaccacagcgccgccaccaagcccagcctgttcctgttcctggtgagcctgctgcacatcttcttcaagtag

SEQ ID NO: 75461 - DNA, 1332 bp, synthetic construct; identical to SEQ ID NO: 75460
  misc_feature 1..1332: note = Description of Artificial Sequence: Synthetic coding sequence
  source 1..1332: mol_type = other DNA

SEQ ID NO: 75462 - DNA, 1332 bp, synthetic construct; identical to SEQ ID NO: 75460
  misc_feature 1..1332: note = Description of Artificial Sequence: Synthetic coding sequence
  source 1..1332: mol_type = other DNA

SEQ ID NO: 75463 - DNA, 411 bp, synthetic construct
  misc_feature 1..411: note = Description of Artificial Sequence: Synthetic coding sequence
  source 1..411: mol_type = other DNA
atggacttcccctgcctgtggctgggcctgctgctgcccctggtggccgccctggacttcaactaccacagacaggagggcatggaggccttcctgaagaccgtggcccagaactacagcagcgtgacccacctgcacagcatcggcaagagcgtgaagggcagaaacctgtgggtgctggtggtgggcagattccccaaggagcacagaatcggcatccccgagttcaagtacgtggccaacatgcacggcgacgagaccgtgggcagagagctgctgctgcacctgatcgactacctggtgaccagcgacggcaaggaccccgagatcaccaacctgatcaacagcaccagaatccacatcatgcccagcatgaaccccgacggcttcgaggccgtgaagaagccctag

SEQ ID NO: 75464 - DNA, 750 bp, synthetic construct
  misc_feature 1..750: note = Description of Artificial Sequence: Synthetic coding sequence
  source 1..750: mol_type = other DNA
atggacttcccctgcctgtggctgggcctgctgctgcccctggtggccgccctggacttcaactaccacagacaggagggcatggaggccttcctgaagaccgtggcccagaactacagcagcgtgacccacctgcacagcatcggcaagagcgtgaagggcagaaacctgtgggtgctggtggtgggcagattccccaaggagcacagaatcggcatccccgagttcaagtacgtggccaacatgcacggcgacgagaccgtgggcagagagctgctgctgcacctgatcgactacctggtgaccagcgacggcaaggaccccgagatcaccaacctgatcaacagcaccagaatccacatcatgcccagcatgaaccccgacggcttcgaggccgtgaagaagcccgactgctactacagcatcggcagagagaactacaaccagtacgacctgaacagaaacttccccgacgccttcgagtacaacaacgtgagcagacagcccgagaccgtggccgtgatgaagtggctgaagaccgagaccttcgtgctgagcgccaacctgcacggcggcgccctggtggccagctaccccttcgacaacggcgtgcaggccaccggcgccctgtacagcagaagcctgacccccgacgacgacgtgttccagtacctggcccacacctacgccagcagaaaccccaacatgaagaagggcgacgagtgcaagaacaagatgaacttcccctag

SEQ ID NO: 75465 - DNA, 1332 bp, synthetic construct; identical to SEQ ID NO: 75460
  misc_feature 1..1332: note = Description of Artificial Sequence: Synthetic coding sequence
  source 1..1332: mol_type = other DNA

SEQ ID NO: 75466 - DNA, 1377 bp, synthetic construct
  misc_feature 1..1377: note = Description of Artificial Sequence: Synthetic coding sequence
  source 1..1377: mol_type = other DNA
atgagcgacctgctgagcgtgttcctgcacctgctgctgctgttcaagctggtggcccccgtgaccttcagacaccacagatacgacgacctggtgagaaccctgtacaaggtgcagaacgagtgccccggcatcaccagagtgtacagcatcggcagaagcgtggagggcagacacctgtacgtgctggagttcagcgaccaccccggcatccacgagcccctggagcccgaggtgaagtacgtgggcaacatgcacggcaacgaggccctgggcagagagctgatgctgcagctgagcgagttcctgtgcgaggagttcagaaacagaaaccagagaatcgtgcagctgatccaggacaccagaatccacatcctgcccagcatgaaccccgacggctacgaggtggccgccgcccagggccccaacaagcccggctacctggtgggcagaaacaacgccaacggcgtggacctgaacagaaacttccccgacctgaacacctacatctactacaacgagaagtacggcggccccaaccaccacctgcccctgcccgacaactggaagagccaggtggagcccgagaccagagccgtgatcagatggatgcacagcttcaacttcgtgctgagcgccaacctgcacggcggcgccgtggtggccaactacccctacgacaagagcttcgagcacagagtgagaggcgtgagaagaaccgccagcacccccacccccgacgacaagctgttccagaagctggccaaggtgtacagctacgcccacggctggatgttccagggctggaactgcggcgactacttccccgacggcatcaccaacggcgccagctggtacagcctgagcaagggcatgcaggacttcaactacctgcacaccaactgcttcgagatcaccctggagctgagctgcgacaagttcccccccgaggaggagctgcagagagagtggctgggcaacagagaggccctgatccagttcctggagcaggtgcaccagggcatcaagggcatggtgctggacgagaactacaacaacctggccaacgccgtgatcagcgtgagcggcatcaaccacgacgtgaccagcggcgaccacggcgactacttcagactgctgctgcccggcatctacaccgtgagcgccaccgcccccggctacgaccccgagaccgtgaccgtgaccgtgggccccgccgagcccaccctggtgaacttccacctgaagagaagcatcccccaggtgagccccgtgagaagagcccccagcagaagacacggcgtgagagccaaggtgcagccccaggccagaaagaaggagatggagatgagacagctgcagagaggccccgcctag

SEQ ID NO: 75467 - DNA, 615 bp, synthetic construct
  misc_feature 1..615: note = Description of Artificial Sequence: Synthetic coding sequence
  source 1..615: mol_type = other DNA
atgcacagcttcaacttcgtgctgagcgccaacctgcacggcggcgccgtggtggccaactacccctacgacaagagcttcgagcacagagtgagaggcgtgagaagaaccgccagcacccccacccccgacgacaagctgttccagaagctggccaaggtgtacagctacgcccacggctggatgttccagggctggaactgcggcgactacttccccgacggcatcaccaacggcgccagctggtacagcctgagcaagggcatgcaggacttcaactacctgcacaccaactgcttcgagatcaccctggagctgagctgcgacaagttcccccccgaggaggagctgcagagagagtggctgggcaacagagaggccctgatccagttcctggagcaggtgcaccagggcatcaagggcatggtgctggacgagaactacaacaacctggccaacgccgtgatcagcgtgagcggcatcaaccacgacgtgaccagcggcgaccacggcgactacttcagactgctgctgcccggcatctacaccgtgagcgccaccgcccccggctacgaccccgagaccgtgaccgtgaccgtgggccccgccgagtag

SEQ ID NO: 75468 - DNA, 1638 bp, synthetic construct
  misc_feature 1..1638: note = Description of Artificial Sequence: Synthetic coding sequence
  source 1..1638: mol_type = other DNA
atgctgcccggcgcctggctgctgtggaccagcctgctgctgctggccagacccgcccagccctgccccatgggctgcgactgcttcgtgcaggaggtgttctgcagcgacgaggagctggccaccgtgcccctggacatccccccctacaccaagaacatcatcttcgtggagaccagcttcaccaccctggagaccagagccttcggcagcaaccccaacctgaccaaggtggtgttcctgaacacccagctgtgccagttcagacccgacgccttcggcggcctgcccagactggaggacctggaggtgaccggcagcagcttcctgaacctgagcaccaacatcttcagcaacctgaccagcctgggcaagctgaccctgaacttcaacatgctggaggccctgcccgagggcctgttccagcacctggccgccctggagagcctgcacctgcagggcaaccagctgcaggccctgcccagaagactgttccagcccctgacccacctgaagaccctgaacctggcccagaacctgctggcccagctgcccgaggagctgttccaccccctgaccagcctgcagaccctgaagctgagcaacaacgccctgagcggcctgccccagggcgtgttcggcaagctgggcagcctgcaggagctgttcctggacagcaacaacatcagcgagctgcccccccaggtgttcagccagctgttctgcctggagagactgtggctgcagagaaacgccatcacccacctgcccctgagcatcttcgccagcctgggcaacctgaccttcctgagcctgcagtggaacatgctgagagtgctgcccgccggcctgttcgcccacaccccctgcctggtgggcctgagcctgacccacaaccagctggagaccgtggccgagggcaccttcgcccacctgagcaacctgagaagcctgatgctgagctacaacgccatcacccacctgcccgccggcatcttcagagacctggaggagctggtgaagctgtacctgggcagcaacaacctgaccgccctgcaccccgccctgttccagaacctgagcaagctggagctgctgagcctgagcaagaaccagctgaccaccctgcccgagggcatcttcgacaccaactacaacctgttcaacctggccctgcacggcaacccctggcagtgcgactgccacctggcctacctgttcaactggctgcagcagtacaccgacagactgctgaacatccagacctactgcgccggccccgcctacctgaagggccaggtggtgcccgccctgaacgagaagcagctggtgtgccccgtgaccagagaccacctgggcttccaggtgacctggcccgacgagagcaaggccggcggcagctgggacctggccgtgcaggagagagccgccagaagccagtgcacctacagcaaccccgagggcaccgtggtgctggcctgcgaccaggcccagtgcagatggctgaacgtgcagctgagcccccagcagggcagcctgggcctgcagtacaacgccagccaggagtgggacctgagaagcagctgcggcagcctgagactgaccgtgagcatcgaggccagagccgccggcccctag

SEQ ID NO: 75469 - DNA, 1638 bp, synthetic construct; identical to SEQ ID NO: 75468
  misc_feature 1..1638: note = Description of Artificial Sequence: Synthetic coding sequence
  source 1..1638: mol_type = other DNA

SEQ ID NO: 75470 - DNA, 1431 bp, synthetic construct
  misc_feature 1..1431: note = Description of Artificial Sequence: Synthetic coding sequence
  source 1..1431: mol_type = other DNA
atggtgggcgccatgtggaaggtgatcgtgagcctggtgctgctgatgcccggcccctgcgacggcctgttcagaagcctgtacagaagcgtgagcatgccccccaagggcgacagcggccagcccctgttcctgaccccctacatcgaggccggcaagatccagaagggcagagagctgagcctggtgggccccttccccggcctgaacatgaagagctacgccggcttcctgaccgtgaacaagacctacaacagcaacctgttcttctggttcttccccgcccagatccagcccgaggacgcccccgtggtgctgtggctgcagggcggccccggcggcagcagcatgttcggcctgttcgtggagcacggcccctacgtggtgaccagcaacatgaccctgagagacagagacttcccctggaccaccaccctgagcatgctgtacatcgacaaccccgtgggcaccggcttcagcttcaccgacgacacccacggctacgccgtgaacgaggacgacgtggccagagacctgtacagcgccctgatccagttcttccagatcttccccgagtacaagaacaacgacttctacgtgaccggcgagagctacgccggcaagtacgtgcccgccatcgcccacctgatccacagcctgaaccccgtgagagaggtgaagatcaacctgaacggcatcgccatcggcgacggctacagcgaccccgagagcatcatcggcggctacgccgagttcctgtaccagatcggcctgctggacgagaagcagaagaagtacttccagaagcagtgccacgagtgcatcgagcacatcagaaagcagaactggttcgaggccttcgagatcctggacaagctgctggacggcgacctgaccagcgaccccagctacttccagaacgtgaccggctgcagcaactactacaacttcctgagatgcaccgagcccgaggaccagctgtactacgtgaagttcctgagcctgcccgaggtgagacaggccatccacgtgggcaaccagaccttcaacgacggcaccatcgtggagaagtacctgagagaggacaccgtgcagagcgtgaagccctggctgaccgagatcatgaacaactacaaggtgctgatctacaacggccagctggacatcatcgtggccgccgccctgaccgagagaagcctgatgggcatggactggaagggcagccaggagtacaagaaggccgagaagaaggtgtggaagatcttcaagagcgacagcgaggtggccggctacatcagacaggccggcgacttccaccaggtgatcatcagaggcggcggccacatcctgccctacgaccagcccctgagagccttcgacatgatcaacagattcatctacggcaagggctgggacccctacgtgggctag

SEQ ID NO: 75471 - DNA, 1431 bp, synthetic construct; identical to SEQ ID NO: 75470
  misc_feature 1..1431: note = Description of Artificial Sequence: Synthetic coding sequence
  source 1..1431: mol_type = other DNA

SEQ ID NO: 75472 - DNA, 1431 bp, synthetic construct; identical to SEQ ID NO: 75470
  misc_feature 1..1431: note = Description of Artificial Sequence: Synthetic coding sequence
  source 1..1431: mol_type = other DNA

SEQ ID NO: 75473 - DNA, 21 bp, synthetic construct
  misc_feature 1..21: note = Description of Artificial Sequence: Synthetic coding sequence
  source 1..21: mol_type = other DNA
atggtgggcgccatgtggtag

SEQ ID NO: 75474 - DNA, 159 bp, synthetic construct
  misc_feature 1..159: note = Description of Artificial Sequence: Synthetic coding sequence
  source 1..159: mol_type = other DNA
atggtgggcgccatgtggaaggtgatcgtgagcctggtgctgctgatgcccggcccctgcgacggcctgttcagaagcctgtacagaagcgtgagcatgccccccaagggcgacagcggccagcccctgttcctgaccccctacatcgaggccggctag

SEQ ID NO: 75475 - DNA, 132 bp, synthetic construct
  misc_feature 1..132: note = Description of Artificial Sequence: Synthetic coding sequence
  source 1..132: mol_type = other DNA
atggtgggcgccatgtggaaggtgatcgtgagcctggtgctgctgatgcccggcccctgcgacggcctgttcagaagcctgtacagaagcgtgagcatgccccccaagggcgacagcggccagcccctgtag

SEQ ID NO: 75476 - DNA, 699 bp, synthetic construct
  misc_feature 1..699: note = Description of Artificial Sequence: Synthetic coding sequence
  source 1..699: mol_type = other DNA
atgttcggcctgttcgtggagcacggcccctacgtggtgaccagcaacatgaccctgagagacagagacttcccctggaccaccaccctgagcatgctgtacatcgacaaccccgtgggcaccggcttcagcttcaccgacgacacccacggctacgccgtgaacgaggacgacgtggccagagacctgtacagcgccctgatccagttcttccagatcttccccgagtacaagaacaacgacttctacgtgaccggcgagagctacgccggcaagtacgtgcccgccatcgcccacctgatccacagcctgaaccccgtgagagaggtgaagatcaacctgaacggcatcgccatcggcgacggctacagcgaccccgagagcatcatcggcggctacgccgagttcctgtaccagatcggcctgctggacgagaagcagaagaagtacttccagaagcagtgccacgagtgcatcgagcacatcagaaagcagaactggttcgaggccttcgagatcctggacaagctgctggacggcgacctgaccagcgaccccagctacttccagaacgtgaccggctgcagcaactactacaacttcctgagatgcaccgagcccgaggaccagctgtactacgtgaagttcctgagcctgcccgaggtgagacaggcccccagaggcgagagcgacttctag

SEQ ID NO: 75477 - DNA, 1581 bp, synthetic construct
  misc_feature 1..1581: note = Description of Artificial Sequence: Synthetic coding sequence
  source 1..1581: mol_type = other DNA
atgggccacctgagcgcccccctgcacagagtgagagtgccctggcagggcctgctgctgaccgccagcctgctgaccttctggaacccccccaccaccgcccagctgaccaccgagagcatgcccttcaacgtggccgagggcaaggaggtgctgctgctggtgcacaacctgccccagcagctgttcggctacagctggtacaagggcgagagagtggacggcaacagacagatcgtgggctacgccatcggcacccagcaggccacccccggccccgccaacagcggcagagagaccatctaccccaacgccagcctgctgatccagaacgtgacccagaacgacaccggcttctacaccctgcaggtgatcaagagcgacctggtgaacgaggaggccaccggccagttccacgtgtaccccgagctgcccaagcccagcatcagcagcaacaacagcaaccccgtggaggacaaggacgccgtggccttcacctgcgagcccgagacccaggacaccacctacctgtggtggatcaacaaccagagcctgcccgtgagccccagactgcagctgagcaacggcaacagaaccctgaccctgctgagcgtgaccagaaacgacaccggcccctacgagtgcgagatccagaaccccgtgagcgccaacagaagcgaccccgtgaccctgaacgtgacctacggccccgacacccccaccatcagccccagcgacacctactacagacccggcgccaacctgagcctgagctgctacgccgccagcaacccccccgcccagtacagctggctgatcaacggcaccttccagcagagcacccaggagctgttcatccccaacatcaccgtgaacaacagcggcagctacacctgccacgccaacaacagcgtgaccggctgcaacagaaccaccgtgaagaccatcatcgtgaccgagctgagccccgtggtggccaagccccagatcaaggccagcaagaccaccgtgaccggcgacaaggacagcgtgaacctgacctgcagcaccaacgacaccggcatcagcatcagatggttcttcaagaaccagagcctgcccagcagcgagagaatgaagctgagccagggcaacaccaccctgagcatcaaccccgtgaagagagaggacgccggcacctactggtgcgaggtgttcaaccccatcagcaagaaccagagcgaccccatcatgctgaacgtgaactacaacgccctgccccaggagaacggcctgagccccggcgccatcgccggcatcgtgatcggcgtggtggccctggtggccctgatcgccgtggccctggcctgcttcctgcacttcggcaagaccggcagagccagcgaccagagagacctgaccgagcacaagcccagcgtgagcaaccacacccaggaccacagcaacgacccccccaacaagatgaacgaggtgacctacagcaccctgaacttcgaggcccagcagcccacccagcccaccagcgccagccccagcctgaccgccaccgagatcatctacagcgaggtgaagaagcagtag

SEQ ID NO: 75478 - DNA, 1080 bp, synthetic construct
  misc_feature 1..1080: note = Description of Artificial Sequence: Synthetic coding sequence
  source 1..1080: mol_type = other DNA
atgcccttcaacgtggccgagggcaaggaggtgctgctgctggtgcacaacctgccccagcagctgttcggctacagctggtacaagggcgagagagtggacggcaacagacagatcgtgggctacgccatcggcacccagcaggccacccccggccccgccaacagcggcagagagaccatctaccccaacgccagcctgctgatccagaacgtgacccagaacgacaccggcttctacaccctgcaggtgatcaagagcgacctggtgaacgaggaggccaccggccagttccacgtgtaccccgagctgcccaagcccagcatcagcagcaacaacagcaaccccgtggaggacaaggacgccgtggccttcacctgcgagcccgagacccaggacaccacctacctgtggtggatcaacaaccagagcctgcccgtgagccccagactgcagctgagcaacggcaacagaaccctgaccctgctgagcgtgaccagaaacgacaccggcccctacgagtgcgagatccagaaccccgtgagcgccaacagaagcgaccccgtgaccctgaacgtgacctacggccccgacacccccaccatcagccccagcgacacctactacagacccggcgccaacctgagcctgagctgctacgccgccagcaacccccccgcccagtacagctggctgatcaacggcaccttccagcagagcacccaggagctgttcatccccaacatcaccgtgaacaacagcggcagctacacctgccacgccaacaacagcgtgaccggctgcaacagaaccaccgtgaagaccatcatcgtgaccgagatggccttccaccacgtggccaaggccggcctgaagctgctgagcagcagcaacccccccgccagcaccagccagagcgccaagatcaccgacaacgccctgccccaggagaacggcctgagccccggcgccatcgccggcatcgtgatcggcgtggtggccctggtggccctgatcgccgtggccctggcctgcttcctgcacttcggcaagaccggcagcagcggccccctgcagtag

SEQ ID NO: 75479 - DNA, 1056 bp, synthetic construct
  misc_feature 1..1056: note = Description of Artificial Sequence: Synthetic coding sequence
  source 1..1056: mol_type = other DNA
atgggccacctgagcgcccccctgcacagagtgagagtgccctggcagggcctgctgctgaccgccagcctgctgaccttctggaacccccccaccaccgcccagctgaccaccgagagcatgcccttcaacgtggccgagggcaaggaggtgctgctgctggtgcacaacctgccccagcagctgttcggctacagctggtacaagggcgagagagtggacggcaacagacagatcgtgggctacgccatcggcacccagcaggccacccccggccccgccaacagcggcagagagaccatctaccccaacgccagcctgctgatccagaacgtgacccagaacgacaccggcttctacaccctgcaggtgatcaagagcgacctggtgaacgaggaggccaccggccagttccacgtgtaccccgagctgcccaagcccagcatcagcagcaacaacagcaaccccgtggaggacaaggacgccgtggccttcacctgcgagcccgagacccaggacaccacctacctgtggtggatcaacaaccagagcctgcccgtgagccccagactgcagctgagcaacggcaacagaaccctgaccctgctgagcgtgaccagaaacgacaccggcccctacgagtgcgagatccagaaccccgtgagcgccaacagaagcgaccccgtgaccctgaacgtgacctacggccccgacacccccaccatcagccccagcgacacctactacagacccggcgccaacctgagcctgagctgctacgccgccagcaacccccccgcccagtacagctggctgatcaacggcaccttccagcagagcacccaggagctgttcatccccaacatcaccgtgaacaacagcggcagctacacctgccacgccaacaacagcgtgaccggctgcaacagaaccaccgtgaagaccatcatcgtgaccgagagccccgtgctgggcgaggacgaggccgtgcccggccagcaccacccccagcacaagccctgccaggagggcggctgctgggacgtgctggtgtag

SEQ ID NO: 75480 - DNA, 759 bp, synthetic construct
  misc_feature 1..759: note = Description of Artificial Sequence: Synthetic coding sequence
  source 1..759: mol_type = other DNA
atgggccacctgagcgcccccctgcacagagtgagagtgccctggcagggcctgctgctgaccgccagcctgctgaccttctggaacccccccaccaccgcccagctgaccaccgagagcatgcccttcaacgtggccgagggcaaggaggtgctgctgctggtgcacaacctgccccagcagctgttcggctacagctggtacaagggcgagagagtggacggcaacagacagatcgtgggctacgccatcggcacccagcaggccacccccggccccgccaacagcggcagagagaccatctaccccaacgccagcctgctgatccagaacgtgacccagaacgacaccggcttctacaccctgcaggtgatcaagagcgacctggtgaacgaggaggccaccggccagttccacgtgtaccacaacgccctgccccaggagaacggcctgagccccggcgccatcgccggcatcgtgatcggcgtggtggccctggtggccctgatcgccgtggccctggcctgcttcctgcacttcggcaagaccggcagagccagcgaccagagagacctgaccgagcacaagcccagcgtgagcaaccacacccaggaccacagcaacgacccccccaacaagatgaacgaggtgacctacagcaccctgaacttcgaggcccagcagcccacccagcccaccagcgccagccccagcctgaccgccaccgagatcatctacagcgaggtgaagaagcagtag

SEQ ID NO: 75481 - DNA, 1293 bp, synthetic construct
  misc_feature 1..1293: note = Description of Artificial Sequence: Synthetic coding sequence
  source 1..1293: mol_type = other DNA
atgggccacctgagcgcccccctgcacagagtgagagtgccctggcagggcctgctgctgaccgccagcctgctgaccttctggaacccccccaccaccgcccagctgaccaccgagagcatgcccttcaacgtggccgagggcaaggaggtgctgctgctggtgcacaacctgccccagcagctgttcggctacagctggtacaagggcgagagagtggacggcaacagacagatcgtgggctacgccatcggcacccagcaggccacccccggccccgccaacagcggcagagagaccatctaccccaacgccagcctgctgatccagaacgtgacccagaacgacaccggcttctacaccctgcaggtgatcaagagcgacctggtgaacgaggaggccaccggccagttccacgtgtaccccgagctgcccaagcccagcatcagcagcaacaacagcaaccccgtggaggacaaggacgccgtggccttcacctgcgagcccgagacccaggacaccacctacctgtggtggatcaacaaccagagcctgcccgtgagccccagactgcagctgagcaacggcaacagaaccctgaccctgctgagcgtgaccagaaacgacaccggcccctacgagtgcgagatccagaaccccgtgagcgccaacagaagcgaccccgtgaccctgaacgtgacctacggccccgacacccccaccatcagccccagcgacacctactacagacccggcgccaacctgagcctgagctgctacgccgccagcaacccccccgcccagtacagctggctgatcaacggcaccttccagcagagcacccaggagctgttcatccccaacatcaccgtgaacaacagcggcagctacacctgccacgccaacaacagcgtgaccggctgcaacagaaccaccgtgaagaccatcatcgtgaccgacaacgccctgccccaggagaacggcctgagccccggcgccatcgccggcatcgtgatcggcgtggtggccctggtggccctgatcgccgtggccctggcctgcttcctgcacttcggcaagaccggcagagccagcgaccagagagacctgaccgagcacaagcccagcgtgagcaaccacacccaggaccacagcaacgacccccccaacaagatgaacgaggtgacctacagcaccctgaacttcgaggcccagcagcccacccagcccaccagcgccagccccagcctgaccgccaccgagatcatctacagcgaggtgaagaagcagtag

SEQ ID NO: 75482 - DNA, 1386 bp, synthetic construct
  misc_feature 1..1386: note = Description of Artificial Sequence: Synthetic coding sequence
  source 1..1386: mol_type = other DNA
atgggccacctgagcgcccccctgcacagagtgagagtgccctggcagggcctgctgctgaccgccagcctgctgaccttctggaacccccccaccaccgcccagctgaccaccgagagcatgcccttcaacgtggccgagggcaaggaggtgctgctgctggtgcacaacctgccccagcagctgttcggctacagctggtacaagggcgagagagtggacggcaacagacagatcgtgggctacgccatcggcacccagcaggccacccccggccccgccaacagcggcagagagaccatctaccccaacgccagcctgctgatccagaacgtgacccagaacgacaccggcttctacaccctgcaggtgatcaagagcgacctggtgaacgaggaggccaccggccagttccacgtgtaccccgagctgcccaagcccagcatcagcagcaacaacagcaaccccgtggaggacaaggacgccgtggccttcacctgcgagcccgagacccaggacaccacctacctgtggtggatcaacaaccagagcctgcccgtgagccccagactgcagctgagcaacggcaacagaaccctgaccctgctgagcgtgaccagaaacgacaccggcccctacgagtgcgagatccagaaccccgtgagcgccaacagaagcgaccccgtgaccctgaacgtgacctacggccccgacacccccaccatcagccccagcgacacctactacagacccggcgccaacctgagcctgagctgctacgccgccagcaacccccccgcccagtacagctggctgatcaacggcaccttccagcagagcacccaggagctgttcatccccaacatcaccgtgaacaacagcggcagctacacctgccacgccaacaacagcgtgaccggctgcaacagaaccaccgtgaagaccatcatcgtgaccgagagacagaacctgaccatgctgcccagactggacagcaacagctgggcccaggccatcctgcccagcgtgagccagagcgccgagatcaccgacaacgccctgccccaggagaacggcctgagccccggcgccatcgccggcatcgtgatcggcgtggtggccctggtggccctgatcgccgtggccctggcctgcttcctgcacttcggcaagaccggcagagccagcgaccagagagacctgaccgagcacaagcccagcgtgagcaaccacacccaggaccacagcaacgacccccccaacaagatgaacgaggtgacctacagcaccctgaacttcgaggcccagcagcccacccagcccaccagcgccagccccagcctgaccgccaccgagatcatctacagcgaggtgaagaagcagtag

SEQ ID NO: 75483 - DNA, 1254 bp, synthetic construct
  misc_feature 1..1254: note = Description of Artificial Sequence: Synthetic coding sequence
  source 1..1254: mol_type = other DNA
atgggccacctgagcgcccccctgcacagagtgagagtgccctggcagggcctgctgctgaccgccagcctgctgaccttctggaacccccccaccaccgcccagctgaccaccgagagcatgcccttcaacgtggccgagggcaaggaggtgctgctgctggtgcacaacctgccccagcagctgttcggctacagctggtacaagggcgagagagtggacggcaacagacagatcgtgggctacgccatcggcacccagcaggccacccccggccccgccaacagcggcagagagaccatctaccccaacgccagcctgctgatccagaacgtgacccagaacgacaccggcttctacaccctgcaggtgatcaagagcgacctggtgaacgaggaggccaccggccagttccacgtgtaccccgagctgcccaagcccagcatcagcagcaacaacagcaaccccgtggaggacaaggacgccgtggccttcacctgcgagcccgagacccaggacaccacctacctgtggtggatcaacaaccagagcctgcccgtgagccccagactgcagctgagcaacggcaacagaaccctgaccctgctgagcgtgaccagaaacgacaccggcccctacgagtgcgagatccagaaccccgtgagcgccaacagaagcgaccccgtgaccctgaacgtgacctacggccccgacacccccaccatcagccccagcgacacctactacagacccggcgccaacctgagcctgagctgctacgccgccagcaacccccccgcccagtacagctggctgatcaacggcaccttccagcagagcacccaggagctgttcatccccaacatcaccgtgaacaacagcggcagctacacctgccacgccaacaacagcgtgaccggctgcaacagaaccaccgtgaagaccatcatcgtgaccgagctgagccccgtggtggccaagccccagatcaaggccagcaagaccaccgtgaccggcgacaaggacagcgtgaacctgacctgcagcaccaacgacaccggcatcagcatcagatggttcttcaagaaccagagcctgcccagcagcgagagaatgaagctgagccagggcaacaccaccctgagcatcaaccccgtgaagagagaggacgccggcacctactggtgcgaggtgttcaaccccatcagcaagaaccagagcgaccccatcatgctgaacgtgaactgcaagtag

SEQ ID NO: 75484 - DNA, 1437 bp, synthetic construct
  misc_feature 1..1437: note = Description of Artificial Sequence: Synthetic coding sequence
  source 1..1437: mol_type = other DNA
atgcccttcaacgtggccgagggcaaggaggtgctgctgctggtgcacaacctgccccagcagctgttcggctacagctggtacaagggcgagagagtggacggcaacagacagatcgtgggctacgccatcggcacccagcaggccacccccggccccgccaacagcggcagagagaccatctaccccaacgccagcctgctgatccagaacgtgacccagaacgacaccggcttctacaccctgcaggtgatcaagagcgacctggtgaacgaggaggccaccggccagttccacgtgtaccccgagctgcccaagcccagcatcagcagcaacaacagcaaccccgtggaggacaaggacgccgtggccttcacctgcgagcccgagacccaggacaccacctacctgtggtggatcaacaaccagagcctgcccgtgagccccagactgcagctgagcaacggcaacagaaccctgaccctgctgagcgtgaccagaaacgacaccggcccctacgagtgcgagatccagaaccccgtgagcgccaacagaagcgaccccgtgaccctgaacgtgacctacggccccgacacccccaccatcagccccagcgacacctactacagacccggcgccaacctgagcctgagctgctacgccgccagcaacccccccgcccagtacagctggctgatcaacggcaccttccagcagagcacccaggagctgttcatccccaacatcaccgtgaacaacagcggcagctacacctgccacgccaacaacagcgtgaccggctgcaacagaaccaccgtgaagaccatcatcgtgaccgagctgagccccgtggtggccaagccccagatcaaggccagcaagaccaccgtgaccggcgacaaggacagcgtgaacctgacctgcagcaccaacgacaccggcatcagcatcagatggttcttcaagaaccagagcctgcccagcagcgagagaatgaagctgagccagggcaacaccaccctgagcatcaaccccgtgaagagagaggacgccggcacctactggtgcgaggtgttcaaccccatcagcaagaaccagagcgaccccatcatgctgaacgagatggccttccaccacgtggccaaggccggcctgaagctgctgagcagcagcaacccccccgccagcaccagccagagcgccaagatcaccgagagacagaacctgaccatgctgcccagactggacagcaacagctgggcccaggccatcctgcccagcgtgagccagagcgccgagatcaccgacaacgccctgccccaggagaacggcctgagccccggcgccatcgccggcatcgtgatcggcgtggtggccctggtggccctgatcgccgtggccctggcctgcttcctgcacttcggcaagaccggctag

SEQ ID NO: 75485 - DNA, 966 bp, synthetic construct
  misc_feature 1..966: note = Description of Artificial Sequence: Synthetic coding sequence
  source 1..966: mol_type = other DNA
atgggccacctgagcgcccccctgcacagagtgagagtgccctggcagggcctgctgctgaccgccagcctgctgaccttctggaacccccccaccaccgcccagctgaccaccgagagcatgcccttcaacgtggccgagggcaaggaggtgctgctgctggtgcacaacctgccccagcagctgttcggctacagctggtacaagggcgagagagtggacggcaacagacagatcgtgggctacgccatcggcacccagcaggccacccccggccccgccaacagcggcagagagaccatctaccccaacgccagcctgctgatccagaacgtgacccagaacgacaccggcttctacaccctgcaggtgatcaagagcgacctggtgaacgaggaggccaccggccagttccacgtgtaccccgagctgcccaagcccagcatcagcagcaacaacagcaaccccgtggaggacaaggacgccgtggccttcacctgcgagcccgagacccaggacaccacctacctgtggtggatcaacaaccagagcctgcccgtgagccccagactgcagctgagcaacggcaacagaaccctgaccctgctgagcgtgaccagaaacgacaccggcccctacgagtgcgagatccagaaccccgtgagcgccaacagaagcgaccccgtgaccctgaacgtgacctacggccccgacacccccaccatcagccccagcgacacctactacagacccggcgccaacctgagcctgagctgctacgccgccagcaacccccccgcccagtacagctggctgatcaacggcaccttccagcagagcacccaggagctgttcatccccaacatcaccgtgaacaacagcggcagctacacctgccacgccaacaacagcgtgaccggctgcaacagaaccaccgtgaagaccatcatcgtgaccggcaagtag

SEQ ID NO: 75486 - DNA, 1458 bp, synthetic construct
  misc_feature 1..1458: note = Description of Artificial Sequence: Synthetic coding sequence
  source 1..1458: mol_type = other DNA
agaggcgacagagccgccgtgctggaggccttcctggagcccaagctgagcagcaccggcgaggacagagccagcagaagacaccacggcgcccccctgagccccaccagccagagcgcctgcaccctgggcctgctgctgaccgccagcctgctgaccttctggaacccccccaccaccgcccagctgaccaccgagagcatgcccttcaacgtggccgagggcaaggaggtgctgctgctggtgcacaacctgccccagcagctgttcggctacagctggtacaagggcgagagagtggacggcaacagacagatcgtgggctacgccatcggcacccagcaggccacccccggccccgccaacagcggcagagagaccatctaccccaacgccagcctgctgatccagaacgtgacccagaacgacaccggcttctacaccctgcaggtgatcaagagcgacctggtgaacgaggaggccaccggccagttccacgtgtaccccgagctgcccaagcccagcatcagcagcaacaacagcaaccccgtggaggacaaggacgccgtggccttcacctgcgagcccgagacccaggacaccacctacctgtggtggatcaacaaccagagcctgcccgtgagccccagactgcagctgagcaacggcaacagaaccctgaccctgctgagcgtgaccagaaacgacaccggcccctacgagtgcgagatccagaaccccgtgagcgccaacagaagcgaccccgtgaccctgaacgtgacctacggccccgacacccccaccatcagccccagcgacacctactacagacccggcgccaacctgagcctgagctgctacgccgccagcaacccccccgcccagtacagctggctgatcaacggcaccttccagcagagcacccaggagctgttcatccccaacatcaccgtgaacaacagcggcagctacacctgccacgccaacaacagcgtgaccggctgcaacagaaccaccgtgaagaccatcatcgtgaccgagctgagccccgtggtggccaagccccagatcaaggccagcaagaccaccgtgaccggcgacaaggacagcgtgaacctgacctgcagcaccaacgacaccggcatcagcatcagatggttcttcaagaaccagagcctgcccagcagcgagagaatgaagctgagccagggcaacaccaccctgagcatcaaccccgtgaagagagaggacgccggcacctactggtgcgaggtgttcaaccccatcagcaagaaccagagcgaccccatcatgctgaacgtgaactacaacgccctgccccaggagaacggcctgagccccggcgccatcgccggcatcgtgatcggcgtggtggccctggtggccctgatcgccgtggccctggcctgcttcctgcacttcggcaagaccggctag

SEQ ID NO: 75487 - DNA, 1395 bp, synthetic construct
  misc_feature 1..1395: note = Description of Artificial Sequence: Synthetic coding sequence
  source 1..1395: mol_type = other DNA
atgggccacctgagcgcccccctgcacagagtgagagtgccctggcagggcctgctgctgaccgccagcctgctgaccttctggaacccccccaccaccgcccagctgaccaccgagagcatgcccttcaacgtggccgagggcaaggaggtgctgctgctggtgcacaacctgccccagcagctgttcggctacagctggtacaagggcgagagagtggacggcaacagacagatcgtgggctacgccatcggcacccagcaggccacccccggccccgccaacagcggcagagagaccatctaccccaacgccagcctgctgatccagaacgtgacccagaacgacaccggcttctacaccctgcaggtgatcaagagcgacctggtgaacgaggaggccaccggccagttccacgtgtaccccgagctgcccaagcccagcatcagcagcaacaacagcaaccccgtggaggacaaggacgccgtggccttcacctgcgagcccgagacccaggacaccacctacctgtggtggatcaacaaccagagcctgcccgtgagccccagactgcagctgagcaacggcaacagaaccctgaccctgctgagcgtgaccagaaacgacaccggcccctacgagtgcgagatccagaaccccgtgagcgccaacagaagcgaccccgtgaccctgaacgtgacctacggccccgacacccccaccatcagccccagcgacacctactacagacccggcgccaacctgagcctgagctgctacgccgccagcaacccccccgcccagtacagctggctgatcaacggcaccttccagcagagcacccaggagctgttcatccccaacatcaccgtgaacaacagcggcagctacacctgccacgccaacaacagcgtgaccggctgcaacagaaccaccgtgaagaccatcatcgtgaccgagctgagccccgtggtggccaagccccagatcaaggccagcaagaccaccgtgaccggcgacaaggacagcgtgaacctgacctgcagcaccaacgacaccggcatcagcatcagatggttcttcaagaaccagagcctgcccagcagcgagagaatgaagctgagccagggcaacaccaccctgagcatcaaccccgtgaagagagaggacgccggcacctactggtgcgaggtgttcaaccccatcagcaagaaccagagcgaccccatcatgctgaacgtgaactacaacgccctgccccaggagaacggcctgagccccggcgccatcgccggcatcgtgatcggcgtggtggccctggtggccctgatcgccgtggccctggcctgcttcctgcacttcggcaagaccggcagcagcggccccctgcagtag

SEQ ID NO: 75488 - DNA, 1107 bp, synthetic construct
  misc_feature 1..1107: note = Description of Artificial Sequence: Synthetic coding sequence
  source 1..1107: mol_type = other DNA
atgggccacctgagcgcccccctgcacagagtgagagtgccctggcagggcctgctgctgaccgccagcctgctgaccttctggaacccccccaccaccgcccagctgaccaccgagagcatgcccttcaacgtggccgagggcaaggaggtgctgctgctggtgcacaacctgccccagcagctgttcggctacagctggtacaagggcgagagagtggacggcaacagacagatcgtgggctacgccatcggcacccagcaggccacccccggccccgccaacagcggcagagagaccatctaccccaacgccagcctgctgatccagaacgtgacccagaacgacaccggcttctacaccctgcaggtgatcaagagcgacctggtgaacgaggaggccaccggccagttccacgtgtaccccgagctgcccaagcccagcatcagcagcaacaacagcaaccccgtggaggacaaggacgccgtggccttcacctgcgagcccgagacccaggacaccacctacctgtggtggatcaacaaccagagcctgcccgtgagccccagactgcagctgagcaacggcaacagaaccctgaccctgctgagcgtgaccagaaacgacaccggcccctacgagtgcgagatccagaaccccgtgagcgccaacagaagcgaccccgtgaccctgaacgtgacctacggccccgacacccccaccatcagccccagcgacacctactacagacccggcgccaacctgagcctgagctgctacgccgccagcaacccccccgcccagtacagctggctgatcaacggcaccttccagcagagcacccaggagctgttcatccccaacatcaccgtgaacaacagcggcagctacacctgccacgccaacaacagcgtgaccggctgcaacagaaccaccgtgaagaccatcatcgtgaccgacaacgccctgccccaggagaacggcctgagccccggcgccatcgccggcatcgtgatcggcgtggtggccctggtggccctgatcgccgtggccctggcctgcttcctgcacttcggcaagaccggcagcagcggccccctgcagtag

SEQ ID NO: 75489 - DNA, 906 bp, synthetic construct
  misc_feature 1..906: note = Description of Artificial Sequence: Synthetic coding sequence
  source 1..906: mol_type = other DNA
atgctggccctgagagtggccagaggcagctggggcgccctgagaggcgccgcctgggcccccggcaccagacccagcaagagaagagcctgctgggccctgctgccccccgtgccctgctgcctgggctgcctggccgagagatggagactgagacccgccgccctgggcctgagactgcccggcatcggccagagaaaccactgcagcggcgccggcaaggccgcccccagacccgccgccggcgccggcgccgccgccgaggcccccggcggccagtggggccccgccagcacccccagcctgtacgagaacccctggaccatccccaacatgctgagcatgaccagaatcggcctggcccccgtgctgggctacctgatcatcgaggaggacttcaacatcgccctgggcgtgttcgccctggccggcctgaccgacctgctggacggcttcatcgccagaaactgggccaaccagagaagcgccctgggcagcgccctggaccccctggccgacaagatcctgatcagcatcctgtacgtgagcctgacctacgccgacctgatccccgtgcccctgacctacatgatcatcagcagagacgtgatgctgatcgccgccgtgttctacgtgagatacagaaccctgcccacccccagaaccctggccaagtacttcaacccctgctacgccaccgccagactgaagcccaccttcatcagcaaggtgaacaccgccgtgcagctgatcctggtggccgccagcctggccgcccccgtgttcaactacgccgacagcatctacctgcagatcctgtggtgcttcaccgccttcaccaccgccgccagcgcctacagctactaccactacggcagaaagaccgtgcaggtgatcaaggactag

SEQ ID NO: 75490 - DNA, 609 bp, synthetic construct
  misc_feature 1..609: note = Description of Artificial Sequence: Synthetic coding sequence
  source 1..609: mol_type = other DNA
atgccccagtacgagaacccctggaccatccccaacatgctgagcatgaccagaatcggcctggcccccgtgctgggctacctgatcatcgaggaggacttcaacatcgccctgggcgtgttcgccctggccggcctgaccgacctgctggacggcttcatcgccagaaactgggccaaccagagaagcgccctgggcagcgccctggaccccctggccgacaagatcctgatcagcatcctgtacgtgagcctgacctacgccgacctgatccccgtgcccctgacctacatgatcatcagcagagacgtgatgctgatcgccgccgtgttctacgtgagatacagaaccctgcccacccccagaaccctggccaagtacttcaacccctgctacgccaccgccagactgaagcccaccttcatcagcaaggtgaacaccgccgtgcagctgatcctggtggccgccagcctggccgcccccgtgttcaactacgccgacagcatctacctgcagatcctgtggtgcttcaccgccttcaccaccgccgccagcgcctacagctactaccactacggcagaaagaccgtgcaggtgatcaaggactag

SEQ ID NO: 75491 - DNA, 618 bp, synthetic construct
  misc_feature 1..618: note = Description of Artificial Sequence: Synthetic coding sequence
  source 1..618: mol_type = other DNA
atgctggccctgagagtggccagaggcagctggggcgccctgagaggcgccgcctgggcccccggcaccagacccagcaagagaagagcctgctgggccctgctgccccccgtgccctgctgcctgggctgcctggccgagagatggagactgagacccgccgccctgggcctgagactgcccggcatcggccagagaaaccactgcagcggcgccggcaaggccgcccccagacccgccgccggcgccggcgccgccgccgaggcccccggcggccagtggggccccgccagcacccccagcctgtacgagaacccctggaccatccccaacatgctgagcatgaccagaatcggcctggcccccgtgctgggctacctgatcatcgaggaggacttcaacatcgccctgggcgtgttcgccctggccggcctgaccgacctgctggacggcttcatcgccagaaactgggccaaccagagaagcgccctgggcagcgccctggaccccctggccgacaagatcctgatcagcatcctgtacgtgagcctgacctacgccgacctgatccccgccaacacctgccaggtgttccagagcctgctgtgccactgctag

SEQ ID NO: 75492 - DNA, 12210 bp, synthetic construct
  misc_feature 1..12210: note = Description of Artificial Sequence: Synthetic coding sequence
  source 1..12210: mol_type = other DNA
atggccagcagagacagcaaccacgccggcgagagcttcctgggcagcgacggcgacgaggaggccaccagagagctggagaccgaggaggagagcgagggcgaggaggacgagaccgccgccgagagcgaggaggagcccgacagcagactgagcgaccaggacgaggagggcaagatcaagcaggagtacatcatcagcgaccccagcttcagcatggtgaccgtgcagagagaggacagcggcatcacctgggagaccaacagcagcagaagcagcaccccctgggccagcgaggagagccagaccagcggcgtgtgcagcagagagggcagcaccgtgaacagcccccccggcaacgtgagcttcatcgtggacgaggtgaagaaggtgagaaagagaacccacaagagcaagcacggcagccccagcctgagaagaaagggcaacagaaagagaaacagcttcgagagccaggacgtgcccaccaacaagaagggcagccccctgaccagcgccagccaggtgctgaccaccgagaaggagaagagctacaccggcatctacgacaaggccagaaagaagaagaccaccagcaacaccccccccatcaccggcgccatctacaaggagcacaagcccctggtgctgagacccgtgtacatcggcaccgtgcagtacaagatcaagatgttcaacagcgtgaaggaggagctgatccccctgcagttctacggcaccctgcccaagggctacgtgatcaaggagatccactacagaaagggcaaggacgccagcatcagcctggagcccgacctggacaacagcggcagcaacaccgtgagcaagaccagaaagctggtggcccagagcatcgaggacaaggtgaaggaggtgttccccccctggagaggcgccctgagcaagggcagcgagagcctgaccctgatgttcagccacgaggaccagaagaagatctacgccgacagccccctgaacgccaccagcgccctggagcacaccgtgcccagctacagcagcagcggcagagccgagcagggcatccagctgagacacagccagagcgtgccccagcagcccgaggacgaggccaagccccacgaggtggagccccccagcgtgacccccgacacccccgccaccatgttcctgagaaccaccaaggaggagtgcgagctggccagccccggcaccgccgccagcgagaacgacagcagcgtgagccccagcttcgccaacgaggtgaagaaggaggacgtgtacagcgcccaccacagcatcagcctggaggccgccagccccggcctggccgccagcacccaggacggcctggaccccgaccaggagcagcccgacctgaccagcatcgagagagccgagcccgtgagcgccaagctgacccccacccaccccagcgtgaagggcgagaaggaggagaacatgctggagcccagcatcagcctgagcgagcccctgatgctggaggagcccgagaaggaggagatcgagaccagcctgcccatcgccatcacccccgagcccgaggacagcaacctggtggaggaggagatcgtggagctggactaccccgagagccccctggtgagcgagaagcccttccccccccacatgagccccgaggtggagcacaaggaggaggagctgatcctgcccctgctggccgccagcagccccgagcacgtggccctgagcgaggaggagagagaggagatcgccagcgtgagcaccggcagcgccttcgtgagcgagtacagcgtgccccaggacctgaaccacgagctgcaggagcaggagggcgagcccgtgccccccagcaacgtggaggccatcgccgagcacgccgtgctgagcgaggaggagaacgaggagttcgaggcctacagccccgccgccgcccccaccagcgagagcagcctgagccccagcaccaccgagaagaccagcgagaaccagagccccctgttcagcaccgtgacccccgagtacatggtgctgagcggcgacgaggccagcgagagcggctgctacacccccgacagcaccagcgccagcgagtacagcgtgcccagcctggccaccaaggagagcctgaagaagaccatcgacagaaagagccccctgatcctgaagggcgtgagcgagtacatgatccccagcgaggagaaggaggacaccggcagcttcacccccgccgtggcccccgccagcgagcccagcctgagccccagcaccaccgagaagaccagcgagtgccagagccccctgcccagcaccgccaccagcgagcacgtggtgcccagcgagggcgaggacctgggcagcgagagattcacccccgacagcaagctgatcagcaagtacgccgcccccctgaacgccacccaggagagccagaagaagatcatcaacgaggccagccagttcaagcccaagggcatcagcgagcacaccgtgctgagcgtggacggcaaggaggtgatcggccccagcagccccgacctggtggtggccagcgagcacagcttccccccccacaccaccgagatgaccagcgagtgccaggccccccccctgagcgccacccccagcgagtacgtggtgctgagcgacgaggaggccgtggagctggagagatacacccccagcagcaccagcgccagcgagttcagcgtgcccccctacgccacccccgaggcccaggaggaggagatcgtgcacagaagcctgaacctgaagggcgccagcagccccatgaacctgagcgaggaggaccaggaggacatcggccccttcagccccgacagcgccttcgtgagcgagttcagcttccccccctacgccacccaggaggccgagaagagagagttcgagtgcgacagccccatctgcctgaccagccccagcgagcacaccatcctgagcgacgaggacaccgaggaggccgagctgttcagccccgacagcgccagccaggtgagcatcccccccttcagaatcagcgagaccgagaagaacgagctggagcccgacagcctgctgaccgccgtgagcgccagcggctacagctgcttcagcgaggccgacgaggaggacatcggcagcaccgccgccacccccgtgagcgagcagttcagcagcagccagaagcagaaggccgagaccttccccctgatgagccccctggaggacctgagcctgccccccagcaccgacaagagcgagaaggccgagatcaagcccgagatccccaccaccagcaccagcgtgagcgagtacctgatcctggcccagaagcagaagacccaggcctacctggagcccgagagcgaggacctgatccccagccacctgaccagcgaggtggagaagggcgagagagaggccagcagcagcgtggccgccatccccgccgccctgcccgcccagagcagcatcgtgaaggaggagaccaagcccgccagcccccacagcgtgctgcccgacagcgtgcccgccatcaagaaggagcaggagcccaccgccgccctgaccctgaaggccgccgacgagcagatggccctgagcaaggtgagaaaggaggagatcgtgcccgacagccaggaggccaccgcccacgtgagccaggaccagaagatggagccccagccccccaacgtgcccgagagcgagatgaagtacagcgtgctgcccgacatggtggacgagcccaagaagggcgtgaagcccaagctggtgctgaacgtgaccagcgagctggagcagagaaagctgagcaagaacgagcccgaggtgatcaagccctacagccccctgaaggagaccagcctgagcggccccgaggccctgagcgccgtgaagatggagatgaagcacgacagcaagatcaccaccacccccatcgtgctgcacagcgccagcagcggcgtggagaagcaggtggagcacggcccccccgccctggccttcagcgccctgagcgaggagatcaagaaggagatcgagcccagcagcagcaccaccaccgccagcgtgaccaagctggacagcaacctgaccagagccgtgaaggaggagatccccaccgacagcagcctgatcacccccgtggacagacccgtgctgaccaaggtgggcaagggcgagctgggcagcggcctgccccccctggtgaccagcgccgacgagcacagcgtgctggccgaggaggacaaggtggccatcaagggcgccagccccatcgagaccagcagcaagcacctggcctggagcgaggccgagaaggagatcaagttcgacagcctgcccagcgtgagcagcatcgccgagcacagcgtgctgagcgaggtggaggccaaggaggtgaaggccggcctgcccgtgatcaagaccagcagcagccagcacagcgacaagagcgaggaggccagagtggaggacaagcaggacctgctgttcagcaccgtgtgcgacagcgagagactggtgagcagccagaagaagagcctgatgagcaccagcgaggtgctggagcccgagcacgagctgcccctgagcctgtggggcgagatcaagaagaaggagaccgagctgcccagcagccagaacgtgagccccgccagcaagcacatcatccccaagggcaaggacgaggagaccgccagcagcagccccgagctggagaacctggccagcggcctggcccccaccctgctgctgctgagcgacgacaagaacaagcccgccgtggaggtgagcagcaccgcccagggcgacttccccagcgagaagcaggacgtggccctggccgagctgagcctggagcccgagaagaaggacaagccccaccagcccctggagctgcccaacgccggcagcgagttcagcagcgacctgggcagacagagcggcagcatcggcaccaagcaggccaagagccccatcaccgagaccgaggacagcgtgctggagaagggccccgccgagctgagaagcagagagggcaaggaggagaacagagagctgtgcgccagcagcaccatgcccgccatcagcgagctgagcagcctgctgagagaggagagccagaacgaggagatcaagcccttcagccccaagatcatcagcctggagagcaaggagccccccgccagcgtggccgagggcggcaaccccgaggagttccagcccttcaccttcagcctgaagggcctgagcgaggaggtgagccaccccgccgacttcaagaagggcggcaaccaggagatcggccccctgccccccaccggcaacctgaaggcccaggtgatgggcgacatcctggacaagctgagcgaggagaccggccaccccaacagcagccaggtgctgcagagcatcaccgagcccagcaagatcgcccccagcgacctgctggtggagcagaagaagaccgagaaggccctgcacagcgaccagaccgtgaagctgcccgacgtgagcaccagcagcgaggacaagcaggacctgggcatcaagcagttcagcctgatgagagagaacctgcccctggagcagagcaagagcttcatgaccaccaagcccgccgacgtgaaggagaccaagatggaggagttcttcatcagccccaaggacgagaactggatgctgggcaagcccgagaacgtggccagccagcacgagcagagaatcgccggcagcgtgcagctggacagcagcagcagcaacgagctgagacccggccagctgaaggccgccgtgagcagcaaggaccacacctgcgaggtgagaaagcaggtgctgccccacagcgccgaggagagccacctgagcagccaggaggccgtgagcgccctggacaccagcagcggcaacaccgagaccctgagcagcaagagctacagcagcgaggaggtgaagctggccgaggagcccaagagcctggtgctggccggcaacgtggagagaaacatcgccgagggcaaggagatccacagcctgatggagagcgagagcctgctgctggagaaggccaacaccgagctgagctggcccagcaaggaggacagccaggagaagatcaagctgccccccgagagattcttccagaagcccgtgagcggcctgagcgtggagcaggtgaagagcgagaccatcagcagcagcgtgaagaccgcccacttccccgccgagggcgtggagcccgccctgggcaacgagaaggaggcccacagaagcaccccccccttccccgaggagaagcccctggaggagagcaagatggtgcagagcaaggtgatcgacgacgccgacgagggcaagaagcccagccccgaggtgaagatccccacccagagaaagcccatcagcagcatccacgccagagagccccagagccccgagagccccgaggtgacccagaacccccccacccagcccaaggtggccaagcccgacctgcccgaggagaagggcaagaagggcatcagcagcttcaagagctggatgagcagcctgttcttcggcagcagcacccccgacaacaaggtggccgagcaggaggacctggagacccagcccagccccagcgtggagaaggccgtgaccgtgatcgaccccgagggcaccatccccaccaacttcaacgtggccgagaagcccgccgaccacagcctgagcgaggtgaagctgaagaccgccgacgagcccagaggcaccctggtgaagagcggcgacggccagaacgtgaaggagaagagcatgatcctgagcaacgtggaggacctgcagcagcccaagttcatcagcgaggtgagcagagaggactacggcaagaaggagatcagcggcgacagcgaggagatgaacatcaacagcgtggtgaccagcgccgacggcgagaacctggagatccagagctacagcctgatcggcgagaagctggtgatggaggaggccaagaccatcgtgcccccccacgtgaccgacagcaagagagtgcagaagcccgccatcgccccccccagcaagtggaacatcagcatcttcaaggaggagcccagaagcgaccagaagcagaagagcctgctgagcttcgacgtggtggacaaggtgccccagcagcccaagagcgccagcagcaacttcgccagcaagaacatcaccaaggagagcgagaagcccgagagcatcatcctgcccgtggaggagagcaagggcagcctgatcgacttcagcgaggacagactgaagaaggagatgcagaaccccaccagcctgaagatcagcgaggaggagaccaagctgagaagcgtgagccccaccgagaagaaggacaacctggagaacagaagctacaccctggccgagaagaaggtgctggccgagaagcagaacagcgtggcccccctggagctgagagacagcaacgagatcggcaagacccagatcaccctgggcagcagaagcaccgagctgaaggagagcaaggccgacgccatgccccagcacttctaccagaacgaggactacaacgagagacccaagatcatcgtgggcagcgagaaggagaagggcgaggagaaggagaaccaggtgtacgtgctgagcgagggcaagaagcagcaggagcaccagccctacagcgtgaacgtggccgagagcatgagcagagagagcgacatcagcctgggccacagcctgggcgagacccagagcttcagcctggtgaaggccaccagcgtgaccgagaagagcgaggccatgctggccgaggcccaccccgagatcagagaggccaaggccgtgggcacccagccccaccccctggaggagagcaaggtgctggtggagaagaccaagaccttcctgcccgtggccctgagctgcagagacgagatcgagaaccacagcctgagccaggagggcaacctggtgctggagaagagcagcagagacatgcccgaccacagcgaggagaaggagcagttcagagagagcgagctgagcaagggcggcagcgtggacatcaccaaggagaccgtgaagcagggcttccaggagaaggccgtgggcacccagcccagacccctggaggagagcaaggtgctggtggagaagaccaagaccttcctgcccgtggtgctgagctgccacgacgagatcgagaaccacagcctgagccaggagggcaacctggtgctggagaagagcagcagagacatgcccgaccacagcgaggagaaggagcagttcaaggagagcgagctgtggaagggcggcagcgtggacatcaccaaggagagcatgaaggagggcttccccagcaaggagagcgagagaaccctggccagacccttcgacgagaccaagagcagcgagacccccccctacctgctgagccccgtgaagccccagaccctggccagcggcgccagccccgagatcaacgccgtgaagaagaaggagatgcccagaagcgagctgacccccgagagacacaccgtgcacaccatccagaccagcaaggacgacaccagcgacgtgcccaagcagagcgtgctggtgagcaagcaccacctggaggccgccgaggacaccagagtgaaggagcccctgagcagcgccaagagcaactacgcccagttcatcagcaacaccagcgccagcaacgccgacaagatggtgagcaacaaggagatgcccaaggagcccgaggacacctacgccaagggcgaggacttcaccgtgaccagcaagcccgccggcctgagcgaggaccagaagaccgccttcagcatcatcagcgagggctgcgagatcctgaacatccacgcccccgccttcatcagcagcatcgaccaggaggagagcgagcagatgcaggacaagctggagtacctggaggagaaggccagcttcaagaccatccccctgcccgacgacagcgagaccgtggcctgccacaagaccctgaagagcagactggaggacgagaaggtgacccccctgaaggagaacaagcagaaggagacccacaagaccaaggaggagatcagcaccgacagcgagaccgacctgagcttcatccagcccaccatccccagcgaggaggactacttcgagaagtacaccctgatcgactacaacatcagccccgaccccgagaagcagaaggccccccagaagctgaacgtggaggagaagctgagcaaggaggtgaccgaggagaccatcagcttccccgtgagcagcgtggagagcgccctggagcacgagtacgacctggtgaagctggacgagagcttctacggccccgagaagggccacaacatcctgagccaccccgagacccagagccagaacagcgccgacagaaacgtgagcaaggacaccaagagagacgtggacagcaagagccccggcatgcccctgttcgaggccgaggagggcgtgctgagcagaacccagatcttccccaccaccatcaaggtgatcgaccccgagttcctggaggagccccccgccctggccttcctgtacaaggacctgtacgaggaggccgtgggcgagaagaagaaggaggaggagaccgccagcgagggcgacagcgtgaacagcgaggccagcttccccagcagaaacagcgacaccgacgacggcaccggcatctacttcgagaagtacatcctgaaggacgacatcctgcacgacaccagcctgacccagaaggaccagggccagggcctggaggagaagagagtgggcaaggacgacagctaccagcccatcgccgccgagggcgagatctggggcaagttcggcaccatctgcagagagaagagcctggaggagcagaagggcgtgtacggcgagggcgagagcgtggaccacgtggagaccgtgggcaacgtggccatgcagaagaaggcccccatcaccgaggacgtgagagtggccacccagaagatcagctacgccgtgcccttcgaggacacccaccacgtgctggagagagccgacgaggccggcagccacggcaacgaggtgggcaacgccagccccgaggtgaacctgaacgtgcccgtgcaggtgagcttccccgaggaggagttcgccagcggcgccacccacgtgcaggagaccagcctggaggagcccaagatcctggtgccccccgagcccagcgaggagagactgagaaacagccccgtgcaggacgagtacgagttcaccgagagcctgcacaacgaggtggtgccccaggacatcctgagcgaggagctgagcagcgagagcacccccgaggacgtgctgagccagggcaaggagagcttcgagcacatcagcgagaacgagttcgccagcgaggccgagcagagcacccccgccgagcagaaggagctgggcagcgagagaaaggaggaggaccagctgagcagcgaggtggtgaccgagaaggcccagaaggagctgaagaagagccagatcgacacctactgctacacctgcaagtgccccatcagcgccaccgacaaggtgttcggcacccacaaggaccacgaggtgagcaccctggacaccgccatcagcgccgtgaaggtgcagctggccgagttcctggagaacctgcaggagaagagcctgagaatcgaggccttcgtgagcgagatcgagagcttcttcaacaccatcgaggagaactgcagcaagaacgagaagagactggaggagcagaacgaggagatgatgaagaaggtgctggcccagtacgacgagaaggcccagagcttcgaggaggtgaagaagaagaagatggagttcctgcacgagcagatggtgcacttcctgcagagcatggacaccgccaaggacaccctggagaccatcgtgagagaggccgaggagctggacgaggccgtgttcctgaccagcttcgaggagatcaacgagagactgctgagcgccatggagagcaccgccagcctggagaagatgcccgccgccttcagcctgttcgagcactacgacgacagcagcgccagaagcgaccagatgctgaagcaggtggccgtgccccagccccccagactggagccccaggagcccaacagcgccaccagcaccaccatcgccgtgtactggagcatgaacaaggaggacgtgatcgacagcttccaggtgtactgcatggaggagccccaggacgaccaggaggtgaacgagctggtggaggagtacagactgaccgtgaaggagagctactgcatcttcgaggacctggagcccgacagatgctaccaggtgtgggtgatggccgtgaacttcaccggctgcagcctgcccagcgagagagccatcttcagaaccgcccccagcacccccgtgatcagagccgaggactgcaccgtgtgctggaacaccgccaccatcagatggagacccaccacccccgaggccaccgagacctacaccctggagtactgcagacagcacagccccgagggcgagggcctgagaagcttcagcggcatcaagggcctgcagctgaaggtgaacctgcagcccaacgacaactacttcttctacgtgagagccatcaacgccttcggcaccagcgagcagagcgaggccgccctgatcagcaccagaggcaccagattcctgctgctgagagagaccgcccaccccgccctgcacatcagcagcagcggcaccgtgatcagcttcggcgagagaagaagactgaccgagatccccagcgtgctgggcgaggagctgcccagctgcggccagcactactgggagaccaccgtgaccgactgccccgcctacagactgggcatctgcagcagcagcgccgtgcaggccggcgccctgggccagggcgagaccagctggtacatgcactgcagcgagccccagagatacaccttcttctacagcggcatcgtgagcgacgtgcacgtgaccgagagacccgccagagtgggcatcctgctggactacaacaaccagagactgatcttcatcaacgccgagagcgagcagctgctgttcatcatcagacacagattcaacgagggcgtgcaccccgccttcgccctggagaagcccggcaagtgcaccctgcacctgggcatcgagccccccgacagcgtgagacacaagtag

SEQ ID NO: 75493 - DNA, 678 bp, synthetic construct
  misc_feature 1..678: note = Description of Artificial Sequence: Synthetic coding sequence
  source 1..678: mol_type = other DNA
atggacctgagagccggcgacagctggggcatgctggcctgcctgtgcaccgtgctgtggcacctgcccgccgtgcccgccctgaacagaaccggcgaccccggccccggccccagcatccagaagacctacgacctgaccagatacctggagcaccagctgagaagcctggccggcacctacctgaactacctgggcccccccttcaacgagcccgacttcaacccccccagactgggcgccgagaccctgcccagagccaccgtggacctggaggtgtggagaagcctgaacgacaagctgagactgacccagaactacgaggcctacagccacctgctgtgctacctgagaggcctgaacagacaggccgccaccgccgagctgagaagaagcctggcccacttctgcaccagcctgcagggcctgctgggcagcatcgccggcgtgatggccgccctgggctaccccctgccccagcccctgcccggcaccgagcccacctggacccccggccccgcccacagcgacttcctgcagaagatggacgacttctggctgctgaaggagctgcagacctggctgtggagaagcgccaaggacttcaacagactgaagaagaagatgcagccccccgccgccgccgtgaccctgcacctgggcgcccacggcttctag

SEQ ID NO: 75494 - DNA, 648 bp, synthetic construct
  misc_feature 1..648: note = Description of Artificial Sequence: Synthetic coding sequence
  source 1..648: mol_type = other DNA
atgctggcctgcctgtgcaccgtgctgtggcacctgcccgccgtgcccgccctgaacagaaccggcgaccccggccccggccccagcatccagaagacctacgacctgaccagatacctggagcaccagctgagaagcctggccggcacctacctgaactacctgggcccccccttcaacgagcccgacttcaacccccccagactgggcgccgagaccctgcccagagccaccgtggacctggaggtgtggagaagcctgaacgacaagctgagactgacccagaactacgaggcctacagccacctgctgtgctacctgagaggcctgaacagacaggccgccaccgccgagctgagaagaagcctggcccacttctgcaccagcctgcagggcctgctgggcagcatcgccggcgtgatggccgccctgggctaccccctgccccagcccctgcccggcaccgagcccacctggacccccggccccgcccacagcgacttcctgcagaagatggacgacttctggctgctgaaggagctgcagacctggctgtggagaagcgccaaggacttcaacagactgaagaagaagatgcagccccccgccgccgccgtgaccctgcacctgggcgcccacggcttctag

SEQ ID NO: 75495 - DNA, 648 bp, synthetic construct; identical to SEQ ID NO: 75494
  misc_feature 1..648: note = Description of Artificial Sequence: Synthetic coding sequence
  source 1..648: mol_type = other DNA

SEQ ID NO: 75496 - DNA, 1881 bp, synthetic construct
  misc_feature 1..1881: note = Description of Artificial Sequence: Synthetic coding sequence
  source 1..1881: mol_type = other DNA
atgctggccttcgccgccagaaccgtggtgaagcccctgggcttcctgaagcccttcagcctgatgaaggccagcagcagattcaaggcccaccaggacgccctgcccagactgcccgtgccccccctgcagcagagcctggaccactacctgaaggccctgcagcccatcgtgagcgaggaggagtgggcccacaccaagcagctggtggacgagttccaggccagcggcggcgtgggcgagagactgcagaagggcctggagagaagagccagaaagaccgagaactggctgagcgagtggtggctgaagaccgcctacctgcagtacagacagcccgtggtgatctacagcagccccggcgtgatgctgcccaagcaggacttcgtggacctgcagggccagctgagattcgccgccaagctgatcgagggcgtgctggacttcaaggtgatgatcgacaacgagaccctgcccgtggagtacctgggcggcaagcccctgtgcatgaaccagtactaccagatcctgagcagctgcagagtgcccggccccaagcaggacaccgtgagcaacttcagcaagaccaagaagccccccacccacatcaccgtggtgcacaactaccagttcttcgagctggacgtgtaccacagcgacggcacccccctgaccgccgaccagatcttcgtgcagctggagaagatctggaacagcagcctgcagaccaacaaggagcccgtgggcatcctgaccagcaaccacagaaacagctgggccaaggcctacaacaccctgatcaaggacaaggtgaacagagacagcgtgagaagcatccagaagagcatcttcaccgtgtgcctggacgccaccatgcccagagtgagcgaggacgtgtacagaagccacgtggccggccagatgctgcacggcggcggcagcagactgaacagcggcaacagatggttcgacaagaccctgcagttcatcgtggccgaggacggcagctgcggcctggtgtacgagcacgccgccgccgagggcccccccatcgtgaccctgctggactacgtgatcgagtacaccaagaagcccgagctggtgagaagccccctggtgcccctgcccatgcccaagaagctgagattcaacatcacccccgagatcaagagcgacatcgagaaggccaagcagaacctgagcatcatgatccaggacctggacatcaccgtgatggtgttccaccacttcggcaaggacttccccaagagcgagaagctgagccccgacgccttcatccagatggccctgcagctggcctactacagaatctacggccaggcctgcgccacctacgagagcgccagcctgagaatgttccacctgggcagaaccgacaccatcagaagcgccagcatggacagcctgaccttcgtgaaggccatggacgacagcagcgtgaccgagcaccagaaggtggagctgctgagaaaggccgtgcaggcccacagaggctacaccgacagagccatcagaggcgaggccttcgacagacacctgctgggcctgaagctgcaggccatcgaggacctggtgagcatgcccgacatcttcatggacaccagctacgccatcgccatgcacttccacctgagcaccagccaggtgcccgccaagaccgactgcgtgatgttcttcggccccgtggtgcccgacggctacggcgtgtgctacaaccccatggaggcccacatcaacttcagcctgagcgcctacaacagctgcgccgagaccaacgccgccagactggcccactacctggagaaggccctgctggacatgagagccctgctgcagagccaccccagagccaagctgtag

SEQ ID NO: 75497 - DNA, 1638 bp, synthetic construct
  misc_feature 1..1638: note = Description of Artificial Sequence: Synthetic coding sequence
  source 1..1638: mol_type = other DNA
atgctggccttcgccgccagaaccgtggtgaagcccctgggcttcctgaagcccttcagcctgatgaaggccagcagcagattcaaggcccaccaggacgccctgcccagactgcccgtgccccccctgcagcagagcctggaccactacctgaaggccctgcagcccatcgtgagcgaggaggagtgggcccacaccaagcagctggtggacgagttccaggccagcggcggcgtgggcgagagactgcagaagggcctggagagaagagccagaaagaccgagaactggctgagcgagtggtggctgaagaccgcctacctgcagtacagacagcccgtggtgatctacagcagccccggcgtgatgctgcccaagcaggacttcgtggacctgcagggccagctgagattcgccgccaagctgatcgagggcgtgctggacttcaaggtgatgatcgacaacgagaccctgcccgtggagtacctgggcggcaagcccctgtgcatgaaccagtactaccagatcctgagcagctgcagagtgcccggccccaagcaggacaccgtgagcaacttcagcaagaccaagaagccccccacccacatcaccgtggtgcacaactaccagttcttcgagctggacgtgtaccacagcgacggcacccccctgaccgccgaccagatcttcgtgcagctggagaagatctggaacagcagcctgcagaccaacaaggagcccgtgggcatcctgaccagcaaccacagaaacagctgggccaaggcctacaacaccctgatcaaggacaaggtgaacagagacagcgtgagaagcatccagaagaagaagcccgagctggtgagaagccccctggtgcccctgcccatgcccaagaagctgagattcaacatcacccccgagatcaagagcgacatcgagaaggccaagcagaacctgagcatcatgatccaggacctggacatcaccgtgatggtgttccaccacttcggcaaggacttccccaagagcgagaagctgagccccgacgccttcatccagatggccctgcagctggcctactacagaatctacggccaggcctgcgccacctacgagagcgccagcctgagaatgttccacctgggcagaaccgacaccatcagaagcgccagcatggacagcctgaccttcgtgaaggccatggacgacagcagcgtgaccgagcaccagaaggtggagctgctgagaaaggccgtgcaggcccacagaggctacaccgacagagccatcagaggcgaggccttcgacagacacctgctgggcctgaagctgcaggccatcgaggacctggtgagcatgcccgacatcttcatggacaccagctacgccatcgccatgcacttccacctgagcaccagccaggtgcccgccaagaccgactgcgtgatgttcttcggccccgtggtgcccgacggctacggcgtgtgctacaaccccatggaggcccacatcaacttcagcctgagcgcctacaacagctgcgccgagaccaacgccgccagactggcccactacctggagaaggccctgctggacatgagagccctgctgcagagccaccccagagccaagctgtag

SEQ ID NO: 75498 - DNA, 2322 bp, synthetic construct
  misc_feature 1..2322: note = Description of Artificial Sequence: Synthetic coding sequence
  source 1..2322: mol_type = other DNA
atggccgaggcccaccaggccgtggccttccagttcaccgtgacccccgacggcatcgacctgagactgagccacgaggccctgagacagatctacctgagcggcctgcacagctggaagaagaagttcatcagattcaagaacggcatcatcaccggcgtgtaccccgccagccccagcagctggctgatcgtggtggtgggcgtgatgaccaccatgtacgccaagatcgaccccagcctgggcatcatcgccaagatcaacagaaccctggagaccgccaactgcatgagcagccagaccaagaacgtggtgagcggcgtgctgttcggcaccggcctgtgggtggccctgatcgtgaccatgagatacagcctgaaggtgctgctgagctaccacggctggatgttcaccgagcacggcaagatgagcagagccaccaagatctggatgggcatggtgaagatcttcagcggcagaaagcccatgctgtacagcttccagaccagcctgcccagactgcccgtgcccgccgtgaaggacaccgtgaacagatacctgcagagcgtgagacccctgatgaaggaggaggacttcaagagaatgaccgccctggcccaggacttcgccgtgggcctgggccccagactgcagtggtacctgaagctgaagagctggtgggccaccaactacgtgagcgactggtgggaggagtacatctacctgagaggcagaggccccctgatggtgaacagcaactactacgccatggacctgctgtacatcctgcccacccacatccaggccgccagagccggcaacgccatccacgccatcctgctgtacagaagaaagctggacagagaggagatcaagcccatcagactgctgggcagcaccatccccctgtgcagcgcccagtgggagagaatgttcaacaccagcagaatccccggcgaggagaccgacaccatccagcacatgagagacagcaagcacatcgtggtgtaccacagaggcagatacttcaaggtgtggctgtaccacgacggcagactgctgaagcccagagagatggagcagcagatgcagagaatcctggacaacaccagcgagccccagcccggcgaggccagactggccgccctgaccgccggcgacagagtgccctgggccagatgcagacaggcctacttcggcagaggcaagaacaagcagagcctggacgccgtggagaaggccgccttcttcgtgaccctggacgagaccgaggagggctacagaagcgaggaccccgacaccagcatggacagctacgccaagagcctgctgcacggcagatgctacgacagatggttcgacaagagcttcaccttcgtggtgttcaagaacggcaagatgggcctgaacgccgagcacagctgggccgacgcccccatcgtggcccacctgtgggagtacgtgatgagcatcgacagcctgcagctgggctacgccgaggacggccactgcaagggcgacatcaaccccaacatcccctaccccaccagactgcagtgggacatccccggcgagtgccaggaggtgatcgagaccagcctgaacaccgccaacctgctggccaacgacgtggacttccacagcttccccttcgtggccttcggcaagggcatcatcaagaagtgcagaaccagccccgacgccttcgtgcagctggccctgcagctggcccactacaaggacatgggcaagttctgcctgacctacgaggccagcatgaccagactgttcagagagggcagaaccgagaccgtgagaagctgcaccaccgagagctgcgacttcgtgagagccatggtggaccccgcccagaccgtggagcagagactgaagctgttcaagctggccagcgagaagcaccagcacatgtacagactggccatgaccggcagcggcatcgacagacacctgttctgcctgtacgtggtgagcaagtacctggccgtggagagccccttcctgaaggaggtgctgagcgagccctggagactgagcaccagccagaccccccagcagcaggtggagctgttcgacctggagaacaaccccgagtacgtgagcagcggcggcggcttcggccccgtggccgacgacggctacggcgtgagctacatcctggtgggcgagaacctgatcaacttccacatcagcagcaagttcagctgccccgagaccgacagccacagattcggcagacacctgaaggaggccatgaccgacatcatcaccctgttcggcctgagcagcaacagcaagaagtag

SEQ ID NO: 75499 - DNA, 2271 bp, synthetic construct
  misc_feature 1..2271: note = Description of Artificial Sequence: Synthetic coding sequence
  source 1..2271: mol_type = other DNA
atggccgaggcccaccaggccgtggccttccagttcaccgtgacccccgacggcatcgacctgagactgagccacgaggccctgagacagatctacctgagcggcctgcacagctggaagaagaagttcatcagattcaagaacggcatcatcaccggcgtgtaccccgccagccccagcagctggctgatcgtggtggtgggcgtgatgaccaccatgtacgccaagatcgaccccagcctgggcatcatcgccaagatcaacagaaccctggagaccgccaactgcatgagcagccagaccaagaacgtggtgagcggcgtgctgttcggcaccggcctgtgggtggccctgatcgtgaccatgagatacagcctgaaggtgctgctgagctaccacggctggatgttcaccgagcacggcaagatgagcagagccaccaagatctggatgggcatggtgaagatcttcagcggcagaaagcccatgctgtacagcttccagaccagcctgcccagactgcccgtgcccgccgtgaaggacaccgtgaacagatacctgcagagcgtgagacccctgatgaaggaggaggacttcaagagaatgaccgccctggcccaggacttcgccgtgggcctgggccccagactgcagtggtacctgaagctgaagagctggtgggccaccaactacgtgagcgactggtgggaggagtacatctacctgagaggcagaggccccctgatggtgaacagcaactactacgccatggacctgctgtacatcctgcccacccacatccaggccgccagagccggcaacgccatccacgccatcctgctgtacagaagaaagctggacagagaggagatcaagcccatcagactgctgggcagcaccatccccctgtgcagcgcccagtgggagagaatgttcaacaccagcagaatccccggcgaggagaccgacaccatccagcacatgagagacagcaagcacatcgtggtgtaccacagaggcagatacttcaaggtgtggctgtaccacgacggcagactgctgaagcccagagagatggagcagcagatgcagagaatcctggacaacaccagcgagccccagcccggcgaggccagactggccgccctgaccgccggcgacagagtgccctgggccagatgcagacaggcctacttcggcagaggcaagaacaagcagagcctggacgccgtggagaaggccgccttcttcgtgaccctggacgagaccgaggagggctacagaagcgaggaccccgacaccagcatggacagctacgccaagagcctgctgcacggcagatgctacgacagatggttcgacaagagcttcaccttcgtggtgttcaagaacggcaagatgggcctgaacgccgagcacagctgggccgacgcccccatcgtggcccacctgtgggagtacgtgatgagcatcgacagcctgcagctgggctacgccgaggacggccactgcaagggcgacatcaaccccaacatcccctaccccaccagactgcagtgggacatccccggcgagtgccaggaggtgatcgagaccagcctgaacaccgccaacctgctggccaacgacgtggacttccacagcttccccttcgtggccttcggcaagggcatcatcaagaagtgcagaaccagccccgacgccttcgtgcagctggccctgcagctggcccactacaaggacatgggcaagttctgcctgacctacgaggccagcatgaccagactgttcagagagggcagaaccgagaccgtgagaagctgcaccaccgagagctgcgacttcgtgagagccatggtggaccccgcccagaccgtggagcagagactgaagctgttcaagctggccagcgagaagcaccagcacatgtacagactggccatgaccggcagcggcatcgacagacacctgttctgcctgtacgtggtgagcaagtacctggccgtggagagccccttcctgaaggaggtgctgagcgagccctggagactgagcaccagccagaccccccagcagcaggtggagctgttcgacctggagaacaaccccgagtacgtgagcagcggcggcggcttcggccccgtggccgacgacggctacggcgtgagctacatcctggtgggcgagaacctgatcaacttccacatcagcagcaagttcagctgccccgagaccggcatcatcagccagggccccagcagcgacacctag

SEQ ID NO: 75500 - DNA, 2322 bp, synthetic construct; identical to SEQ ID NO: 75498
  misc_feature 1..2322: note = Description of Artificial Sequence: Synthetic coding sequence
  source 1..2322: mol_type = other DNA

SEQ ID NO: 75501 - DNA, 2322 bp, synthetic construct; identical to SEQ ID NO: 75498
  misc_feature 1..2322: note = Description of Artificial Sequence: Synthetic coding sequence
  source 1..2322: mol_type = other DNA

SEQ ID NO: 75502 - DNA, 2271 bp, synthetic construct; identical to SEQ ID NO: 75499
  misc_feature 1..2271: note = Description of Artificial Sequence: Synthetic coding sequence
  source 1..2271: mol_type = other DNA

SEQ ID NO: 75503 - DNA, 2319 bp, synthetic construct
  misc_feature 1..2319: note = Description of Artificial Sequence: Synthetic coding sequence
  source 1..2319: mol_type = other DNA
atggccgaggcccaccaggccgtggccttccagttcaccgtgacccccgacggcgtggacttcagactgagcagagaggccctgaagcacgtgtacctgagcggcatcaacagctggaagaagagactgatcagaatcaagaacggcatcctgagaggcgtgtaccccggcagccccaccagctggctggtggtgatcatggccaccgtgggcagcagcttctgcaacgtggacatcagcctgggcctggtgagctgcatccagagatgcctgccccagggctgcggcccctaccagaccccccagaccagagccctgctgagcatggccatcttcagcaccggcgtgtgggtgaccggcatcttcttcttcagacagaccctgaagctgctgctgtgctaccacggctggatgttcgagatgcacggcaagaccagcaacctgaccagaatctgggccatgtgcatcagactgctgagcagcagacaccccatgctgtacagcttccagaccagcctgcccaagctgcccgtgcccagagtgagcgccaccatccagagatacctggagagcgtgagacccctgctggacgacgaggagtactacagaatggagctgctggccaaggagttccaggacaagaccgcccccagactgcagaagtacctggtgctgaagagctggtgggccagcaactacgtgagcgactggtgggaggagtacatctacctgagaggcagaagccccctgatggtgaacagcaactactacgtgatggacctggtgctgatcaagaacaccgacgtgcaggccgccagactgggcaacatcatccacgccatgatcatgtacagaagaaagctggacagagaggagatcaagcccgtgatggccctgggcatcgtgcccatgtgcagctaccagatggagagaatgttcaacaccaccagaatccccggcaaggacaccgacgtgctgcagcacctgagcgacagcagacacgtggccgtgtaccacaagggcagattcttcaagctgtggctgtacgagggcgccagactgctgaagccccaggacctggagatgcagttccagagaatcctggacgaccccagccccccccagcccggcgaggagaagctggccgccctgaccgccggcggcagagtggagtgggcccaggccagacaggccttcttcagcagcggcaagaacaaggccgccctggaggccatcgagagagccgccttcttcgtggccctggacgaggagagctacagctacgaccccgaggacgaggccagcctgagcctgtacggcaaggccctgctgcacggcaactgctacaacagatggttcgacaagagcttcaccctgatcagcttcaagaacggccagctgggcctgaacgccgagcacgcctgggccgacgcccccatcatcggccacctgtgggagttcgtgctgggcaccgacagcttccacctgggctacaccgagaccggccactgcctgggcaagcccaaccccgccctggccccccccaccagactgcagtgggacatccccaagcagtgccaggccgtgatcgagagcagctaccaggtggccaaggccctggccgacgacgtggagctgtactgcttccagttcctgcccttcggcaagggcctgatcaagaagtgcagaaccagccccgacgccttcgtgcagatcgccctgcagctggcccacttcagagacagaggcaagttctgcctgacctacgaggccagcatgaccagaatgttcagagagggcagaaccgagaccgtgagaagctgcaccagcgagagcaccgccttcgtgcaggccatgatggagggcagccacaccaaggccgacctgagagacctgttccagaaggccgccaagaagcaccagaacatgtacagactggccatgaccggcgccggcatcgacagacacctgttctgcctgtacctggtgagcaagtacctgggcgtgagcagccccttcctggccgaggtgctgagcgagccctggagactgagcaccagccagatcccccagagccagatcagaatgttcgaccccgagcagcaccccaaccacctgggcgccggcggcggcttcggccccgtggccgacgacggctacggcgtgagctacatgatcgccggcgagaacaccatcttcttccacatcagcagcaagttcagcagcagcgagaccaacgcccagagattcggcaaccacatcagaaaggccctgctggacatcgccgacctgttccaggtgcccaaggcctacagctag

SEQ ID NO: 75504 - DNA, 2319 bp, synthetic construct; identical to SEQ ID NO: 75503
  misc_feature 1..2319: note = Description of Artificial Sequence: Synthetic coding sequence
  source 1..2319: mol_type = other DNA

SEQ ID NO: 75505 - DNA, 2319 bp, synthetic construct; identical to SEQ ID NO: 75503
  misc_feature 1..2319: note = Description of Artificial Sequence: Synthetic coding sequence
  source 1..2319: mol_type = other DNA

SEQ ID NO: 75506 - DNA, 2319 bp, synthetic construct; identical to SEQ ID NO: 75503
  misc_feature 1..2319: note = Description of Artificial Sequence: Synthetic coding sequence
  source 1..2319: mol_type = other DNA

SEQ ID NO: 75507 - DNA, 378 bp, synthetic construct
  misc_feature 1..378: note = Description of Artificial Sequence: Synthetic coding sequence
  source 1..378: mol_type = other DNA
atggccgaggcccaccaggccgtggccttccagttcaccgtgacccccgacggcgtggacttcagactgagcagagaggccctgaagcacgtgtacctgagcggcatcaacagctggaagaagagactgatcagaatcaagaacggcatcctgagaggcgtgtaccccggcagccccaccagctggctggtggtgatcatggccaccgtgggcagcagcttctgcaacgtggacatcagcctgggcctggtgagctgcatccagagatgcctgccccagggctgcggcccctaccagaccccccagaccagagccctgctgagcatggccatcttcagcaccggcgtgtgggtgaccggcatcttcttcttcagatag

SEQ ID NO: 75508 - DNA, 1704 bp, synthetic construct
  misc_feature 1..1704: note = Description of Artificial Sequence: Synthetic coding sequence
  source 1..1704: mol_type = other DNA
atggagctgctggccaaggagttccaggacaagaccgcccccagactgcagaagtacctggtgctgaagagctggtgggccagcaactacgtgagcgactggtgggaggagtacatctacctgagaggcagaagccccctgatggtgaacagcaactactacgtgatggacctggtgctgatcaagaacaccgacgtgcaggccgccagactgggcaacatcatccacgccatgatcatgtacagaagaaagctggacagagaggagatcaagcccgtgatggccctgggcatcgtgcccatgtgcagctaccagatggagagaatgttcaacaccaccagaatccccggcaaggacaccgacgtgctgcagcacctgagcgacagcagacacgtggccgtgtaccacaagggcagattcttcaagctgtggctgtacgagggcgccagactgctgaagccccaggacctggagatgcagttccagagaatcctggacgaccccagccccccccagcccggcgaggagaagctggccgccctgaccgccggcggcagagtggagtgggcccaggccagacaggccttcttcagcagcggcaagaacaaggccgccctggaggccatcgagagagccgccttcttcgtggccctggacgaggagagctacagctacgaccccgaggacgaggccagcctgagcctgtacggcaaggccctgctgcacggcaactgctacaacagatggttcgacaagagcttcaccctgatcagcttcaagaacggccagctgggcctgaacgccgagcacgcctgggccgacgcccccatcatcggccacctgtgggagttcgtgctgggcaccgacagcttccacctgggctacaccgagaccggccactgcctgggcaagcccaaccccgccctggccccccccaccagactgcagtgggacatccccaagcaggccgtgatcgagagcagctaccaggtggccaaggccctggccgacgacgtggagctgtactgcttccagttcctgcccttcggcaagggcctgatcaagaagtgcagaaccagccccgacgccttcgtgcagatcgccctgcagctggcccacttcagagacagaggcaagttctgcctgacctacgaggccagcatgaccagaatgttcagagagggcagaaccgagaccgtgagaagctgcaccagcgagagcaccgccttcgtgcaggccatgatggagggcagccacaccaaggccgacctgagagacctgttccagaaggccgccaagaagcaccagaacatgtacagactggccatgaccggcgccggcatcgacagacacctgttctgcctgtacctggtgagcaagtacctgggcgtgagcagccccttcctggccgaggtgctgagcgagccctggagactgagcaccagccagatcccccagagccagatcagaatgttcgaccccgagcagcaccccaaccacctgggcgccggcggcggcttcggccccgtggccgacgacggctacggcgtgagctacatgatcgccggcgagaacaccatcttcttccacatcagcagcaagttcagcagcagcgagaccaacgcccagagattcggcaaccacatcagaaaggccctgctggacatcgccgacctgttccaggtgcccaaggcctacagctag

SEQ ID NO: 75509 - DNA, 2076 bp, synthetic construct
  misc_feature 1..2076: note = Description of Artificial Sequence: Synthetic coding sequence
  source 1..2076: mol_type = other DNA
atggccgaggcccaccaggccgtggccttccagttcaccgtgacccccgacggcgtggacttcagactgagcagagaggccctgaagcacgtgtacctgagcggcatcaacagctggaagaagagactgatcagaatcaagaacggcatcctgagaggcgtgtaccccggcagccccaccagctggctggtggtgatcatggccaccgtgggcagcagcttctgcaacgtggacatcagcctgggcctggtgagctgcatccagagatgcctgccccagggctgcggcccctaccagaccccccagaccagagccctgctgagcatggccatcttcagcaccggcgtgtgggtgaccggcatcttcttcttcagacagaccctgaagctgctgctgtgctaccacggctggatgttcgagatgcacggcaagaccagcaacctgaccagaatctgggccatgtgcatcagactgctgagcagcagacaccccatgctgtacagcttccagaccagcctgcccaagctgcccgtgcccagagtgagcgccaccatccagagatacctggagagcgtgagacccctgctggacgacgaggagtactacagaatggagctgctggccaaggagttccaggacaagaccgcccccagactgcagaagtacctggtgctgaagagctggtgggccagcaactacgtgagcgactggtgggaggagtacatctacctgagaggcagaagccccctgatggtgaacagcaactactacgtgatggacctggtgctgatcaagaacaccgacgtgcaggccgccagactgggcaacatcatccacgccatgatcatgtacagaagaaagctggacagagaggagatcaagcccgtgatggccctgggcatcgtgcccatgtgcagctaccagatggagagaatgttcaacaccaccagaatccccggcaaggacaccgacgtgctgcagcacctgagcgacagcagacacgtggccgtgtaccacaagggcagattcttcaagctgtggctgtacgagggcgccagactgctgagcctgtacggcaaggccctgctgcacggcaactgctacaacagatggttcgacaagagcttcaccctgatcagcttcaagaacggccagctgggcctgaacgccgagcacgcctgggccgacgcccccatcatcggccacctgtgggagttcgtgctgggcaccgacagcttccacctgggctacaccgagaccggccactgcctgggcaagcccaaccccgccctggccccccccaccagactgcagtgggacatccccaagcagtgccaggccgtgatcgagagcagctaccaggtggccaaggccctggccgacgacgtggagctgtactgcttccagttcctgcccttcggcaagggcctgatcaagaagtgcagaaccagccccgacgccttcgtgcagatcgccctgcagctggcccacttcagagacagaggcaagttctgcctgacctacgaggccagcatgaccagaatgttcagagagggcagaaccgagaccgtgagaagctgcaccagcgagagcaccgccttcgtgcaggccatgatggagggcagccacaccaaggccgacctgagagacctgttccagaaggccgccaagaagcaccagaacatgtacagactggccatgaccggcgccggcatcgacagacacctgttctgcctgtacctggtgagcaagtacctgggcgtgagcagccccttcctggccgaggtgctgagcgagccctggagactgagcaccagccagatcccccagagccagatcagaatgttcgaccccgagcagcaccccaaccacctgggcgccggcggcggcttcggccccgtggccgacgacggctacggcgtgagctacatgatcgccggcgagaacaccatcttcttccacatcagcagcaagttcagcagcagcgagaccaacgcccagagattcggcaaccacatcagaaaggccctgctggacatcgccgacctgttccaggtgcccaaggcctacagctag

SEQ ID NO: 75510 - DNA, 2217 bp, synthetic construct
  misc_feature 1..2217: note = Description of Artificial Sequence: Synthetic coding sequence
  source 1..2217: mol_type = other DNA
atggccgaggcccaccaggccgtggccttccagttcaccgtgacccccgacggcgtggacttcagactgagcagagaggccctgaagcacgtgtacctgagcggcatcaacagctggaagaagagactgatcagaatcaagaacggcatcctgagaggcgtgtaccccggcagccccaccagctggctggtggtgatcatggccaccgtgggcagcagcttctgcaacgtggacatcagcctgggcctggtgagctgcatccagagatgcctgccccagggctgcggcccctaccagaccccccagaccagagccctgctgagcatggccatcttcagcaccggcgtgtgggtgaccggcatcttcttcttcagacagaccctgaagctgctgctgtgctaccacggctggatgttcgagatgcacggcaagaccagcaacctgaccagaatctgggcctacctggagagcgtgagacccctgctggacgacgaggagtactacagaatggagctgctggccaaggagttccaggacaagaccgcccccagactgcagaagtacctggtgctgaagagctggtgggccagcaactacgtgagcgactggtgggaggagtacatctacctgagaggcagaagccccctgatggtgaacagcaactactacgtgatggacctggtgctgatcaagaacaccgacgtgcaggccgccagactgggcaacatcatccacgccatgatcatgtacagaagaaagctggacagagaggagatcaagcccgtgatggccctgggcatcgtgcccatgtgcagctaccagatggagagaatgttcaacaccaccagaatccccggcaaggacaccgacgtgctgcagcacctgagcgacagcagacacgtggccgtgtaccacaagggcagattcttcaagctgtggctgtacgagggcgccagactgctgaagccccaggacctggagatgcagttccagagaatcctggacgaccccagccccccccagcccggcgaggagaagctggccgccctgaccgccggcggcagagtggagtgggcccaggccagacaggccttcttcagcagcggcaagaacaaggccgccctggaggccatcgagagagccgccttcttcgtggccctggacgaggagagctacagctacgaccccgaggacgaggccagcctgagcctgtacggcaaggccctgctgcacggcaactgctacaacagatggttcgacaagagcttcaccctgatcagcttcaagaacggccagctgggcctgaacgccgagcacgcctgggccgacgcccccatcatcggccacctgtgggagttcgtgctgggcaccgacagcttccacctgggctacaccgagaccggccactgcctgggcaagcccaaccccgccctggccccccccaccagactgcagtgggacatccccaagcagtgccaggccgtgatcgagagcagctaccaggtggccaaggccctggccgacgacgtggagctgtactgcttccagttcctgcccttcggcaagggcctgatcaagaagtgcagaaccagccccgacgccttcgtgcagatcgccctgcagctggcccacttcagagacagaggcaagttctgcctgacctacgaggccagcatgaccagaatgttcagagagggcagaaccgagaccgtgagaagctgcaccagcgagagcaccgccttcgtgcaggccatgatggagggcagccacaccaaggccgacctgagagacctgttccagaaggccgccaagaagcaccagaacatgtacagactggccatgaccggcgccggcatcgacagacacctgttctgcctgtacctggtgagcaagtacctgggcgtgagcagccccttcctggccgaggtgctgagcgagccctggagactgagcaccagccagatcccccagagccagatcagaatgttcgaccccgagcagcaccccaaccacctgggcgccggcggcggcttcggccccgtggccgacgacggctacggcgtgagctacatgatcgccggcgagaacaccatcttcttccacatcagcagcaagttcagcagcagcgagaccaacgcccagagattcggcaaccacatcagaaaggccctgctggacatcgccgacctgttccaggtgcccaaggcctacagctag

SEQ ID NO: 75511 - DNA, 1458 bp, synthetic construct
  misc_feature 1..1458: note = Description of Artificial Sequence: Synthetic coding sequence
  source 1..1458: mol_type = other DNA
atgctgttcagctaccagagaagcctgcccagacagcccgtgcccagcgtgcaggacaccgtgagaaagtacctggagagcgtgagacccatcctgagcgacgaggacttcgactggaccgccgtgctggcccaggagttcctgagactgcaggccagcctgctgcagtggtacctgagactgaagagctggtgggccagcaactacgtgagcgactggtgggaggagttcgtgtacctgagaagcagaaaccccctgatggtgaacagcaactactacatgatggacttcctgtacgtgacccccacccccctgcaggccgccagagccggcaacgccgtgcacgccctgctgctgtacagacacagactgaacagacaggagatcccccccgtgagaggcccccagtgggtgagagacggcggcgtggtgctgtggcccctgggccacgtgggccccggcagacagctgaccgcccacggcttcctgcagaccctgctgatgggcatgagacccctgtgcagcgcccagtacgagaagatcttcaacaccaccagaatccccggcgtgcagaaggactacatcagacacctgcacgacagccagcacgtggccgtgttccacagaggcagattcttcagaatgggcacccacagcagaaacagcctgctgagccccagagccctggagcagcagttccagagaatcctggacgaccccagccccgcctgcccccacgaggagcacctggccgccctgaccgccgcccccagaggcacctgggcccaggtgagaaccagcctgaagacccaggccgccgaggccctggaggccgtggagggcgccgccttcttcgtgagcctggacgccgagcccgccggcctgaccagagaggaccccgccgccagcctggacgcctacgcccacgccctgctggccggcagaggccacgacagatggttcgacaagagcttcaccctgatcgtgttcagcaacggcaagctgggcctgagcgtggagcacagctgggccgactgccccatcagcggccacatgtgggagttcaccctggccaccgagtgcttccagctgggctacagcaccgacggccactgcaagggccaccccgaccccaccctgccccagccccagagactgcagtgggacctgcccgaccagatccacagcagcatcagcctggccctgagaggcgccaagatcctgagcgagaacgtggactgccacgtggtgcccttcagcctgttcggcaagagcttcatcagaagatgccacctgagcagcgacagcttcatccagatcgccctgcagctggcccacttcagagtgagctgggtgccccacccccagcccccccagggcctgagcccccccgagccccccagacccgccccccccagattcctggtggtggccgccatcgtgggcagacccagctag

SEQ ID NO: 75512 - DNA, 2412 bp, synthetic construct
  misc_feature 1..2412: note = Description of Artificial Sequence: Synthetic coding sequence
  source 1..2412: mol_type = other DNA
atggccgaggcccaccaggccgtgggcttcagacccagcctgaccagcgacggcgccgaggtggagctgagcgcccccgtgctgcaggagatctacctgagcggcctgagaagctggaagagacacctgagcagattctggaacgacttcctgaccggcgtgttccccgccagccccctgagctggctgttcctgttcagcgccatccagctggcctggttcctgcagctggaccccagcctgggcctgatggagaagatcaaggagctgctgcccgactggggcggccagcaccacggcctgagaggcgtgctggccgccgccctgttcgccagctgcctgtggggcgccctgatcttcaccctgcacgtggccctgagactgctgctgagctaccacggctggctgctggagccccacggcgccatgagcagccccaccaagacctggctggccctggtgagaatcttcagcggcagacaccccatgctgttcagctaccagagaagcctgcccagacagcccgtgcccagcgtgcaggacaccgtgagaaagtacctggagagcgtgagacccatcctgagcgacgaggacttcgactggaccgccgtgctggcccaggagttcctgagactgcaggccagcctgctgcagtggtacctgagactgaagagctggtgggccagcaactacgtgagcgactggtgggaggagttcgtgtacctgagaagcagaaaccccctgatggtgaacagcaactactacatgatggacttcctgtacgtgacccccacccccctgcaggccgccagagccggcaacgccgtgcacgccctgctgctgtacagacacagactgaacagacaggagatcccccccaccctgctgatgggcatgagacccctgtgcagcgcccagtacgagaagatcttcaacaccaccagaatccccggcgtgcagaaggactacatcagacacctgcacgacagccagcacgtggccgtgttccacagaggcagattcttcagaatgggcacccacagcagaaacagcctgctgagccccagagccctggagcagcagttccagagaatcctggacgaccccagccccgcctgcccccacgaggagcacctggccgccctgaccgccgcccccagaggcacctgggcccaggtgagaaccagcctgaagacccaggccgccgaggccctggaggccgtggagggcgccgccttcttcgtgagcctggacgccgagcccgccggcctgaccagagaggaccccgccgccagcctggacgcctacgcccacgccctgctggccggcagaggccacgacagatggttcgacaagagcttcaccctgatcgtgttcagcaacggcaagctgggcctgagcgtggagcacagctgggccgactgccccatcagcggccacatgtgggagttcaccctggccaccgagtgcttccagctgggctacagcaccgacggccactgcaagggccaccccgaccccaccctgccccagccccagagactgcagtgggacctgcccgaccagatccacagcagcatcagcctggccctgagaggcgccaagatcctgagcgagaacgtggactgccacgtggtgcccttcagcctgttcggcaagagcttcatcagaagatgccacctgagcagcgacagcttcatccagatcgccctgcagctggcccacttcagagacagaggccagttctgcctgacctacgagagcgccatgaccagactgttcctggagggcagaaccgagaccgtgagaagctgcaccagagaggcctgcaacttcgtgagagccatggaggacaaggagaagaccgacccccagtgcctggccctgttcagagtggccgtggacaagcaccaggccctgctgaaggccgccatgagcggccagggcgtggacagacacctgttcgccctgtacatcgtgagcagattcctgcacctgcagagccccttcctgacccaggtgcacagcgagcagtggcagctgagcaccagccagatccccgtgcagcagatgcacctgttcgacgtgcacaactaccccgactacgtgagcagcggcggcggcttcggccccgccgacgaccacggctacggcgtgagctacatcttcatgggcgacggcatgatcaccttccacatcagcagcaagaagagcagcaccaagaccgacagccacagactgggccagcacatcgaggacgccctgctggacgtggccagcctgttccaggccggccagcacttcaagagaagattcagaggcagcggcaaggagaacagcagacacagatgcggcttcctgagcagacagaccggcgccagcaaggccagcatgaccagcaccgacttctag

SEQ ID NO: 75513 - DNA, 2145 bp, synthetic construct
  misc_feature 1..2145: note = Description of Artificial Sequence: Synthetic coding sequence
  source 1..2145: mol_type = other DNA
atggccgaggcccaccaggccgtgggcttcagacccagcctgaccagcgacggcgccgaggtggagctgagcgcccccgtgctgcaggagatctacctgagcggcctgagaagctggaagagacacctgagcagattctggaacgacttcctgaccggcgtgttccccgccagccccctgagctggctgttcctgttcagcgccatccagctggcctggttcctgcagctggaccccagcctgggcctgatggagaagatcaaggagctgctgcccgactggggcggccagcaccacggcctgagaggcgtgctggccgccgccctgttcgccagctgcctgtggggcgccctgatcttcaccctgcacgtggccctgagactgctgctgagctaccacggctggctgctggagccccacggcgccatgagcagccccaccaagacctggctggccctggtgagaatcttcagcggcagacaccccatgctgttcagctaccagagaagcctgcccagacagcccgtgcccagcgtgcaggacaccgtgagaaagtacctggagagcgtgagacccatcctgagcgacgaggacttcgactggaccgccgtgctggcccaggagttcctgagactgcaggccagcctgctgcagtggtacctgagactgaagagctggtgggccagcaactacgtgagcgactggtgggaggagttcgtgtacctgagaagcagaaaccccctgatggtgaacagcaactactacatgatggacttcctgtacgtgacccccacccccctgcaggccgccagagccggcaacgccgtgcacgccctgctgctgtacagacacagactgaacagacaggagatcccccccaccctgctgatgggcatgagacccctgtgcagcgcccagtacgagaagatcttcaacaccaccagaatccccggcgtgcagaaggactacatcagacacctgcacgacagccagcacgtggccgtgttccacagaggcagattcttcagaatgggcacccacagcagaaacagcctgctgagccccagagccctggagcagcagttccagagaatcctggacgaccccagccccgcctgcccccacgaggagcacctggccgccctgaccgccgcccccagaggcacctgggcccaggtgagaaccagcctgaagacccaggccgccgaggccctggaggccgtggagggcgccgccttcttcgtgagcctggacgccgagcccgccggcctgaccagagaggaccccgccgccagcctggacgcctacgcccacgccctgctggccggcagaggccacgacagatggttcgacaagagcttcaccctgatcgtgttcagcaacggcaagctgggcctgagcgtggagcacagctgggccgactgccccatcagcggccacatgtgggagttcaccctggccaccgagtgcttccagctgggctacagcaccgacggccactgcaagggccaccccgaccccaccctgccccagccccagagactgcagtgggacctgcccgaccagatccacagcagcatcagcctggccctgagaggcgccaagatcctgagcgagaacgtggactgccacgtggtgcccttcagcctgttcggcaagagcttcatcagaagatgccacctgagcagcgacagcttcatccagatcgccctgcagctggcccacttcagagacagaggccagttctgcctgacctacgagagcgccatgaccagactgttcctggagggcagaaccgagaccgtgagaagctgcaccagagaggcctgcaacttcgtgagagccatggaggacaaggagaagaccgccgacgaccacggctacggcgtgagctacatcttcatgggcgacggcatgatcaccttccacatcagcagcaagaagagcagcaccaagaccgacagccacagactgggccagcacatcgaggacgccctgctggacgtggccagcctgttccaggccggccagcacttcaagagaagattcagaggcagcggcaaggagaacagcagacacagatgcggcttcctgagcagacagaccggcgccagcaaggccagcatgaccagcaccgacttctag

SEQ ID NO: 75514 - DNA, 2412 bp, synthetic construct; identical to SEQ ID NO: 75512
  misc_feature 1..2412: note = Description of Artificial Sequence: Synthetic coding sequence
  source 1..2412: mol_type = other DNA

SEQ ID NO: 75515 - DNA, 2379 bp, synthetic construct
  misc_feature 1..2379: note = Description of Artificial Sequence: Synthetic coding sequence
  source 1..2379: mol_type = other DNA
atggccgaggcccaccaggccgtgggcttcagacccagcctgaccagcgacggcgccgaggtggagctgagcgcccccgtgctgcaggagatctacctgagcggcctgagaagctggaagagacacctgagcagattctggaacgacttcctgaccggcgtgttccccgccagccccctgagctggctgttcctgttcagcgccatccagctggcctggttcctgcagctggaccccagcctgggcctgatggagaagatcaaggagctgctgcccgactggggcggccagcaccacggcctgagaggcgtgctggccgccgccctgttcgccagctgcctgtggggcgccctgatcttcaccctgcacgtggccctgagactgctgctgagctaccacggctggctgctggagccccacggcgccatgagcagccccaccaagacctggctggccctggtgagaatcttcagcggcagacaccccatgctgttcagctaccagagaagcctgcccagacagcccgtgcccagcgtgcaggacaccgtgagaaagtacctggagagcgtgagacccatcctgagcgacgaggacttcgactggaccgccgtgctggcccaggagttcctgagactgcaggccagcctgctgcagtggtacctgagactgaagagctggtgggccagcaactacgtgagcgactggtgggaggagttcgtgtacctgagaagcagaaaccccctgatggtgaacagcaactactacatgatggccgccagagccggcaacgccgtgcacgccctgctgctgtacagacacagactgaacagacaggagatcccccccaccctgctgatgggcatgagacccctgtgcagcgcccagtacgagaagatcttcaacaccaccagaatccccggcgtgcagaaggactacatcagacacctgcacgacagccagcacgtggccgtgttccacagaggcagattcttcagaatgggcacccacagcagaaacagcctgctgagccccagagccctggagcagcagttccagagaatcctggacgaccccagccccgcctgcccccacgaggagcacctggccgccctgaccgccgcccccagaggcacctgggcccaggtgagaaccagcctgaagacccaggccgccgaggccctggaggccgtggagggcgccgccttcttcgtgagcctggacgccgagcccgccggcctgaccagagaggaccccgccgccagcctggacgcctacgcccacgccctgctggccggcagaggccacgacagatggttcgacaagagcttcaccctgatcgtgttcagcaacggcaagctgggcctgagcgtggagcacagctgggccgactgccccatcagcggccacatgtgggagttcaccctggccaccgagtgcttccagctgggctacagcaccgacggccactgcaagggccaccccgaccccaccctgccccagccccagagactgcagtgggacctgcccgaccagatccacagcagcatcagcctggccctgagaggcgccaagatcctgagcgagaacgtggactgccacgtggtgcccttcagcctgttcggcaagagcttcatcagaagatgccacctgagcagcgacagcttcatccagatcgccctgcagctggcccacttcagagacagaggccagttctgcctgacctacgagagcgccatgaccagactgttcctggagggcagaaccgagaccgtgagaagctgcaccagagaggcctgcaacttcgtgagagccatggaggacaaggagaagaccgacccccagtgcctggccctgttcagagtggccgtggacaagcaccaggccctgctgaaggccgccatgagcggccagggcgtggacagacacctgttcgccctgtacatcgtgagcagattcctgcacctgcagagccccttcctgacccaggtgcacagcgagcagtggcagctgagcaccagccagatccccgtgcagcagatgcacctgttcgacgtgcacaactaccccgactacgtgagcagcggcggcggcttcggccccgccgacgaccacggctacggcgtgagctacatcttcatgggcgacggcatgatcaccttccacatcagcagcaagaagagcagcaccaagaccgacagccacagactgggccagcacatcgaggacgccctgctggacgtggccagcctgttccaggccggccagcacttcaagagaagattcagaggcagcggcaaggagaacagcagacacagatgcggcttcctgagcagacagaccggcgccagcaaggccagcatgaccagcaccgacttctag

SEQ ID NO: 75516 - DNA, 2412 bp, synthetic construct; identical to SEQ ID NO: 75512
  misc_feature 1..2412: note = Description of Artificial Sequence: Synthetic coding sequence
  source 1..2412: mol_type = other DNA

SEQ ID NO: 75517 - DNA, 1524 bp, synthetic construct
  misc_feature 1..1524: note = Description of Artificial Sequence: Synthetic coding sequence
  source 1..1524: mol_type = other DNA
atggaccccaagctgggcagaatggccgccagcctgctggccgtgctgctgctgctgctggagagaggcatgttcagcagccccagccccccccccgccctgctggagaaggtgttccagtacatcgacctgcaccaggacgagttcgtgcagaccctgaaggagtgggtggccatcgagagcgacagcgtgcagcccgtgcccagattcagacaggagctgttcagaatgatggccgtggccgccgacaccctgcagagactgggcgccagagtggccagcgtggacatgggcccccagcagctgcccgacggccagagcctgcccatcccccccatcatcctggccgagctgggcagcgaccccaccaagggcaccgtgtgcttctacggccacctggacgtgcagcccgccgacagaggcgacggctggctgaccgacccctacgtgctgaccgaggtggacggcaagctgtacggcagaggcgccaccgacaacaagggccccgtgctggcctggatcaacgccgtgagcgccttcagagccctggagcaggacctgcccgtgaacatcaagttcatcatcgagggcatggaggaggccggcagcgtggccctggaggagctggtggagaaggagaaggacagattcttcagcggcgtggactacatcgtgatcagcgacaacctgtggatcagccagagaaagcccgccatcacctacggcaccagaggcaacagctacttcatggtggaggtgaagtgcagagaccaggacttccacagcggcaccttcggcggcatcctgcacgagcccatggccgacctggtggccctgctgggcagcctggtggacagcagcggccacatcctggtgcccggcatctacgacgaggtggtgcccctgaccgaggaggagatcaacacctacaaggccatccacctggacctggaggagtacagaaacagcagcagagtggagaagttcctgttcgacaccaaggaggagatcctgatgcacctgtggagataccccagcctgagcatccacggcatcgagggcgccttcgacgagcccggcaccaagaccgtgatccccggcagagtgatcggcaagttcagcatcagactggtgccccacatgaacgtgagcgccgtggagaagcaggtgaccagacacctggaggacgtgttcagcaagagaaacagcagcaacaagatggtggtgagcatgaccctgggcctgcacccctggatcgccaacatcgacgacacccagtacctggccgccaagagagccatcagaaccgtgttcggcaccgagcccgacatgatcagagacggcagcaccatccccatcgccaagatgttccaggagatcgtgcacaagagcgtggtgctgatccccctgggcgccgtggacgacggcgagcacagccagaacgagaagatcaacagatggaactacatcgagggcaccaagctgttcgccgccttcttcctggagatggcccagctgcactag

SEQ ID NO: 75518 - DNA, 2484 bp, synthetic construct
  misc_feature 1..2484: note = Description of Artificial Sequence: Synthetic coding sequence
  source 1..2484: mol_type = other DNA
atgctgctgtgcctgagccccgcctggctgatgaaggtgcccgcccccggccagcccggcgaggccgccctgctggtgagcaaggccgtgagcttccaccccggcggcctgaccttcctggacgacttcgtgccccccagaagagccacctacttcctggccggcctgggcctgggccccggcagaggcagagaggccgccgagctggccagagacctgacctgccccaccggcgccagcgccgagctggccagactgctggaggacagactgctgaccagacagctgctggcccagcagggcggcgtggccgtgcccgccaccctggccttcacctacaagccccccggcctgctgagaggcggcgacgccagcctgggcctgagactggtggagctgagcggcaaggagggccaggagaccctggtgaaggaggaggtggaggccttcctgagaagcgaggccctgggcgacatcctgcaggtggccgtgaagctgagcggctggagatggagaggcagacaggcctggagactgcaccccagagccgagctgggcgccgtggtggacaccgtgctggccctgctggagaagctggaggaggaggagagcgtgctggtggaggccgtgtacccccccgcccagctgccctgcagcgacggccccagccccggccccggcctggccgtgagaatctgcgccgtggtgtgcagaacccagggcgacagacccctgctgagcaaggtggtgtgcggcgtgggcagaggcgacagacccctgagacaccacaacagcctgcccagaaccctggaggtggccctggcccagtgcggcctgggcgaggaggcccaggtggccgccgtgagacagagagtgaaggccgccgccgaggccgccctggccgccgtgctggccctggaggccggcctgagcgccgagcagagaggcggcagaagagcccacaccgacttcctgggcgtggacttcgccctgaccgccgccggcggcgtgctgacccccgtggccctggagctgaacggcggcctgtgcctggaggcctgcggcgccctggagggcctgtgggccgcccccagactgggccccgccgccgacgaggccgtggccgcccccctggtggagaccatgctgagaagaagcgccagatgcctgatggagggcaagcagctgctggtggtgggcgccggcggcgtgagcaagaagttcgtgtgggaggccgccagagactacggcctgcagctgcacctggtggagagcgaccccaaccacttcgccagccagctggtgcagaccttcatccacttcgacatgaccgagcacagaagagacgaggagaacgccagactgctggccgagctggtgagagccagaggcctgaagctggacggctgcttcagctactgggacgactgcctggtgctgaccgccctgctgtgccaggagctgggcctgccctgcagcagccccgccgccatgagactggccaagcagaagagcctgacccagctgcacctgctgcaccaccacggccccccctggcccgcccccagcctgcacgccgtgccctgctgccccctggagagcgaggccgacgtggagagagccgtgcaccaggtgcccctgcccggcgtgatgaagctggagttcggcgccggcgccgtgggcgtgagactggtggaggacgccccccagtgccacgagcacttcagcagaatcaccagagacctgcagggcgaggccgaccaccccggcatcggcctgggctggggcaacgccatgctgctgatggagttcgtggagggcaccgagcacgacgtggacctggtgctgttcggcggcagactgctggccgccttcgtgagcgacaacggccccaccagactgcccggcttcaccgagaccgccgcctgcatgcccaccggcctggcccccgagcaggaggcccagatggtgcaggccgccttcagatgctgcctgggctgcggcctgctggacggcgtgttcaacgtggagctgaagctgaccggcgccggccccagactgatcgagatcaaccccagaatgggcggcttctacctgagagactggatcctggagctgtacggcgtggacctgctgctggccgccgtgatggtggcctgcggcctgagacccgccctgcccaccagacccagagccagaggccacctggtgggcgtgatgtgcctggtgagccagcacctgcaggccctgagcagcaccgccagcagagagaccctgcaggccctgcacgacagaggcctgctgagactgaacctgctggaggaggccctggtgcccggcgagtacgaggagccctactgcagcgtggcctgcgccggccccagccccaccgaggccagactgagactgctgggcctgtgccagggcctgggcatcgacggccccagctaccccgtggcccacttcctgagccacttcaagtag

SEQ ID NO: 75519 - DNA, 2484 bp, synthetic construct; identical to SEQ ID NO: 75518
  misc_feature 1..2484: note = Description of Artificial Sequence: Synthetic coding sequence
  source 1..2484: mol_type = other DNA

SEQ ID NO: 75520 - DNA, 2853 bp, synthetic construct
  misc_feature 1..2853: note = Description of Artificial Sequence: Synthetic coding sequence
  source 1..2853: mol_type = other DNA
atgctgagcctggaccccagcggccccgagtgggactgccccctgggcagcaaggacctggaggaggagggcccctggggcggcggcagcggcctgccccccaccggctgcttccccggcagctggagacaggacgtgggcctggactgcaagggcagccccgagggcgccgaggccagagcctggaccgtgtactactacagcctgctgcagagctgcctgcagcaggccggcctgcccgagacccaggacagaggccaggtgcccagaaccggctgccccggcgccgaggtgaccctgtgcgtgctgggcagccccagcaccttcctgcccgtgctgctggagggcggcgtgcagagccccggcaacatgctgctgtgcctgagccccgcctggctgatgaaggtgcccgcccccggccagcccggcgaggccgccctgctggtgagcaaggccgtgagcttccaccccggcggcctgaccttcctggacgacttcgtgccccccagaagagccacctacttcctggccggcctgggcctgggccccggcagaggcagagaggccgccgagctggccagagacctgacctgccccaccggcgccagcgccgagctggccagactgctggaggacagactgctgaccagacagctgctggcccagcagggcggcgtggccgtgcccgccaccctggccttcacctacaagccccccggcctgctgagaggcggcgacgccagcctgggcctgagactggtggagctgagcggcaaggagggccaggagaccctggtgaaggaggaggtggaggccttcctgagaagcgaggccctgggcgacatcctgcaggtggccgtgaagctgagcggctggagatggagaggcagacaggcctggagactgcaccccagagccgagctgggcgccgtggtggacaccgtgctggccctgctggagaagctggaggaggaggagagcgtgctggtggaggccgtgtacccccccgcccagctgccctgcagcgacggccccagccccggccccggcctggccgtgagaatctgcgccgtggtgtgcagaacccagggcgacagacccctgctgagcaaggtggtgtgcggcgtgggcagaggcgacagacccctgagacaccacaacagcctgcccagaaccctggaggtggccctggcccagtgcggcctgggcgaggaggcccaggtggccgccgtgagacagagagtgaaggccgccgccgaggccgccctggccgccgtgctggccctggaggccggcctgagcgccgagcagagaggcggcagaagagcccacaccgacttcctgggcgtggacttcgccctgaccgccgccggcggcgtgctgacccccgtggccctggagctgaacggcggcctgtgcctggaggcctgcggcgccctggagggcctgtgggccgcccccagactgggccccgccgccgacgaggccgtggccgcccccctggtggagaccatgctgagaagaagcgccagatgcctgatggagggcaagcagctgctggtggtgggcgccggcggcgtgagcaagaagttcgtgtgggaggccgccagagactacggcctgcagctgcacctggtggagagcgaccccaaccacttcgccagccagctggtgcagaccttcatccacttcgacatgaccgagcacagaagagacgaggagaacgccagactgctggccgagctggtgagagccagaggcctgaagctggacggctgcttcagctactgggacgactgcctggtgctgaccgccctgctgtgccaggagctgggcctgccctgcagcagccccgccgccatgagactggccaagcagaagagcctgacccagctgcacctgctgcaccaccacggccccccctggcccgcccccagcctgcacgccgtgccctgctgccccctggagagcgaggccgacgtggagagagccgtgcaccaggtgcccctgcccggcgtgatgaagctggagttcggcgccggcgccgtgggcgtgagactggtggaggacgccccccagtgccacgagcacttcagcagaatcaccagagacctgcagggcgaggccgaccaccccggcatcggcctgggctggggcaacgccatgctgctgatggagttcgtggagggcaccgagcacgacgtggacctggtgctgttcggcggcagactgctggccgccttcgtgagcgacaacggccccaccagactgcccggcttcaccgagaccgccgcctgcatgcccaccggcctggcccccgagcaggaggcccagatggtgcaggccgccttcagatgctgcctgggctgcggcctgctggacggcgtgttcaacgtggagctgaagctgaccggcgccggccccagactgatcgagatcaaccccagaatgggcggcttctacctgagagactggatcctggagctgtacggcgtggacctgctgctggccgccgtgatggtggcctgcggcctgagacccgccctgcccaccagacccagagccagaggccacctggtgggcgtgatgtgcctggtgagccagcacctgcaggccctgagcagcaccgccagcagagagaccctgcaggccctgcacgacagaggcctgctgagactgaacctgctggaggaggccctggtgcccggcgagtacgaggagccctactgcagcgtggcctgcgccggccccagccccaccgaggccagactgagactgctgggcctgtgccagggcctgggcatcgacggccccagctaccccgtggcccacttcctgagccacttcaagtag

SEQ ID NO: 75521 - DNA, 2775 bp, synthetic construct
  misc_feature 1..2775: note = Description of Artificial Sequence: Synthetic coding sequence
  source 1..2775: mol_type = other DNA
atgctgagcctggaccccagcggccccgagtgggactgccccctgggcagcaaggacctggaggaggagggcccctggggcggcggcagcggcctgccccccaccggctgcttccccggcagctggagacaggacgtgggcctggactgcaagggcagccccgagggcgccgaggccagagcctggaccgtgtactactacagcctgctgcagagctgcctgcagcaggccggcctgcccgagacccaggacagaggccaggtgcccagaaccggctgccccggcgccgaggtgaccctgtgcgtgctgggcagccccagcaccttcctgcccgtgctgctggagggcggcgtgcagagccccggcaacatgctgctgtgcctgagccccgcctggctgatgaaggtgcccgcccccggccagcccggcgaggccgccctgctggtgagcaaggccgtgagcttccaccccggcggcctgaccttcctggacgacttcgtgccccccagaagagccacctacttcctggccggcctgggcctgggccccggcagaggcagagaggccgccgagctggccagagacctgacctgccccaccggcgccagcgccgagctggccagactgctggaggacagactgctgaccagacagctgctggcccagcagggcggcgtggccgtgcccgccaccctggccttcacctacaagccccccggcctgctgagaggcggcgacgccagcctgggcctgagactggtggagctgagcggcaaggagggccaggagaccctggtgaaggaggaggtggaggccttcctgagaagcgaggccctgggcgacatcctgcaggtggccgtgaagctgagcggctggagatggagaggcagacaggcctggagactgcaccccagagccgagctgggcgccgtggtggacaccgtgctggccctgctggagaagctggaggaggaggagagcgtgctggtggaggccgtgtacccccccgcccagctgccctgcagcgacggccccagccccggccccggcctggccgtgagaatctgcgccgtggtgtgcagaacccagggcgacagacccctgctgagcaaggtggtgtgcggcgtgggcagaggcgacagacccctgagacaccacaacagcctgcccagaaccctggaggccgccctggccgccgtgctggccctggaggccggcctgagcgccgagcagagaggcggcagaagagcccacaccgacttcctgggcgtggacttcgccctgaccgccgccggcggcgtgctgacccccgtggccctggagctgaacggcggcctgtgcctggaggcctgcggcgccctggagggcctgtgggccgcccccagactgggccccgccgccgacgaggccgtggccgcccccctggtggagaccatgctgagaagaagcgccagatgcctgatggagggcaagcagctgctggtggtgggcgccggcggcgtgagcaagaagttcgtgtgggaggccgccagagactacggcctgcagctgcacctggtggagagcgaccccaaccacttcgccagccagctggtgcagaccttcatccacttcgacatgaccgagcacagaagagacgaggagaacgccagactgctggccgagctggtgagagccagaggcctgaagctggacggctgcttcagctactgggacgactgcctggtgctgaccgccctgctgtgccaggagctgggcctgccctgcagcagccccgccgccatgagactggccaagcagaagagcctgacccagctgcacctgctgcaccaccacggccccccctggcccgcccccagcctgcacgccgtgccctgctgccccctggagagcgaggccgacgtggagagagccgtgcaccaggtgcccctgcccggcgtgatgaagctggagttcggcgccggcgccgtgggcgtgagactggtggaggacgccccccagtgccacgagcacttcagcagaatcaccagagacctgcagggcgaggccgaccaccccggcatcggcctgggctggggcaacgccatgctgctgatggagttcgtggagggcaccgagcacgacgtggacctggtgctgttcggcggcagactgctggccgccttcgtgagcgacaacggccccaccagactgcccggcttcaccgagaccgccgcctgcatgcccaccggcctggcccccgagcaggaggcccagatggtgcaggccgccttcagatgctgcctgggctgcggcctgctggacggcgtgttcaacgtggagctgaagctgaccggcgccggccccagactgatcgagatcaaccccagaatgggcggcttctacctgagagactggatcctggagctgtacggcgtggacctgctgctggccgccgtgatggtggcctgcggcctgagacccgccctgcccaccagacccagagccagaggccacctggtgggcgtgatgtgcctggtgagccagcacctgcaggccctgagcagcaccgccagcagagagaccctgcaggccctgcacgacagaggcctgctgagactgaacctgctggaggaggccctggtgcccggcgagtacgaggagccctactgcagcgtggcctgcgccggccccagccccaccgaggccagactgagactgctgggcctgtgccagggcctgggcatcgacggccccagctaccccgtggcccacttcctgagccacttcaagtag

SEQ ID NO: 75522 - DNA, 903 bp, synthetic construct
  misc_feature 1..903: note = Description of Artificial Sequence: Synthetic coding sequence
  source 1..903: mol_type = other DNA
atgtgccccctggcccaccccgcccaggacctgcccctgctgcccagccagctgagcctggaccccagcggccccgagtgggactgccccctgggcagcaaggacctggaggaggagggcccctggggcggcggcagcggcctgccccccaccggctgcttccccggcagctggagacaggacgtgggcctggactgcaagggcagccccgagggcgccgaggccagagcctggaccgtgtactactacagcctgctgcagagctgcctgcagcaggccggcctgcccgagacccaggacagaggccaggtgcccagaaccggctgccccggcgccgaggtgaccctgtgcgtgctgggcagccccagcaccttcctgcccgtgctgctggagggcggcgtgcagagccccggcaacatgctgctgtgcctgagccccgcctggctgatgaaggtgcccgcccccggccagcccggcgaggccgccctgctggtgagcaaggccgtgagcttccaccccggcggcctgaccttcctggacgacttcgtgccccccagaagagccacctacttcctggccggcctgggcctgggccccggcagaggcagagaggccgccgagctggccagagacctgacctgccccaccggcgccagcgccgagctggccagactgctggaggacagactgctgaccagacagctgctggcccagcagggcggcgtggccgtgcccgccaccctggccttcacctacaagccccccggcctgctgagaggcggcgacgccagcctgggcctgagactggtggagctgagcggcaaggagggccaggagaccctggtgaaggaggagagaacctggctgggccccaagccctggaccaaccccggcaagacctag

SEQ ID NO: 75523 - DNA, 2775 bp, synthetic construct
  misc_feature 1..2775: note = Description of Artificial Sequence: Synthetic coding sequence
  source 1..2775: mol_type = other DNA
atgctgagcctggaccccagcggccccgagtgggactgccccctgggcagcaaggacctggaggaggagggcccctggggcggcggcagcggcctgccccccaccggctgcttccccggcagctggagacaggacgtgggcctggactgcaagggcagccccgagggcgccgaggccagagcctggaccgtgtactactacagcctgctgcagagctgcctgcagcaggccggcctgcccgagacccaggacagaggccaggtgcccagaaccggctgccccggcgccgaggtgaccctgtgcgtgctgggcagccccagcaccttcctgcccgtgctgctggagggcggcgtgcagagccccggcaacatgctgctgtgcctgagccccgcctggctgatgaaggtgcccgcccccggccagcccggcgaggccgccctgctggtgagcaaggccgtgagcttccaccccggcggcctgaccttcctggacgacttcgtgccccccagaagagccacctacttcctggccggcctgggcctgggccccggcagaggcagagaggccgccgagctggccagagacctgacctgccccaccggcgccagcgccgagctggccagactgctggaggacagactgctgaccagacagctgctggcccagcagggcggcgtggccgtgcccgccaccctggccttcacctacaagccccccggcctgctgagaggcggcgacgccagcctgggcctgagactggtggagctgagcggcaaggagggccaggagaccctggtgaaggaggaggtggaggccttcctgagaagcgaggccctgggcgacatcctgcaggtggccgtgaagctgagcggctggagatggagaggcagacaggcctggagactgcaccccagagccgagctgggcgccgtggtggacaccgtgctggccctgctggagaagctggaggaggaggagagcgtgctggtggaggccgtgtacccccccgcccagctgccctgcagcgacggccccagccccggccccggcctggccgtgagaatctgcgccgtggtgtgcagaacccagggcgacagacccctgctgagcaaggtggtgtgcggcgtgggcagaggcgacagacccctgagacaccacaacagcctgcccagaaccctggaggtggccctggccgccgtgctggccctggaggccggcctgagcgccgagcagagaggcggcagaagagcccacaccgacttcctgggcgtggacttcgccctgaccgccgccggcggcgtgctgacccccgtggccctggagctgaacggcggcctgtgcctggaggcctgcggcgccctggagggcctgtgggccgcccccagactgggccccgccgccgacgaggccgtggccgcccccctggtggagaccatgctgagaagaagcgccagatgcctgatggagggcaagcagctgctggtggtgggcgccggcggcgtgagcaagaagttcgtgtgggaggccgccagagactacggcctgcagctgcacctggtggagagcgaccccaaccacttcgccagccagctggtgcagaccttcatccacttcgacatgaccgagcacagaagagacgaggagaacgccagactgctggccgagctggtgagagccagaggcctgaagctggacggctgcttcagctactgggacgactgcctggtgctgaccgccctgctgtgccaggagctgggcctgccctgcagcagccccgccgccatgagactggccaagcagaagagcctgacccagctgcacctgctgcaccaccacggccccccctggcccgcccccagcctgcacgccgtgccctgctgccccctggagagcgaggccgacgtggagagagccgtgcaccaggtgcccctgcccggcgtgatgaagctggagttcggcgccggcgccgtgggcgtgagactggtggaggacgccccccagtgccacgagcacttcagcagaatcaccagagacctgcagggcgaggccgaccaccccggcatcggcctgggctggggcaacgccatgctgctgatggagttcgtggagggcaccgagcacgacgtggacctggtgctgttcggcggcagactgctggccgccttcgtgagcgacaacggccccaccagactgcccggcttcaccgagaccgccgcctgcatgcccaccggcctggcccccgagcaggaggcccagatggtgcaggccgccttcagatgctgcctgggctgcggcctgctggacggcgtgttcaacgtggagctgaagctgaccggcgccggccccagactgatcgagatcaaccccagaatgggcggcttctacctgagagactggatcctggagctgtacggcgtggacctgctgctggccgccgtgatggtggcctgcggcctgagacccgccctgcccaccagacccagagccagaggccacctggtgggcgtgatgtgcctggtgagccagcacctgcaggccctgagcagcaccgccagcagagagaccctgcaggccctgcacgacagaggcctgctgagactgaacctgctggaggaggccctggtgcccggcgagtacgaggagccctactgcagcgtggcctgcgccggccccagccccaccgaggccagactgagactgctgggcctgtgccagggcctgggcatcgacggccccagctaccccgtggcccacttcctgagccacttcaagtag

SEQ ID NO: 75524 - DNA, 1206 bp, synthetic construct
  misc_feature 1..1206: note = Description of Artificial Sequence: Synthetic coding sequence
  source 1..1206: mol_type = other DNA
atggagcccggcagaagaggcgccgccgccctgctggccctgctgtgcgtggcctgcgccctgagagccggcagagcccagtacgagagatacagcttcagaagcttccccagagacgagctgatgcccctggagagcgcctacagacacgccctggacaagtacagcggcgagcactgggccgagagcgtgggctacctggagatcagcctgagactgcacagactgctgagagacagcgaggccttctgccacagaaactgcagcgccgccccccagcccgagcccgccgccggcctggccagctaccccgagctgagactgttcggcggcctgctgagaagagcccactgcctgaagagatgcaagcagggcctgcccgccttcagacagagccagcccagcagagaggtgctggccgacttccagagaagagagccctacaagttcctgcagttcgcctacttcaaggccaacaacctgcccaaggccatcgccgccgcccacaccttcctgctgaagcaccccgacgacgagatgatgaagagaaacatggcctactacaagagcctgcccggcgccgaggactacatcaaggacctggagaccaagagctacgagagcctgttcatcagagccgtgagagcctacaacggcgagaactggagaaccagcatcaccgacatggagctggccctgcccgacttcttcaaggccttctacgagtgcctggccgcctgcgagggcagcagagagatcaaggacttcaaggacttctacctgagcatcgccgaccactacgtggaggtgctggagtgcaagatccagtgcgaggagaacctgacccccgtgatcggcggctaccccgtggagaagttcgtggccaccatgtaccactacctgcagttcgcctactacaagctgaacgacctgaagaacgccgccccctgcgccgtgagctacctgctgttcgaccagaacgacaaggtgatgcagcagaacctggtgtactaccagtaccacagagacacctggggcctgagcgacgagcacttccagcccagacccgaggccgtgcagttcttcaacgtgaccaccctgcagaaggagctgtacgacttcgccaaggagaacatcatggacgacgacgagggcgaggtggtggagtacgtggacgacctgctggagctggaggagaccagctag

SEQ ID NO: 75525 - DNA, 789 bp, synthetic construct
  misc_feature 1..789: note = Description of Artificial Sequence: Synthetic coding sequence
  source 1..789: mol_type = other DNA
atggagcccggcagaagaggcgccgccgccctgctggccctgctgtgcgtggcctgcgccctgagagccggcagagcccagtacgagagatacagcttcagaagcttccccagagacgagctgatgcccctggagagcgcctacagacacgccctggacaagtacagcggcgagcactgggccgagagcgtgggctacctggagatcagcctgagactgcacagactgctgagagacagcgaggccttctgccacagaaactgcagcgccgccccccagcccgagcccgccgccggcctggccagctaccccgagctgagactgttcggcggcctgctgagaagagcccactgcctgaagagatgcaagcagggcctgcccgccttcagacagagccagcccagcagagaggtgctggccgacttccagagaagagagccctacaagttcctgcagttcgcctacttcaaggccaacaacctgcccaaggccatcgccgccgcccacaccttcctgctgaagcaccccgacgacgagatgatgaagagaaacatggcctactacaagagcctgcccggcgccgaggactacctgaagacctggaagcccagccacatgaaggcctgcagcagcgagcagtgcggccacaccaccgtgagaaccggcgagcaccccagccagacctggagctggcccttccccaccagcagcaagcccttcaccagcgtgagccagcccgccagagtgcccggcagaagcagaaccagcagaatcagcaccttcccctag

SEQ ID NO: 75526 - DNA, 789 bp, synthetic construct
  misc_feature 1..789: note = Description of Artificial Sequence: Synthetic coding sequence
  source 1..789: mol_type = other DNA
atggagcccggcagaagaggcgccgccgccctgctggccctgctgtgcgtggcctgcgccctgagagccggcagagcccagtacgagagatacagcttcagaagcttccccagagacgagctgatgcccctggagagcgcctacagacacgccctggacaagtacagcggcgagcactgggccgagagcgtgggctacctggagatcagcctgagactgcacagactgctgagagacagcgaggccttctgccacagaaactgcagcgccgccccccagcccgagcccgccgccggcctggccagctaccccgagctgagactgttcggcggcctgctgagaagagcccactgcctgaagagatgcaagcagggcctgcccgccttcagacagagccagcccagcagagaggtgctggccgacttccagagaagagagccctacaagttcctgcagttcgcctacttcaaggccaacaacctgcccaaggccatcgccgccgcccacaccttcctgctgaagcaccccgacgacgagatgatgaagagaaacatggcctactacaagagcctgcccggcgccgaggactacatcaaggacctggagaccaagagctacgagagcctgttcatcgagcagtgcggccacaccaccgtgagaaccggcgagcaccccagccagacctggagctggcccttccccaccagcagcaagcccttcaccagcgtgagccagcccgccagagtgcccggcagaagcagaaccagcagaatcagcaccttcccctag

SEQ ID NO: 75527 - DNA, 1167 bp, synthetic construct
  misc_feature 1..1167: note = Description of Artificial Sequence: Synthetic coding sequence
  source 1..1167: mol_type = other DNA
atggagcccggcagaagaggcgccgccgccctgctggccctgctgtgcgtggcctgcgccctgagagccggcagagcccagtacgagagatacagcttcagaagcttccccagagacgagctgatgcccctggagagcgcctacagacacgccctggacaagtacagcggcgagcactgggccgagagcgtgagagacagcgaggccttctgccacagaaactgcagcgccgccccccagcccgagcccgccgccggcctggccagctaccccgagctgagactgttcggcggcctgctgagaagagcccactgcctgaagagatgcaagcagggcctgcccgccttcagacagagccagcccagcagagaggtgctggccgacttccagagaagagagccctacaagttcctgcagttcgcctacttcaaggccaacaacctgcccaaggccatcgccgccgcccacaccttcctgctgaagcaccccgacgacgagatgatgaagagaaacatggcctactacaagagcctgcccggcgccgaggactacatcaaggacctggagaccaagagctacgagagcctgttcatcagagccgtgagagcctacaacggcgagaactggagaaccagcatcaccgacatggagctggccctgcccgacttcttcaaggccttctacgagtgcctggccgcctgcgagggcagcagagagatcaaggacttcaaggacttctacctgagcatcgccgaccactacgtggaggtgctggagtgcaagatccagtgcgaggagaacctgacccccgtgatcggcggctaccccgtggagaagttcgtggccaccatgtaccactacctgcagttcgcctactacaagctgaacgacctgaagaacgccgccccctgcgccgtgagctacctgctgttcgaccagaacgacaaggtgatgcagcagaacctggtgtactaccagtaccacagagacacctggggcctgagcgacgagcacttccagcccagacccgaggccgtgcagttcttcaacgtgaccaccctgcagaaggagctgtacgacttcgccaaggagaacatcatggacgacgacgagggcgaggtggtggagtacgtggacgacctgctggagctggaggagaccagctag

SEQ ID NO: 75528 - DNA, 3471 bp, synthetic construct
  misc_feature 1..3471: note = Description of Artificial Sequence: Synthetic coding sequence
  source 1..3471: mol_type = other DNA
atggccagcctgctgcccctgctgtgcctgtgcgtggtggccgcccacctggccggcgccagagacgccacccccaccgaggagcccatggccaccgccctgggcctggagagaagaagcgtgtacaccggccagcccagccccgccctggaggactgggaggaggccagcgagtggaccagctggttcaacgtggaccaccccggcggcgacggcgacttcgagagcctggccgccatcagattctactacggccccgccagagtgtgccccagacccctggccctggaggccagaaccaccgactgggccctgcccagcgccgtgggcgagagagtgcacctgaaccccaccagaggcttctggtgcctgaacagagagcagcccagaggcagaagatgcagcaactaccacgtgagattcagatgccccctggaggccagctggggcgcctggggcccctggggcccctgcagcggcagctgcggccccggcagaagactgagaagaagacactgccccagccccgccggcgacgcctgccccggcagacccctggaggcccagaagtgcgtgagacccagatgccccggctgcagcctggacacctgcgagtgccccgaccacatcctgctgggcagcgtggtgacccccagcggccagcccctgctgggcgccagagtgagcctgagagaccagcccggcaccgtggccaccagcgacgcccacggcaccttcagagtgcccggcgtgtgcgccgacagcagagccaacatcagagcccagatggacggcttcagcgccggcgaggcccaggcccaggccaacggcagcatcagcgtggtgaccatcatcctggacaagctggagaagccctacctggtgaagcaccccgagagcagagtgagagaggccggccagaacgtgaccttctgctgcaaggccagcggcacccccatgcccaagaagtacagctggttccacaacggcaccctgctggacagaagagcccacggctacggcgcccacctggagctgagaggcctgagacccgaccaggccggcatctaccactgcaaggcctggaacgaggccggcgccgtgagaagcggcaccgccagactgaccgtgctggcccccggccagcccgcctgcgaccccagacccagagagtacctgatcaagctgcccgaggactgcggccagcccggcagcggccccgcctacctggacgtgggcctgtgccccgacaccagatgccccagcctggccggcagcagccccagatgcggcgacgccagcagcagatgctgcagcgtgagaagactggagagaagagagatccactgccccggctacgtgctgcccgtgaaggtggtggccgagtgcggctgccagaagtgcctgccccccagaggcctggtgagaggcagagtggtggccgccgacagcggcgagcccctgagattcgccagaatcctgctgggccaggagcccatcggcttcaccgcctaccagggcgacttcaccatcgaggtgccccccagcacccagagactggtggtgaccttcgtggaccccagcggcgagttcatggacgccgtgagagtgctgcccttcgaccccagaggcgccggcgtgtaccacgaggtgaaggccatgagaaagaaggcccccgtgatcctgcacaccagccagagcaacaccatccccctgggcgagctggaggacgaggcccccctgggcgagctggtgctgcccagcggcgccttcagaagagccgacggcaagccctacagcggccccgtggaggccagagtgaccttcgtggaccccagagacctgaccagcgccgccagcgcccccagcgacctgagattcgtggacagcgacggcgagctggcccccctgagaacctacggcatgttcagcgtggacctgagagcccccggcagcgccgagcagctgcaggtgggccccgtggccgtgagagtggccgccagccagatccacatgcccggccacgtggaggccctgaagctgtggagcctgaaccccgagaccggcctgtgggaggaggagagcggcttcagaagagagggcagcagcggccccagagtgagaagagaggagagagtgttcctggtgggcaacgtggagatcagagagagaagactgttcaacctggacgtgcccgagagaagaagatgcttcgtgaaggtgagagcctacgccaacgacaagttcacccccagcgagcaggtggagggcgtggtggtgaccctggtgaacctggagcccgcccccggcttcagcgccaaccccagagcctggggcagattcgacagcgccgtgaccggccccaacggcgcctgcctgcccgccttctgcgacgccgacagacccgacgcctacaccgccctggtgaccgccaccctgggcggcgaggagctggagcccgcccccagcctgcccagacccctgcccgccaccgtgggcgtgacccagccctacctggacagactgggctacagaagaaccgaccacgacgaccccgccttcaagagaaacggcttcagaatcaacctggccaagcccagacccggcgaccccgccgaggccaacggccccgtgtacccctggagaagcctgagagagtgccagggcgcccccgtgaccgccagccacttcagattcgccagagtggaggccgacaagtacgagtacaacgtggtgcccttcagagagggcacccccgccagctggaccggcgacctgctggcctggtggcccaacccccaggagttcagagcctgcttcctgaaggtgaagatccagggcccccaggagtacatggtgagaagccacaacgccggcggcagccaccccagaaccagaggccagctgtacggcctgagagacgccagaagcgtgagagaccccgagagacccggcaccagcgccgcctgcgtggagttcaagtgcagcggcatgctgttcgaccagagacaggtggacagaaccctggtgaccatcatgccccagggcagctgcagaagagtggccgtgaacggcctgctgagagactacctgaccagacaccccccccccgtgcccgccgaggaccccgccgccttcagcatgctggcccccctggaccccctgggccacaactacggcgtgtacaccgtgaccgaccagagccccagactggccaaggagatcgccatcggcagatgcttcgacggcagcagcgacggcttcagcagagagatgaaggccgacgccggcaccgccgtgaccttccagtgcagagagccccccgccggcagacccagcctgttccagagactgctggagagccccgccaccgccctgggcgacatcagaagagagatgagcgaggccgcccaggcccaggccagagccagcggccccctgagaaccagaagaggcagagtgagacagtag

SEQ ID NO: 75529 - DNA, 3555 bp, synthetic construct
  misc_feature 1..3555: note = Description of Artificial Sequence: Synthetic coding sequence
  source 1..3555: mol_type = other DNA
atggtgggcaccaaggcctgggtgttcagcttcctggtgctggaggtgaccagcgtgctgggcagacagaccatgctgacccagagcgtgagaagagtgcagcccggcaagaagaaccccagcatcttcgccaagcccgccgacaccctggagagccccggcgagtggaccacctggttcaacatcgactaccccggcggcaagggcgactacgagagactggacgccatcagattctactacggcgacagagtgtgcgccagacccctgagactggaggccagaaccaccgactggacccccgccggcagcaccggccaggtggtgcacggcagccccagagagggcttctggtgcctgaacagagagcagagacccggccagaactgcagcaactacaccgtgagattcctgtgcccccccggcagcctgagaagagacaccgagagaatctggagcccctggagcccctggagcaagtgcagcgccgcctgcggccagaccggcgtgcagaccagaaccagaatctgcctggccgagatggtgagcctgtgcagcgaggccagcgaggagggccagcactgcatgggccaggactgcaccgcctgcgacctgacctgccccatgggccaggtgaacgccgactgcgacgcctgcatgtgccaggacttcatgctgcacggcgccgtgagcctgcccggcggcgcccccgccagcggcgccgccatctacctgctgaccaagacccccaagctgctgacccagaccgacagcgacggcagattcagaatccccggcctgtgccccgacggcaagagcatcctgaagatcaccaaggtgaagttcgcccccatcgtgctgaccatgcccaagaccagcctgaaggccgccaccatcaaggccgagttcgtgagagccgagaccccctacatggtgatgaaccccgagaccaaggccagaagagccggccagagcgtgagcctgtgctgcaaggccaccggcaagcccagacccgacaagtacttctggtaccacaacgacaccctgctggaccccagcctgtacaagcacgagagcaagctggtgctgagaaagctgcagcagcaccaggccggcgagtacttctgcaaggcccagagcgacgccggcgccgtgaagagcaaggtggcccagctgatcgtgatcgccagcgacgagaccccctgcaaccccgtgcccgagagctacctgatcagactgccccacgactgcttccagaacgccaccaacagcttctactacgacgtgggcagatgccccgtgaagacctgcgccggccagcaggacaacggcatcagatgcagagacgccgtgcagaactgctgcggcatcagcaagaccgaggagagagagatccagtgcagcggctacaccctgcccaccaaggtggccaaggagtgcagctgccagagatgcaccgagaccagaagcatcgtgagaggcagagtgagcgccgccgacaacggcgagcccatgagattcggccacgtgtacatgggcaacagcagagtgagcatgaccggctacaagggcaccttcaccctgcacgtgccccaggacaccgagagactggtgctgaccttcgtggacagactgcagaagttcgtgaacaccaccaaggtgctgcccttcaacaagaagggcagcgccgtgttccacgagatcaagatgctgagaagaaagaagcccatcaccctggaggccatggagaccaacatcatccccctgggcgaggtggtgggcgaggaccccatggccgagctggagatccccagcagaagcttctacagacagaacggcgagccctacatcggcaaggtgaaggccagcgtgaccttcctggaccccagaaacatcagcaccgccaccgccgcccagaccgacctgaacttcatcaacgacgagggcgacaccttccccctgagaacctacggcatgttcagcgtggacttcagagacgaggtgaccagcgagcccctgaacgccggcaaggtgaaggtgcacctggacagcacccaggtgaagatgcccgagcacatcagcaccgtgaagctgtggagcctgaaccccgacaccggcctgtgggaggaggagggcgacttcaagttcgagaaccagagaagaaacaagagagaggacagaaccttcctggtgggcaacctggagatcagagagagaagactgttcaacctggacgtgcccgagagcagaagatgcttcgtgaaggtgagagcctacagaagcgagagattcctgcccagcgagcagatccagggcgtggtgatcagcgtgatcaacctggagcccagaaccggcttcctgagcaaccccagagcctggggcagattcgacagcgtgatcaccggccccaacggcgcctgcgtgcccgccttctgcgacgaccagagccccgacgcctacagcgcctacgtgctggccagcctggccggcgaggagctgcaggccgtggagagcagccccaagttcaaccccaacgccatcggcgtgccccagccctacctgaacaagctgaactacagaagaaccgaccacgaggaccccagagtgaagaagaccgccttccagatcagcatggccaagcccagacccaacagcgccgaggagagcaacggccccatctacgccttcgagaacctgagagcctgcgaggaggccccccccagcgccgcccacttcagattctaccagatcgagggcgacagatacgactacaacaccgtgcccttcaacgaggacgaccccatgagctggaccgaggactacctggcctggtggcccaagcccatggagttcagagcctgctacatcaaggtgaagatcgtgggccccctggaggtgaacgtgagaagcagaaacatgggcggcacccacagacagaccgtgggcaagctgtacggcatcagagacgtgagaagcaccagagacagagaccagcccaacgtgagcgccgcctgcctggagttcaagtgcagcggcatgctgtacgaccaggacagagtggacagaaccctggtgaaggtgatcccccagggcagctgcagaagagccagcgtgaaccccatgctgcacgagtacctggtgaaccacctgcccctggccgtgaacaacgacaccagcgagtacaccatgctggcccccctggaccccctgggccacaactacggcatctacaccgtgaccgaccaggaccccagaaccgccaaggagatcgccctgggcagatgcttcgacggcaccagcgacggcagcagcagaatcatgaagagcaacgtgggcgtggccctgaccttcaactgcgtggagagacaggtgggcagacagagcgccttccagtacctgcagagcacccccgcccagagccccgccgccggcaccgtgcagggcagagtgcccagcagaagacagcagagagccagcagaggcggccagagacagggcggcgtggtggccagcctgagattccccagagtggcccagcagcccctgatcaactag

SEQ ID NO: 75530 - DNA, 8148 bp, synthetic construct
  misc_feature 1..8148: note = Description of Artificial Sequence: Synthetic coding sequence
  source 1..8148: mol_type = other DNA
atggccgccgccgccggcggcggcagctgccccggccccggcagcgccagaggcagattccccggcagacccagaggcgccggcggcggcggcggcagaggcggcagaggcaacggcgccgagagagtgagagtggccctgagaagaggcggcggcgccaccggccccggcggcgccgagcccggcgaggacaccgccctgctgagactgctgggcctgagaagaggcctgagaagactgagaagactgtgggccggccccagagtgcagagaggcagaggcagaggcagaggcagaggctggggccccagcagaggctgcgtgcccgaggaggagagcagcgacggcgagagcgacgaggaggagttccagggcttccacagcgacgaggacgtggcccccagcagcctgagaagcgccctgagaagccagagaggcagagcccccagaggcagaggcagaaagcacaagaccacccccctgcccccccccagactggccgacgtggcccccaccccccccaagacccccgccagaaagagaggcgaggagggcaccgagagaatggtgcaggccctgaccgagctgctgagaagagcccaggccccccaggcccccagaagcagagcctgcgagcccagcacccccagaagaagcagaggcagaccccccggcagacccgccggcccctgcagaagaaagcagcaggccgtggtggtggccgaggccgccgtgaccatccccaagcccgagccccccccccccgtggtgcccgtgaagcaccagaccggcagctggaagtgcaaggagggccccggccccggccccggcacccccagaagaggcggccagagcagcagaggcggcagaggcggcagaggcagaggcagaggcggcggcctgcccttcgtgatcaagttcgtgagcagagccaagaaggtgaagatgggccagctgagcctgggcctggagagcggccagggccagggccagcacgaggagagctggcaggacgtgccccagagaagagtgggcagcggccagggcggcagcccctgctggaagaagcaggagcagaagctggacgacgaggaggaggagaagaaggaggaggaggagaaggacaaggagggcgaggagaaggaggagagagccgtggccgaggagatgatgcccgccgccgagaaggaggaggccaagctgccccccccccccctgaccccccccgcccccagcccccccccccccctgcccccccccagcaccagcccccccccccccctgtgcccccccccccccccccccgtgagccccccccccctgcccagccccccccccccccccgcccaggaggagcaggaggagagccccccccccgtggtgcccgccacctgcagcagaaagagaggcagaccccccctgacccccagccagagagccgagagagaggccgccagagccggccccgagggcaccagcccccccacccccacccccagcaccgccaccggcggcccccccgaggacagccccaccgtggcccccaagagcaccaccttcctgaagaacatcagacagttcatcatgcccgtggtgagcgccagaagcagcagagtgatcaagacccccagaagattcatggacgaggacccccccaagccccccaaggtggaggtgagccccgtgctgagaccccccatcaccaccagcccccccgtgccccaggagcccgcccccgtgcccagcccccccagagcccccaccccccccagcacccccgtgcccctgcccgagaagagaagaagcatcctgagagagcccaccttcagatggaccagcctgaccagagagctgcccccccccccccccgcccccccccccccccccgcccccagccccccccccgcccccgccaccagcagcagaagacccctgctgctgagagccccccagttcacccccagcgaggcccacctgaagatctacgagagcgtgctgacccccccccccctgggcgcccccgaggcccccgagcccgagcccccccccgccgacgacagccccgccgagcccgagcccagagccgtgggcagaaccaaccacctgagcctgcccagattcgcccccgtggtgaccacccccgtgaaggccgaggtgagcccccacggcgcccccgccctgagcaacggcccccagacccaggcccagctgctgcagcccctgcaggccctgcagacccagctgctgccccaggccctgccccccccccagccccagctgcagcccccccccagcccccagcagatgccccccctggagaaggccagaatcgccggcgtgggcagcctgcccctgagcggcgtggaggagaagatgttcagcctgctgaagagagccaaggtgcagctgttcaagatcgaccagcagcagcagcagaaggtggccgccagcatgcccctgagccccggcggccagatggaggaggtggccggcgccgtgaagcagatcagcgacagaggccccgtgagaagcgaggacgagagcgtggaggccaagagagagagacccagcggccccgagagccccgtgcagggccccagaatcaagcacgtgtgcagacacgccgccgtggccctgggccaggccagagccatggtgcccgaggacgtgcccagactgagcgccctgcccctgagagacagacaggacctggccaccgaggacaccagcagcgccagcgagaccgagagcgtgcccagcagaagcagaagaggcaaggtggaggccgccggccccggcggcgagagcgagcccaccggcagcggcggcaccctggcccacacccccagaagaagcctgcccagccaccacggcaagaagatgagaatggccagatgcggccactgcagaggctgcctgagagtgcaggactgcggcagctgcgtgaactgcctggacaagcccaagttcggcggccccaacaccaagaagcagtgctgcgtgtacagaaagtgcgacaagatcgaggccagaaagatggagagactggccaagaagggcagaaccatcgtgaagaccctgctgccctgggacagcgacgagagccccgaggccagccccggcccccccggccccagaagaggcgccggcgccggcggccccagagaggaggtggtggcccaccccggccccgaggagcaggacagcctgctgcagagaaagagcgccagaagatgcgtgaagcagagacccagctacgacatcttcgaggacagcgacgacagcgagcccggcggcccccccgcccccagaagaagaacccccagagagaacgagctgcccctgcccgagcccgaggagcagagcagacccagaaagcccaccctgcagcccgtgctgcagctgaaggccagaagaagactggacaaggacgccctggcccccggccccttcgccagcttccccaacggctggaccggcaagcagaagagccccgacggcgtgcacagagtgagagtggacttcaaggaggactgcgacctggagaacgtgtggctgatgggcggcctgagcgtgctgaccagcgtgcccggcggcccccccatggtgtgcctgctgtgcgccagcaagggcctgcacgagctggtgttctgccaggtgtgctgcgaccccttccaccccttctgcctggaggaggccgagagacccctgccccagcaccacgacacctggtgctgcagaagatgcaagttctgccacgtgtgcggcagaaagggcagaggcagcaagcacctgctggagtgcgagagatgcagacacgcctaccaccccgcctgcctgggccccagctaccccaccagagccaccagaaagagaagacactggatctgcagcgcctgcgtgagatgcaagagctgcggcgccacccccggcaagaactgggacgtggagtggagcggcgactacagcctgtgccccagatgcacccagctgtacgagaagggcaactactgccccatctgcaccagatgctacgaggacaacgactacgagagcaagatgatgcagtgcgcccagtgcgaccactgggtgcacgccaagtgcgagggcctgagcgacgaggactacgagatcctgagcggcctgcccgacagcgtgctgtacacctgcggcccctgcgccggcgccgcccagcccagatggagagaggccctgagcggcgccctgcagggcggcctgagacaggtgctgcagggcctgctgagcagcaaggtggtgggccccctgctgctgtgcacccagtgcggccccgacggcaagcagctgcaccccggcccctgcggcctgcaggccgtgagccagagattcgaggacggccactacaagagcgtgcacagcttcatggaggacatggtgggcatcctgatgagacacagcgaggagggcgagacccccgacagaagagccggcggccagatgaagggcctgctgctgaagctgctggagagcgccttcggctggttcgacgcccacgaccccaagtactggagaagaagcaccagactgcccaacggcgtgctgcccaacgccgtgctgccccccagcctggaccacgtgtacgcccagtggagacagcaggagcccgagacccccgagagcggccagccccccggcgaccccagcgccgccttccagggcaaggaccccgccgccttcagccacctggaggaccccagacagtgcgccctgtgcctgaagtacggcgacgccgacagcaaggaggccggcagactgctgtacatcggccagaacgagtggacccacgtgaactgcgccatctggagcgccgaggtgttcgaggagaacgacggcagcctgaagaacgtgcacgccgccgtggccagaggcagacagatgagatgcgagctgtgcctgaagcccggcgccaccgtgggctgctgcctgagcagctgcctgagcaacttccacttcatgtgcgccagagccagctactgcatcttccaggacgacaagaaggtgttctgccagaagcacaccgacctgctggacggcaaggagatcgtgaaccccgacggcttcgacgtgctgagaagagtgtacgtggacttcgagggcatcaacttcaagagaaagttcctgaccggcctggagcccgacgccatcaacgtgctgatcggcagcatcagaatcgacagcctgggcaccctgagcgacctgagcgactgcgagggcagactgttccccatcggctaccagtgcagcagactgtactggagcaccgtggacgccagaagaagatgctggtacagatgcagaatcctggagtacagaccctggggccccagagaggagcccgcccacctggaggccgccgaggagaaccagaccatcgtgcacagccccgcccccagcagcgagccccccggcggcgaggacccccccctggacaccgacgtgctggtgcccggcgcccccgagagacacagccccatccagaacctggacccccccctgagacccgacagcggcagcgcccccccccccgcccccagaagcttcagcggcgccagaatcaaggtgcccaactacagccccagcagaagacccctgggcggcgtgagcttcggccccctgcccagccccggcagccccagcagcctgacccaccacatccccaccgtgggcgaccccgacttccccgccccccccagaagaagcagaagacccagccccctggcccccagacccccccccagcagatgggccagcccccccctgaagaccagcccccagctgagagtgcccccccccaccagcgtggtgaccgccctgacccccaccagcggcgagctggccccccccggccccgcccccagcccccccccccccgaggacctgggccccgacttcgaggacatggaggtggtgagcggcctgagcgccgccgacctggacttcgccgccagcctgctgggcaccgagcccttccaggaggagatcgtggccgccggcgccatgggcagcagccacggcggccccggcgacagcagcgaggaggagagcagccccaccagcagatacatccacttccccgtgaccgtggtgagcgcccccggcctggcccccagcgccacccccggcgcccccagaatcgagcagctggacggcgtggacgacggcaccgacagcgaggccgaggccgtgcagcagcccagaggccagggcaccccccccagcggccccggcgtggtgagagccggcgtgctgggcgccgccggcgacagagccagaccccccgaggacctgcccagcgagatcgtggacttcgtgctgaagaacctgggcggccccggcgacggcggcgccggccccagagaggagagcctgccccccgccccccccctggccaacggcagccagcccagccagggcctgaccgccagccccgccgaccccaccagaaccttcgcctggctgcccggcgcccccggcgtgagagtgctgagcctgggccccgcccccgagccccccaagcccgccaccagcaagatcatcctggtgaacaagctgggccaggtgttcgtgaagatggccggcgagggcgagcccgtgcccccccccgtgaagcagccccccctgccccccaccatcagccccaccgcccccaccagctggaccctgccccccggccccctgctgggcgtgctgcccgtggtgggcgtggtgagacccgcccccccccccccccccccccccctgaccctggtgctgagcagcggccccgccagcccccccagacaggccatcagagtgaagagagtgagcaccttcagcggcagaagcccccccgccccccccccctacaaggcccccagactggacgaggacggcgaggccagcgaggacaccccccaggtgcccggcctgggcagcggcggcttcagcagagtgagaatgaagacccccaccgtgagaggcgtgctggacctggacagacccggcgagcccgccggcgaggagagccccggccccctgcaggagagaagccccctgctgcccctgcccgaggacggccccccccaggtgcccgacggcccccccgacctgctgctggagagccagtggcaccactacagcggcgaggccagcagcagcgaggaggagccccccagccccgacgacaaggagaaccaggcccccaagagaaccggcccccacctgagattcgagatcagcagcgaggacggcttcagcgtggaggccgagagcctggagggcgcctggagaaccctgatcgagaaggtgcaggaggccagaggccacgccagactgagacacctgagcttcagcggcatgagcggcgccagactgctgggcatccaccacgacgccgtgatcttcctggccgagcagctgcccggcgcccagagatgccagcactacaagttcagataccaccagcagggcgagggccaggaggagccccccctgaacccccacggcgccgccagagccgaggtgtacctgagaaagtgcaccttcgacatgttcaacttcctggccagccagcacagagtgctgcccgagggcgccacctgcgacgaggaggaggacgaggtgcagctgagaagcaccagaagagccaccagcctggagctgcccatggccatgagattcagacacctgaagaagaccagcaaggaggccgtgggcgtgtacagaagcgccatccacggcagaggcctgttctgcaagagaaacatcgacgccggcgagatggtgatcgagtacagcggcatcgtgatcagaagcgtgctgaccgacaagagagagaagttctacgacggcaagggcatcggctgctacatgttcagaatggacgacttcgacgtggtggacgccaccatgcacggcaacgccgccagattcatcaaccacagctgcgagcccaactgcttcagcagagtgatccacgtggagggccagaagcacatcgtgatcttcgccctgagaagaatcctgagaggcgaggagctgacctacgactacaagttccccatcgaggacgccagcaacaagctgccctgcaactgcggcgccaagagatgcagaagattcctgaactag

SEQ ID NO: 75531 - DNA, 2115 bp, synthetic construct
  misc_feature 1..2115: note = Description of Artificial Sequence: Synthetic coding sequence
  source 1..2115: mol_type = other DNA
atggtgcccgacaccgcctgcgtgctgctgctgaccctggccgccctgggcgccagcggccagggccagagccccctgggcagcgacctgggcccccagatgctgagagagctgcaggagaccaacgccgccctgcaggacgtgagagagctgctgagacagcaggtgagagagatcaccttcctgaagaacaccgtgatggagtgcgacgcctgcggcatgcagcagagcgtgagaaccggcctgcccagcgtgagacccctgctgcactgcgcccccggcttctgcttccccggcgtggcctgcatccagaccgagagcggcgccagatgcggcccctgccccgccggcttcaccggcaacggcagccactgcaccgacgtgaacgagtgcgagaccggccagcacaactgcgtgcccaacagcgtgtgcatcaacaccagaggcagcttccagtgcggcccctgccagcccggcttcgtgggcgaccaggccagcggctgccagagaagagcccagagattctgccccgacggcagccccagcgagtgccacgagcacgccgactgcgtgctggagagagacggcagcagaagctgcgtgtgcgccgtgggctgggccggcaacggcatcctgtgcggcagagacaccgacctggacggcttccccgacgagaagctgagatgccccgagagacagtgcagaaaggacaactgcgtgaccgtgcccaacagcggccaggaggacgtggacagagacggcatcggcgacgcctgcgaccccgacgccgacggcgacggcgtgcccaacgagaaggacaactgccccctggtgagaaaccccgaccagagaaacaccgacgaggacaagtggggcgacgcctgcgacaactgcagaagccagaagaacgacgaccagaaggacaccgaccaggacggcagaggcgacgcctgcgacgacgacatcgacggcgacagaatcagaaaccaggccgacaactgccccagagtgcccaacagcgaccagaaggacagcgacggcgacggcatcggcgacgcctgcgacaactgcccccagaagagcaaccccgaccaggccgacgtggaccacgacttcgtgggcgacgcctgcgacagcgaccaggaccaggacggcgacggccaccaggacagcagagacaactgccccaccgtgcccaacagcgcccaggaggacagcgaccacgacggccagggcgacgcctgcgacgacgacgacgacaacgacggcgtgcccgacagcagagacaactgcagactggtgcccaaccccggccaggaggacgccgacagagacggcgtgggcgacgtgtgccaggacgacttcgacgccgacaaggtggtggacaagatcgacgtgtgccccgagaacgccgaggtgaccctgaccgacttcagagccttccagaccgtggtgctggaccccgagggcgacgcccagatcgaccccaactgggtggtgctgaaccagggcagagagatcgtgcagaccatgaacagcgaccccggcctggccgtgggctacaccgccttcaacggcgtggacttcgagggcaccttccacgtgaacaccgtgaccgacgacgactacgccggcttcatcttcggctaccaggacagcagcagcttctacgtggtgatgtggaagcagatggagcagacctactggcaggccaaccccttcagagccgtggccgagcccggcatccagctgaaggccgtgaagagcagcaccggccccggcgagcagctgagaaacgccctgtggcacaccggcgacaccgagagccaggtgagactgctgtggaaggaccccagaaacgtgggctggaaggacaagaagagctacagatggttcctgcagcacagaccccaggtgggctacatcagagtgagattctacgagggccccgagctggtggccgacagcaacgtggtgctggacaccaccatgagaggcggcagactgggcgtgttctgcttcagccaggagaacatcatctgggccaacctgagatacagatgcaacgacaccatccccgaggactacgagacccaccagctgagacaggcctag

SEQ ID NO: 75532 - DNA, 2235 bp, synthetic construct
  misc_feature 1..2235: note = Description of Artificial Sequence: Synthetic coding sequence
  source 1..2235: mol_type = other DNA
atggtgcccgacaccgcctgcgtgctgctgctgaccctggccgccctgggcgccagcggccagggccagagccccctgggcagcgacctgggcccccagatgctgagagagctgcaggagaccaacgccgccctgcaggacgtgagagagctgctgagacagcaggtgagagagatcaccttcctgaagaacaccgtgatggagtgcgacgcctgcggcatgcagcagagcgtgagaaccggcctgcccagcgtgagacccctgctgcactgcgcccccggcttctgcttccccggcccctgccccgccggcttcaccggcaacggcagccactgcaccgacgtgaacgagtgcaacgcccacccctgcttccccagagtgagatgcatcaacaccagccccggcttcagatgcgaggcctgcccccccggctacagcggccccacccaccagggcgtgggcctggccttcgccaaggccaacaagcaggtgtgcaccgacatcaacgagtgcgagaccggccagcacaactgcgtgcccaacagcgtgtgcatcaacaccagaggcagcttccagtgcggcccctgccagcccggcttcgtgggcgaccaggccagcggctgccagagaagagcccagagattctgccccgacggcagccccagcgagtgccacgagcacgccgactgcgtgctggagagagacggcagcagaagctgcgtgtgcgccgtgggctgggccggcaacggcatcctgtgcggcagagacaccgacctggacggcttccccgacgagaagctgagatgccccgagagacagtgcagaaaggacaactgcgtgaccgtgcccaacagcggccaggaggacgtggacagagacggcatcggcgacgcctgcgaccccgacgccgacggcgacggcgtgcccaacgagaaggacaactgccccctggtgagaaaccccgaccagagaaacaccgacgaggacaagtggggcgacgcctgcgacaactgcagaagccagaagaacgacgaccagaaggacaccgaccaggacggcagaggcgacgcctgcgacgacgacatcgacggcgacagaatcagaaaccaggccgacaactgccccagagtgcccaacagcgaccagaaggacagcgacggcgacggcatcggcgacgcctgcgacaactgcccccagaagagcaaccccgaccaggccgacgtggaccacgacttcgtgggcgacgcctgcgacagcgaccaggaccaggacggcgacggccaccaggacagcagagacaactgccccaccgtgcccaacagcgcccaggaggacagcgaccacgacggccagggcgacgcctgcgacgacgacgacgacaacgacggcgtgcccgacagcagagacaactgcagactggtgcccaaccccggccaggaggacgccgacagagacggcgtgggcgacgtgtgccaggacgacttcgacgccgacaaggtggtggacaagatcgacgtgtgccccgagaacgccgaggtgaccctgaccgacttcagagccttccagaccgtggtgctggaccccgagggcgacgcccagatcgaccccaactgggtggtgctgaaccagggcagagagatcgtgcagaccatgaacagcgaccccggcctggccgtgggctacaccgccttcaacggcgtggacttcgagggcaccttccacgtgaacaccgtgaccgacgacgactacgccggcttcatcttcggctaccaggacagcagcagcttctacgtggtgatgtggaagcagatggagcagacctactggcaggccaaccccttcagagccgtggccgagcccggcatccagctgaaggccgtgaagagcagcaccggccccggcgagcagctgagaaacgccctgtggcacaccggcgacaccgagagccaggtgagactgctgtggaaggaccccagaaacgtgggctggaaggacaagaagagctacagatggttcctgcagcacagaccccaggtgggctacatcagagtgagattctacgagggccccgagctggtggccgacagcaacgtggtgctggacaccaccatgagaggcggcagactgggcgtgttctgcttcagccaggagaacatcatctgggccaacctgagatacagatgcaacgacaccatccccgaggactacgagacccaccagctgagacaggcctag

SEQ ID NO: 75533 - DNA, 2394 bp, synthetic construct
  misc_feature 1..2394: note = Description of Artificial Sequence: Synthetic coding sequence
  source 1..2394: mol_type = other DNA
atggccgccctggcctacaacctgggcaagagagagatcaaccactacttcagcgtgagaagcgccaaggtgctggccctggtggccgtgctgctgctggccgcctgccacctggccagcagaagatacagaggcaacgacagctgcgagtacctgctgagcagcggcagattcctgggcgagaaggtgtggcagccccacagctgcatgatgcacaagtacaagatcagcgaggccaagaactgcctggtggacaagcacatcgccttcatcggcgacagcagaatcagacagctgttctacagcttcgtgaagatcatcaacccccagttcaaggaggagggcaacaagcacgagaacatccccttcgaggacaagaccgccagcgtgaaggtggacttcctgtggcaccccgaggtgaacggcagcatgaagcagtgcatcaaggtgtggaccgaggacagcatcgccaagccccacgtgatcgtggccggcgccgccacctggagcatcaagatccacaacggcagcagcgaggccctgagccagtacaagatgaacatcaccagcatcgcccccctgctggagaagctggccaagaccagcgacgtgtactgggtgctgcaggaccccgtgtacgaggacctgctgagcgagaacagaaagatgatcaccaacgagaagatcgacgcctacaacgaggccgccgtgagcatcctgaacagcagcaccagaaacagcaagagcaacgtgaagatgttcagcgtgagcaagctgatcgcccaggagaccatcatggagagcctggacggcctgcacctgcccgagagcagcagagagaccaccgccatgatcctgatgaacgtgtactgcaacaagatcctgaagcccgtggacggcagctgctgccagcccagaccccccgtgaccctgatccagaagctggccgcctgcttcttcaccctgagcatcatcggctacctgatcttctacatcatccacagaaacgcccacagaaagaacaagccctgcaccgacctggagagcggcgaggagaagaagaacatcatcaacacccccgtgagcagcctggagatcctgctgcagagcttctgcaagctgggcctgatcatggcctacttctacatgtgcgacagagccaacctgttcatgaaggagaacaagttctacacccacagcagcttcttcatccccatcatctacatcctggtgctgggcgtgttctacaacgagaacaccaaggagaccaaggtgctgaacagagagcagaccgacgagtggaagggctggatgcagctggtgatcctgatctaccacatcagcggcgccagcaccttcctgcccgtgtacatgcacatcagagtgctggtggccgcctacctgttccagaccggctacggccacttcagctacttctggatcaagggcgacttcggcatctacagagtgtgccaggtgctgttcagactgaacttcctggtggtggtgctgtgcatcgtgatggacagaccctaccagttctactacttcgtgcccctggtgaccgtgtggttcatggtgatctacgtgaccctggccctgtggccccagatcatccagaagaaggccaacggcaactgcttctggcacttcggcctgctgctgaagctgggcttcctgctgctgttcatctgcttcctggcctacagccagggcgccttcgagaagatcttcagcctgtggcccctgagcaagtgcttcgagctgaagggcaacgtgtacgagtggtggttcagatggagactggacagatacgtggtgttccacggcatgctgttcgccttcatctacctggccctgcagaagagacagatcctgagcgagggcaagggcgagcccctgttcagcaacaagatcagcaacttcctgctgttcatcagcgtggtgagcttcctgacctacagcatctgggccagcagctgcaagaacaaggccgagtgcaacgagctgcaccccagcgtgagcgtggtgcagatcctggccttcatcctgatcagaaacatccccggctacgccagaagcgtgtacagcagcttcttcgcctggttcggcaagatcagcctggagctgttcatctgccagtaccacatctggctggccgccgacaccagaggcatcctggtgctgatccccggcaaccccatgctgaacatcatcgtgagcaccttcatcttcgtgtgcgtggcccacgagatcagccagatcaccaacgacctggcccagatcatcatccccaaggacaacagcagcctgctgaagagactggcctgcatcgccgccttcttctgcggcctgctgatcctgagcagcatccaggacaagagcaagcactag

SEQ ID NO: 75534 - DNA, 2721 bp, synthetic construct
  misc_feature 1..2721: note = Description of Artificial Sequence: Synthetic coding sequence
  source 1..2721: mol_type = other DNA
atggccggcaacgtgaagaagagcagcggcgccggcggcggcagcggcagcggcggcagcggcagcggcggcctgatcggcctgatgaaggacgccttccagccccaccaccaccaccaccaccacctgagcccccacccccccggcaccgtggacaagaagatggtggagaagtgctggaagctgatggacaaggtggtgagactgtgccagaaccccaagctggccctgaagaacagccccccctacatcctggacctgctgcccgacacctaccagcacctgagaaccatcctgagcagatacgagggcaagatggagaccctgggcgagaacgagtacttcagagtgttcatggagaacctgatgaagaagaccaagcagaccatcagcctgttcaaggagggcaaggagagaatgtacgaggagaacagccagcccagaagaaacctgaccaagctgagcctgatcttcagccacatgctggccgagctgaagggcatcttccccagcggcctgttccagggcgacaccttcagaatcaccaaggccgacgccgccgagttctggagaaaggccttcggcgagaagaccatcgtgccctggaagagcttcagacaggccctgcacgaggtgcaccccatcagcagcggcctggaggccatggccctgaagagcaccatcgacctgacctgcaacgactacatcagcgtgttcgagttcgacatcttcaccagactgttccagccctggagcagcctgctgagaaactggaacagcctggccgtgacccaccccggctacatggccttcctgacctacgacgaggtgaaggccagactgcagaagttcatccacaagcccggcagctacatcttcagactgagctgcaccagactgggccagtgggccatcggctacgtgaccgccgacggcaacatcctgcagaccatcccccacaacaagcccctgttccaggccctgatcgacggcttcagagagggcttctacctgttccccgacggcagaaaccagaaccccgacctgaccggcctgtgcgagcccaccccccaggaccacatcaaggtgacccaggagcagtacgagctgtactgcgagatgggcagcaccttccagctgtgcaagatctgcgccgagaacgacaaggacgtgaagatcgagccctgcggccacctgatgtgcaccagctgcctgaccagctggcaggagagcgagggccagggctgccccttctgcagatgcgagatcaagggcaccgagcccatcgtggtggaccccttcgaccccagaggcagcggcagcctgctgagacagggcgccgagggcgcccccagccccaactacgacgacgacgacgacgagagagccgacgacaccctgttcatgatgaaggagctggccggcgccaaggtggagagaccccccagccccttcagcatggccccccaggccagcctgccccccgtgccccccagactggacctgctgccccagagagtgtgcgtgcccagcagcgccagcgccctgggcaccgccagcaaggccgccagcggcagcctgcacaaggacaagcccctgcccgtgccccccaccctgagagacctgccccccccccccccccccgacagaccctacagcgtgggcgccgagagcagaccccagagaagacccctgccctgcacccccggcgactgccccagcagagacaagctgccccccgtgcccagcagcagactgggcgacagctggctgcccagacccatccccaaggtgcccgtgagcgcccccagcagcagcgacccctggaccggcagagagctgaccaacagacacagcctgcccttcagcctgcccagccagatggagcccagacccgacgtgcccagactgggcagcaccttcagcctggacaccagcatgagcatgaacagcagccccctggtgggccccgagtgcgaccaccccaagatcaagcccagcagcagcgccaacgccatctacagcctggccgccagacccctgcccgtgcccaagctgccccccggcgagcagtgcgagggcgaggaggacaccgagtacatgacccccagcagcagacccctgagacccctggacaccagccagagcagcagagcctgcgactgcgaccagcagatcgacagctgcacctacgaggccatgtacaacatccagagccaggcccccagcatcaccgagagcagcaccttcggcgagggcaacctggccgccgcccacgccaacaccggccccgaggagagcgagaacgaggacgacggctacgacgtgcccaagccccccgtgcccgccgtgctggccagaagaaccctgagcgacatcagcaacgccagcagcagcttcggctggctgagcctggacggcgaccccaccaccaacgtgaccgagggcagccaggtgcccgagagaccccccaagcccttccccagaagaatcaacagcgagagaaaggccggcagctgccagcagggcagcggccccgccgccagcgccgccaccgccagcccccagctgagcagcgagatcgagaacctgatgagccagggctacagctaccaggacatccagaaggccctggtgatcgcccagaacaacatcgagatggccaagaacatcctgagagagttcgtgagcatcagcagccccgcccacgtggccacctag

SEQ ID NO: 75535 - DNA, 2949 bp, synthetic construct
  misc_feature 1..2949: note = Description of Artificial Sequence: Synthetic coding sequence
  source 1..2949: mol_type = other DNA
atggccaacagcatgaacggcagaaaccccggcggcagaggcggcaaccccagaaagggcagaatcctgggcatcatcgacgccatccaggacgccgtgggcccccccaagcaggccgccgccgacagaagaaccgtggagaagacctggaagctgatggacaaggtggtgagactgtgccagaaccccaagctgcagctgaagaacagccccccctacatcctggacatcctgcccgacacctaccagcacctgagactgatcctgagcaagtacgacgacaaccagaagctggcccagctgagcgagaacgagtacttcaagatctacatcgacagcctgatgaagaagagcaagagagccatcagactgttcaaggagggcaaggagagaatgtacgaggagcagagccaggacagaagaaacctgaccaagctgagcctgatcttcagccacatgctggccgagatcaaggccatcttccccaacggccagttccagggcgacaacttcagaatcaccaaggccgacgccgccgagttctggagaaagttcttcggcgacaagaccatcgtgccctggaaggtgttcagacagtgcctgcacgaggtgcaccagatcagcagcggcctggaggccatggccctgaagagcaccatcgacctgacctgcaacgactacatcagcgtgttcgagttcgacatcttcaccagactgttccagccctggggcagcatcctgagaaactggaacttcctggccgtgacccaccccggctacatggccttcctgacctacgacgaggtgaaggccagactgcagaagtacagcaccaagcccggcagctacatcttcagactgagctgcaccagactgggccagtgggccatcggctacgtgaccggcgacggcaacatcctgcagaccatcccccacaacaagcccctgttccaggccctgatcgacggcagcagagagggcttctacctgtaccccgacggcagaagctacaaccccgacctgaccggcctgtgcgagcccaccccccacgaccacatcaaggtgacccaggagcagtacgagctgtactgcgagatgggcagcaccttccagctgtgcaagatctgcgccgagaacgacaaggacgtgaagatcgagccctgcggccacctgatgtgcaccagctgcctgaccgcctggcaggagagcgacggccagggctgccccttctgcagatgcgagatcaagggcaccgagcccatcatcgtggaccccttcgaccccagagacgagggcagcagatgctgcagcatcatcgaccccttcggcatgcccatgctggacctggacgacgacgacgacagagaggagagcctgatgatgaacagactggccaacgtgagaaagtgcaccgacagacagaacagccccgtgaccagccccggcagcagccccctggcccagagaagaaagccccagcccgaccccctgcagatcccccacctgagcctgccccccgtgccccccagactggacctgatccagaagggcatcgtgagaagcccctgcggcagccccaccggcagccccaagagcagcccctgcatggtgagaaagcaggacaagcccctgcccgccccccccccccccctgagagacccccccccccccccccccgagagacccccccccatcccccccgacaacagactgagcagacacatccaccacgtggagagcgtgcccagcagagacccccccatgcccctggaggcctggtgccccagagacgtgttcggcaccaaccagctggtgggctgcagactgctgggcgagggcagccccaagcccggcatcaccgccagcagcaacgtgaacggcagacacagcagagtgggcagcgaccccgtgctgatgagaaagcacagaagacacgacctgcccctggagggcgccaaggtgttcagcaacggccacctgggcagcgaggagtacgacgtgccccccagactgagcccccccccccccgtgaccaccctgctgcccagcatcaagtgcaccggccccctggccaacagcctgagcgagaagaccagagaccccgtggaggaggacgacgacgagtacaagatccccagcagccaccccgtgagcctgaacagccagcccagccactgccacaacgtgaagccccccgtgagaagctgcgacaacggccactgcatgctgaacggcacccacggccccagcagcgagaagaagagcaacatccccgacctgagcatctacctgaagggcgacgtgttcgacagcgccagcgaccccgtgcccctgccccccgccagaccccccaccagagacaaccccaagcacggcagcagcctgaacagaacccccagcgactacgacctgctgatcccccccctgggcgaggacgccttcgacgccctgccccccagcctgccccccccccccccccccgccagacacagcctgatcgagcacagcaagccccccggcagcagcagcagacccagcagcggccaggacctgttcctgctgcccagcgaccccttcgtggacctggccagcggccaggtgcccctgccccccgccagaagactgcccggcgagaacgtgaagaccaacagaaccagccaggactacgaccagctgcccagctgcagcgacggcagccaggcccccgccagaccccccaagcccagacccagaagaaccgcccccgagatccaccacagaaagccccacggccccgaggccgccctggagaacgtggacgccaagatcgccaagctgatgggcgagggctacgccttcgaggaggtgaagagagccctggagatcgcccagaacaacgtggaggtggccagaagcatcctgagagagttcgccttccccccccccgtgagccccagactgaacctgtag

SEQ ID NO: 75536 - DNA, 2883 bp, synthetic construct
  misc_feature 1..2883: note = Description of Artificial Sequence: Synthetic coding sequence
  source 1..2883: mol_type = other DNA
atggccctggcccccggccccgacgcccacgcccacctgccccccctgatcgagctgaagttccagatggccaacagcatgaacggcagaaaccccggcggcagaggcggcaaccccagaaagggcagaatcctgggcatcatcgacgccatccaggacgccgtgggcccccccaagcaggccgccgccgacagaagaaccgtggagaagacctggaagctgatggacaaggtggtgagactgtgccagaaccccaagctgcagctgaagaacagccccccctacatcctggacatcctgcccgacacctaccagcacctgagactgatcctgagcaagtacgacgacaaccagaagctggcccagctgagcgagaacgagtacttcaagatctacatcgacagcctgatgaagaagagcaagagagccatcagactgttcaaggagggcaaggagagaatgtacgaggagcagagccaggacagaagaaacctgaccaagctgagcctgatcttcagccacatgctggccgagatcaaggccatcttccccaacggccagttccagggcgacaacttcagaatcaccaaggccgacgccgccgagttctggagaaagttcttcggcgacaagaccatcgtgccctggaaggtgttcagacagtgcctgcacgaggtgcaccagatcagcagcggcctggaggccatggccctgaagagcaccatcgacctgacctgcaacgactacatcagcgtgttcgagttcgacatcttcaccagactgttccagccctggggcagcatcctgagaaactggaacttcctggccgtgacccaccccggctacatggccttcctgacctacgacgaggtgaaggccagactgcagaagtacagcaccaagcccggcagctacatcttcagactgagctgcaccagactgggccagtgggccatcggctacgtgaccggcgacggcaacatcctgcagaccatcccccacaacaagcccctgttccaggccctgatcgacggcagcagagagggcttctacctgtaccccgacggcagaagctacaaccccgacctgaccggcctgtgcgagcccaccccccacgaccacatcaaggtgacccaggagcagtacgagctgtactgcgagatgggcagcaccttccagctgtgcaagatctgcgccgagaacgacaaggacgtgaagatcgagccctgcggccacctgatgtgcaccagctgcctgaccgcctggcaggagagcgacggccagggctgccccttctgcagatgcgagatcaagggcaccgagcccatcatcgtggaccccttcgaccccagagacgagggcagcagatgctgcagcatcatcgaccccttcggcatgcccatgctggacctggacgacgacgacgacagagaggagagcctgatgatgaacagactggccaacgtgagaaagtgcaccgacagacagaacagccccgtgaccagccccggcagcagccccctggcccagagaagaaagccccagcccgaccccctgcagatcccccacctgagcctgccccccgtgccccccagactggacctgatccagaagggcatcgtgagaagcccctgcggcagccccaccggcagccccaagagcagcccctgcatggtgagaaagcaggacaagcccctgcccgccccccccccccccctgagagacccccccccccccccccccgagagacccccccccatcccccccgacaacagactgagcagacacatccaccacgtggagagcgtgcccagcagagacccccccatgcccctggaggcctggtgccccagagacgtgttcggcaccaaccagctggtgggctgcagactgctgggcgagggcagccccaagcccggcatcaccgccagcagcaacgtgaacggcagacacagcagagtgggcagcgaccccgtgctgatgagaaagcacagaagacacgacctgcccctggagggcgccaaggtgttcagcaacggccacctgggcagcgaggagtacgacgtgccccccagactgagcccccccccccccgtgaccaccctgctgcccagcatcaagtgcaccggccccctggccaacagcctgagcgagaagaccagagaccccgtggaggaggacgacgacgagtacaagatccccagcagccaccccgtgagcctgaacagccagcccagccactgccacaacgtgaagccccccgtgagaagctgcgacaacggccactgcatgctgaacggcacccacggccccagcagcgagaagaagagcaacatccccgacctgagcatctacctgaagggcgaggacgccttcgacgccctgccccccagcctgccccccccccccccccccgccagacacagcctgatcgagcacagcaagccccccggcagcagcagcagacccagcagcggccaggacctgttcctgctgcccagcgaccccttcgtggacctggccagcggccaggtgcccctgccccccgccagaagactgcccggcgagaacgtgaagaccaacagaaccagccaggactacgaccagctgcccagctgcagcgacggcagccaggcccccgccagaccccccaagcccagacccagaagaaccgcccccgagatccaccacagaaagccccacggccccgaggccgccctggagaacgtggacgccaagatcgccaagctgatgggcgagggctacgccttcgaggaggtgaagagagccctggagatcgcccagaacaacgtggaggtggccagaagcatcctgagagagttcgccttccccccccccgtgagccccagactgaacctgtag

SEQ ID NO: 75537 - DNA, 2313 bp, synthetic construct
  misc_feature 1..2313: note = Description of Artificial Sequence: Synthetic coding sequence
  source 1..2313: mol_type = other DNA
atggccaacagcatgaacggcagaaaccccggcggcagaggcggcaaccccagaaagggcagaatcctgggcatcatcgacgccatccaggacgccgtgggcccccccaagcaggccgccgccgacagaagaaccgtggagaagacctggaagctgatggacaaggtggtgagactgtgccagaaccccaagctgcagctgaagaacagccccccctacatcctggacatcctgcccgacacctaccagcacctgagactgatcctgagcaagtacgacgacaaccagaagctggcccagctgagcgagaacgagtacttcaagatctacatcgacagcctgatgaagaagagcaagagagccatcagactgttcaaggagggcaaggagagaatgtacgaggagcagagccaggacagaagaaacctgaccaagctgagcctgatcttcagccacatgctggccgagatcaaggccatcttccccaacggccagttccagggcgacaacttcagaatcaccaaggccgacgccgccgagttctggagaaagttcttcggcgacaagaccatcgtgccctggaaggtgttcagacagtgcctgcacgaggtgcaccagatcagcagcggcctggaggccatggccctgaagagcaccatcgacctgacctgcaacgactacatcagcgtgttcgagttcgacatcttcaccagactgttccagccctggggcagcatcctgagaaactggaacttcctggccgtgacccaccccggctacatggccttcctgacctacgacgaggtgaaggccagactgcagaagtacagcaccaagcccggcagctacatcttcagactgagctgcaccagactgggccagtgggccatcggctacgtgaccggcgacggcaacatcctgcagaccatcccccacaacaagcccctgttccaggccctgatcgacggcagcagagagggcttctacctgtaccccgacggcagaagctacaaccccgacctgaccggcctgtgcgagcccaccccccacgaccacatcaaggtgacccaggagcagtacgagctgtactgcgagatgggcagcaccttccagctgtgcaagatctgcgccgagaacgacaaggacgtgaagatcgagccctgcggccacctgatgtgcaccagctgcctgaccgcctggcaggagagcgacggccagggctgccccttctgcagatgcgagatcaagggcaccgagcccatcatcgtggaccccttcgaccccagagacgagggcagcagatgctgcagcatcatcgaccccttcggcatgcccatgctggacctggacgacgacgacgacagagaggagagcctgatgatgaacagactggccaacgtgagaaagtgcaccgacagacagaacagccccgtgaccagccccggcagcagccccctggcccagagaagaaagccccagcccgaccccctgcagatcccccacctgagcctgccccccgtgccccccagactggacctgatccagaagggcatcgtgagaagcccctgcggcagccccaccggcagccccaagagcagcccctgcatggtgagaaagcaggacaagcccctgcccgccccccccccccccctgagagacccccccccccccccccccgagagacccccccccatcccccccgacaacagactgagcagacacatccaccacgtggagagcgtgcccagcagagacccccccatgcccctggaggcctggtgccccagagacgtgttcggcaccaaccagctggtgggctgcagactgctgggcgagggcagccccaagcccggcatcaccgccagcagcaacgtgaacggcagacacagcagagtgggcagcgaccccgtgctgatgagaaagcacagaagacacgacctgcccctggagggcgccaaggtgttcagcaacggccacctgggcagcgaggagtacgacgtgccccccagactgagcccccccccccccgtgaccaccctgctgcccagcatcaagtgcaccggccccctggccaacagcctgagcgagaagaccagagaccccgtggaggaggacgacgacgagtacaagatccccagcagccaccccgtgagcctgaacagccagcccagccactgccacaacgtgaagccccccgtgagaagctgcgacaacggccactgcatgctgaacggcacccacggccccagcagcgagaagaagagcaacatccccgacctgagcatctacctgaagggcacctacagaatctag

SEQ ID NO: 75538 - DNA, 2433 bp, synthetic construct
  misc_feature 1..2433: note = Description of Artificial Sequence: Synthetic coding sequence
  source 1..2433: mol_type = other DNA
atggccaacagcatgaacggcagaaaccccggcggcagaggcggcaaccccagaaagggcagaatcctgggcatcatcgacgccatccaggacgccgtgggcccccccaagcaggccgccgccgacagaagaaccgtggagaagacctggaagctgatggacaaggtggtgagactgtgccagaaccccaagctgcagctgaagaacagccccccctacatcctggacatcctgcccgacacctaccagcacctgagactgatcctgagcaagtacgacgacaaccagaagctggcccagctgagcgagaacgagtacttcaagatctacatcgacagcctgatgaagaagagcaagagagccatcagactgttcaaggagggcaaggagagaatgtacgaggagcagagccaggacagaagaaacctgaccaagctgagcctgatcttcagccacatgctggccgagatcaaggccatcttccccaacggccagttccagggcgacaacttcagaatcaccaaggccgacgccgccgagttctggagaaagttcttcggcgacaagaccatcgtgccctggaaggtgttcagacagtgcctgcacgaggtgcaccagatcagcagcggcctggaggccatggccctgaagagcaccatcgacctgacctgcaacgactacatcagcgtgttcgagttcgacatcttcaccagactgttccagccctggggcagcatcctgagaaactggaacttcctggccgtgacccaccccggctacatggccttcctgacctacgacgaggtgaaggccagactgcagaagtacagcaccaagcccggcagctacatcttcagactgagctgcaccagactgggccagtgggccatcggctacgtgaccggcgacggcaacatcctgcagaccatcccccacaacaagcccctgttccaggccctgatcgacggcagcagagagggcttctacctgtaccccgacggcagaagctacaaccccgacctgaccggcctgtgcgagcccaccccccacgaccacatcaaggtgacccaggagcagtacgagctgtactgcgagatgggcagcaccttccagctgtgcaagatctgcgccgagaacgacaaggacgtgaagatcgagccctgcggccacctgatgtgcaccagctgcctgaccgcctggcaggagagcgacggccagggctgccccttctgcagatgcgagatcaagggcaccgagcccatcatcgtggaccccttcgaccccagagacgagggcagcagatgctgcagcatcatcgaccccttcggcatgcccatgctggacctggacgacgacgacgacagagaggagagcctgatgatgaacagactggccaacgtgagaaagtgcaccgacagacagaacagccccgtgaccagccccggcagcagccccctggcccagagaagaaagccccagcccgaccccctgcagatcccccacctgagcctgccccccgtgccccccagactggacctgatccagaagggcatcgtgagaagcccctgcggcagccccaccggcagccccaagagcagcccctgcatggtgagaaagcaggacaagcccctgcccgccccccccccccccctgagagacccccccccccccccccccgagagacccccccccatcccccccgacaacagactgagcagacacatccaccacgtggagagcgtgcccagcagagacccccccatgcccctggaggcctggtgccccagagacgtgttcggcaccaaccagctggtgggctgcagactgctgggcgagggcagccccaagcccggcatcaccgccagcagcaacgtgaacggcagacacagcagagtgggcagcgaccccgtgctgatgagaaagcacagaagacacgacctgcccctggagggcgccaaggtgttcagcaacggccacctgggcagcgaggagtacgacgtgccccccagactgagcccccccccccccgtgaccaccctgctgcccagcatcaagtgcaccggccccctggccaacagcctgagcgagaagaccagagaccccgtggaggaggacgacgacgagtacaagatccccagcagccaccccgtgagcctgaacagccagcccagccactgccacaacgtgaagccccccgtgagaagctgcgacaacggccactgcatgctgaacggcacccacggccccagcagcgagaagaagagcaacatccccgacctgagcatctacctgaagggcgacgtgttcgacagcgccagcgaccccgtgcccctgccccccgccagaccccccaccagagacaaccccaagcacggcagcagcctgaacagaacccccagcgactacgacctgctgatcccccccctgggctag

SEQ ID NO: 75539 - DNA, 420 bp, synthetic construct
  misc_feature 1..420: note = Description of Artificial Sequence: Synthetic coding sequence
  source 1..420: mol_type = other DNA
atggccaacagcatgaacggcagaaaccccggcggcagaggcggcaaccccagaaagggcagaatcctgggcatcatcgacgccatccaggacgccgtgggcccccccaagcaggccgccgccgacagaagaaccgtggagaagacctggaagctgatggacaaggtggtgagactgtgccagaaccccaagctgcagctgaagaacagccccccctacatcctggacatcctgcccgacacctaccagcacctgagactgatcctgagcaagtacgacgacaaccagaagctggcccagctgagcgagaacgagtacttcaagatctacatcgacagcctgatgaagaagagcaagagagccatcagactgttcaaggagggcaaggagagaatgtacgaggagcagagccaggactag

SEQ ID NO: 75540 - DNA, 684 bp, synthetic construct
  misc_feature 1..684: note = Description of Artificial Sequence: Synthetic coding sequence
  source 1..684: mol_type = other DNA
atggccctggcccccggccccgacgcccacgcccacctgccccccctgatcgagctgaagttccagatggccaacagcatgaacggcagaaaccccggcggcagaggcggcaaccccagaaagggcagaatcctgggcatcatcgacgccatccaggacgccgtgggcccccccaagcaggccgccgccgacagaagaaccgtggagaagacctggaagctgatggacaaggtggtgagactgtgccagaaccccaagctgcagctgaagaacagccccccctacatcctggacatcctgcccgacacctaccagcacctgagactgatcctgagcaagtacgacgacaaccagaagctggcccagctgagcgagaacgagtacttcaagatctacatcgacagcctgatgaagaagagcaagagagccatcagactgttcaaggagggcaaggagagaatgtacgaggagcagagccaggacagaaccatcgtgccctggaaggtgttcagacagtgcctgcacgaggtgcaccagatcagcagcggcctggaggccatggccctgaagagcaccatcgacctgacctgcaacgactacatcagcgtgttcgagttcgacatcttcaccagactgttccaggtgagcgacaacttcaccgagtacctgatctacctgacctag

SEQ ID NO: 75541 - DNA, 1425 bp, synthetic construct
  misc_feature 1..1425: note = Description of Artificial Sequence: Synthetic coding sequence
  source 1..1425: mol_type = other DNA
atggccctggccgtggccccctggggcagacagtgggaggaggccagagccctgggcagagccgtgagaatgctgcagagactggaggagcagtgcgtggaccccagactgagcgtgagcccccccagcctgagagacctgctgcccagaaccgcccagctgctgagagaggtggcccacagcagaagagccgccggcggcggcggccccggcggccccggcggcagcggcgacttcctgctgatctacctggccaacctggaggccaagagcagacaggtggccgccctgctgccccccagaggcagaagaagcgccaacgacgagctgttcagagccggcagcagactgagaagacagctggccaagctggccatcatcttcagccacatgcacgccgagctgcacgccctgttccccggcggcaagtactgcggccacatgtaccagctgaccaaggcccccgcccacaccttctggagagagagctgcggcgccagatgcgtgctgccctgggccgagttcgagagcctgctgggcacctgccaccccgtggagcccggctgcaccgccctggccctgagaaccaccatcgacctgacctgcagcggccacgtgagcatcttcgagttcgacgtgttcaccagactgttccagccctggcccaccctgctgaagaactggcagctgctggccgtgaaccaccccggctacatggccttcctgacctacgacgaggtgcaggagagactgcaggcctgcagagacaagcccggcagctacatcttcagacccagctgcaccagactgggccagtgggccatcggctacgtgagcagcgacggcagcatcctgcagaccatccccgccaacaagcccctgagccaggtgctgctggagggccagaaggacggcttctacctgtaccccgacggcaagacccacaaccccgacctgaccgagctgggccaggccgagccccagcagagaatccacgtgagcgaggagcagctgcagctgtactgggccatggacagcaccttcgagctgtgcaagatctgcgccgagagcaacaaggacgtgaagatcgagccctgcggccacctgctgtgcagctgctgcctggccgcctggcagcacagcgacagccagacctgccccttctgcagatgcgagatcaagggctgggaggccgtgagcatctaccagttccacggccaggccaccgccgaggacagcggcaacagcagcgaccaggagggcagagagctggagctgggccaggtgcccctgagcgccccccccctgccccccagacccgacctgccccccagaaagcccagaaacgcccagcccaaggtgagactgctgaagggcaacagcccccccgccgccctgggcccccaggaccccgcccccgcctag

SEQ ID NO: 75542 - DNA, 1287 bp, synthetic construct
  misc_feature 1..1287: note = Description of Artificial Sequence: Synthetic coding sequence
  source 1..1287: mol_type = other DNA
atggccctggccgtggccccctggggcagacagtgggaggaggccagagccctgggcagagccgtgagaatgctgcagagactggaggagcagtgcgtggaccccagactgagcgtgagcccccccagcctgagagacctgctgcccagaaccgcccagctgctgagagaggtggcccacagcagaagagccgccggcggcggcggccccggcggccccggcggcagcggcgacttcctgctgatctacctggccaacctggaggccaagagcagacaggtggccgccctgctgccccccagaggcagaagaagcgccaacgacgagctgttcagagccggcagcagactgagaagacagctggccaagctggccatcatcttcagccacatgcacgccgagctgcacgccctgttccccggcggcaagtactgcggccacatgtaccagctgaccaaggcccccgcccacaccttctggagagagagctgcggcgccagatgcgtgctgccctgggccgagttcgagagcctgctgggcacctgccaccccgtggagcccggctgcaccgccctggccctgagaaccaccatcgacctgacctgcagcggccacgtgagcatcttcgagttcgacgtgttcaccagactgttccagccctggcccaccctgctgaagaactggcagctgctggccgtgaaccaccccggctacatggccttcctgacctacgacgaggtgcaggagagactgcaggcctgcagagacaagcccggcagctacctgtaccccgacggcaagacccacaaccccgacctgaccgagctgggccaggccgagccccagcagagaatccacgtgagcgaggagcagctgcagctgtactgggccatggacagcaccttcgagctgtgcaagatctgcgccgagagcaacaaggacgtgaagatcgagccctgcggccacctgctgtgcagctgctgcctggccgcctggcagcacagcgacagccagacctgccccttctgcagatgcgagatcaagggctgggaggccgtgagcatctaccagttccacggccaggccaccgccgaggacagcggcaacagcagcgaccaggagggcagagagctggagctgggccaggtgcccctgagcgccccccccctgccccccagacccgacctgccccccagaaagcccagaaacgcccagcccaaggtgagactgctgaagggcaacagcccccccgccgccctgggcccccaggaccccgcccccgcctag

SEQ ID NO: 75543 - DNA, 2355 bp, synthetic construct
  misc_feature 1..2355: note = Description of Artificial Sequence: Synthetic coding sequence
  source 1..2355: mol_type = other DNA
atgagcgaccagaagaaggaggaggaggaggaggccgccgccgccgccgccatggccaccgagggcggcaagaccagcgagcccgagaacaacaacaagaagcccaagaccagcggcagccaggacagccagcccagccccctggccctgctggccgccacctgcagcaagatcggcacccccggcgagaaccaggccaccggccagcagcagatcatcatcgaccccagccagggcctggtgcagctgcagaaccagccccagcagctggagctggtgaccacccagctggccggcaacgcctggcagctggtggccagcaccccccccgccagcaaggagaacaacgtgagccagcccgccagcagcagcagcagcagcagcagcagcaacaacggcagcgccagccccaccaagaccaagagcggcaacagcagcacccccggccagttccaggtgatccaggtgcagaaccccagcggcagcgtgcagtaccaggtgatcccccagctgcagaccgtggagggccagcagatccagatcaaccccaccagcagcagcagcctgcaggacctgcagggccagatccagctgatcagcgccggcaacaaccaggccatcctgaccgccgccaacagaaccgccagcggcaacatcctggcccagaacctggccaaccagaccgtgcccgtgcagatcagacccggcgtgagcatccccctgcagctgcagaccctgcccggcacccaggcccaggtggtgaccaccctgcccatcaacatcggcggcgtgaccctggccctgcccgtgatcaacaacgtggccgccggcggcggcaccggccaggtgggccagcccgccgccaccgccgacagcggcaccagcaacggcaaccagctggtgagcacccccaccaacaccaccaccagcgccagcaccatgcccgagagccccagcagcagcaccacctgcaccaccaccgccagcaccagcctgaccagcagcgacaccctggtgagcagcgccgacaccggccagtacgccagcaccagcgccagcagcagcgagagaaccatcgaggagagccagacccccgccgccaccgagagcgaggcccagagcagcagccagctgcagcccaacggcatgcagaacgcccaggaccagagcaacagcctgcagcaggtgcagatcgtgggccagcccatcctgcagcagatccagatccagcagccccagcagcagatcatccaggccatccccccccagagcttccagctgcagagcggccagaccatccagaccatccagcagcagcccctgcagaacgtgcagctgcaggccgtgaaccccacccaggtgctgatcagagcccccaccctgacccccagcggccagatcagctggcagaccgtgcaggtgcagaacatccagagcctgagcaacctgcaggtgcagaacgccggcctgagccagcagctgaccatcacccccgtgagcagcagcggcggcaccaccctggcccagatcgcccccgtggccgtggccggcgcccccatcaccctgaacaccgcccagctggccagcgtgcccaacctgcagaccgtgagcgtggccaacctgggcgccgccggcgtgcaggtgcagggcgtgcccgtgaccatcaccagcgtggccggccagcagcagggccaggacggcgtgaaggtgcagcaggccaccatcgcccccgtgaccgtggccgtgggcggcatcgccaacgccaccatcggcgccgtgagccccgaccagctgacccaggtgcacctgcagcagggccagcagaccagcgaccaggaggtgcagcccggcaagagactgagaagagtggcctgcagctgccccaactgcagagagggcgagggcagaggcagcaacgagcccggcaagaagaagcagcacatctgccacatcgagggctgcggcaaggtgtacggcaagaccagccacctgagagcccacctgagatggcacaccggcgagagacccttcatctgcaactggatgttctgcggcaagagattcaccagaagcgacgagctgcagagacacagaagaacccacaccggcgagaagagattcgagtgccccgagtgcagcaagagattcatgagaagcgaccacctgagcaagcacgtgaagacccaccagaacaagaagggcggcggcaccgccctggccatcgtgaccagcggcgagctggacagcagcgtgaccgaggtgctgggcagccccagaatcgtgaccgtggccgccatcagccaggacagcaaccccgccacccccaacgtgagcaccaacatggaggagttctag

SEQ ID NO: 75544 - DNA, 1476 bp, synthetic construct
  misc_feature 1..1476: note = Description of Artificial Sequence: Synthetic coding sequence
  source 1..1476: mol_type = other DNA
atggaccacaccgacaacgagctgcagggcaccaacagcagcggcagcctgggcggcctggacgtgagaagaagaatccccatcaagctgatcagcaagcaggccaacaaggccaagcccgcccccagaacccagagaaccatcaacagaatgcccgccaaggccccccccggcgacgaggagggcttcgactacaacgaggaggagagatacgactgcaagggcggcgagctgttcgccaaccagagaagattccccggccacctgttctgggacttccagatcaacatcctgggcgagaaggacgacacccccgtgcacttctgcgacaagtgcggcctgcccatcaagatctacggcagaatgatcccctgcaagcacgtgttctgctacgactgcgccatcctgcacgagaagaagggcgacaagatgtgccccggctgcagcgaccccgtgcagagaatcgagcagtgcaccagaggcagcctgttcatgtgcagcatcgtgcagggctgcaagagaacctacctgagccagagagacctgcaggcccacatcaaccacagacacatgagagccggcaagcccgtgaccagagccagcctggagaacgtgcacccccccatcgcccccccccccaccgagatccccgagagattcatcatgccccccgacaagcaccacatgagccacatcccccccaagcagcacatcatgatgccccccccccccctgcagcacgtgccccacgagcactacaaccagccccacgaggacatcagagccccccccgccgagctgagcatggccccccccccccccagaagcgtgagccaggagaccttcagaatcagcaccagaaagcacagcaacctgatcaccgtgcccatccaggacgacagcaacagcggcgccagagagccccccccccccgcccccgcccccgcccaccaccaccccgagtaccagggccagcccgtggtgagccacccccaccacatcatgcccccccagcagcactacgccccccccccccccccccccccccccatcagccaccccatgccccaccccccccaggccgccggcaccccccacctggtgtacagccaggccccccccccccccatgaccagcgcccccccccccatcacccccccccccggccacatcatcgcccagatgcccccctacatgaaccaccccccccccggccccccccccccccagcacggcggcccccccgtgaccgccccccccccccaccactacaaccccaacagcctgccccagttcaccgaggaccagggcaccctgagcccccccttcacccagcccggcggcatgagccccggcatctggcccgcccccagaggccccccccccccccccagactgcagggcccccccagccagacccccctgcccggcccccaccaccccgaccagaccagatacagaccctactaccagtag

SEQ ID NO: 75545 - DNA, 1113 bp, synthetic construct
  misc_feature 1..1113: note = Description of Artificial Sequence: Synthetic coding sequence
  source 1..1113: mol_type = other DNA
atgatcccctgcaagcacgtgttctgctacgactgcgccatcctgcacgagaagaagggcgacaagatgtgccccggctgcagcgaccccgtgcagagaatcgagcagtgcaccagaggcagcctgttcatgtgcagcatcgtgcagggctgcaagagaacctacctgagccagagagacctgcaggcccacatcaaccacagacacatgagagccggcaagcccgtgaccagagccagcctggagaacgtgcacccccccatcgcccccccccccaccgagatccccgagagattcatcatgccccccgacaagcaccacatgagccacatcccccccaagcagcacatcatgatgccccccccccccctgcagcacgtgccccacgagcactacaaccagccccacgaggacatcagagccccccccgccgagctgagcatggccccccccccccccagaagcgtgagccaggagaccttcagaatcagcaccagaaagcacagcaacctgatcaccgtgcccatccaggacgacagcaacagcggcgccagagagccccccccccccgcccccgcccccgcccaccaccaccccgagtaccagggccagcccgtggtgagccacccccaccacatcatgcccccccagcagcactacgccccccccccccccccccccccccccatcagccaccccatgccccaccccccccaggccgccggcaccccccacctggtgtacagccaggccccccccccccccatgaccagcgcccccccccccatcacccccccccccggccacatcatcgcccagatgcccccctacatgaaccaccccccccccggccccccccccccccagcacggcggcccccccgtgaccgccccccccccccaccactacaaccccaacagcctgccccagttcaccgaggaccagggcaccctgagcccccccttcacccagcccggcggcatgagccccggcatctggcccgcccccagaggccccccccccccccccagactgcagggcccccccagccagacccccctgcccggcccccaccaccccgaccagaccagatacagaccctactaccagtag

SEQ ID NO: 75546 - DNA, 681 bp, synthetic construct
  misc_feature 1..681: note = Description of Artificial Sequence: Synthetic coding sequence
  source 1..681: mol_type = other DNA
atgaaggtgctgatcctggcctgcctggtggccctggccctggccagagagaccatcgagagcctgagcagcagcgaggagagcatcaccgagtacaagcagaaggtggagaaggtgaagcacgaggaccagcagcagggcgaggacgagcaccaggacaagatctaccccagcttccagccccagcccctgatctaccccttcgtggagcccatcccctacggcttcctgccccagaacatcctgcccctggcccagcccgccgtggtgctgcccgtgccccagcccgagatcatggaggtgcccaaggccaaggacaccgtgtacaccaagggcagagtgatgcccgtgctgaagagccccaccatccccttcttcgacccccagatccccaagctgaccgacctggagaacctgcacctgcccctgcccctgctgcagcccctgatgcagcaggtgccccagcccatcccccagaccctggccctgcccccccagcccctgtggagcgtgccccagcccaaggtgctgcccatcccccagcaggtggtgccctacccccagagagccgtgcccgtgcaggccctgctgctgaaccaggagctgctgctgaaccccacccaccagatctaccccgtgacccagcccctggcccccgtgcacaaccccatcagcgtgtag

SEQ ID NO: 75547 - DNA, 549 bp, synthetic construct
  misc_feature 1..549: note = Description of Artificial Sequence: Synthetic coding sequence
  source 1..549: mol_type = other DNA
atgaagagcttcctgctggtggtgaacgccctggccctgaccctgcccttcctggccgtggaggtgcagaaccagaagcagcccgcctgccacgagaacgacgagagacccttctaccagaagaccgccccctacgtgcccatgtactacgtgcccaacagctacccctactacggcaccaacctgtaccagagaagacccgccatcgccatcaacaacccctacgtgcccagaacctactacgccaaccccgccgtggtgagaccccacgcccagatcccccagagacagtacctgcccaacagccacccccccaccgtggtgagaagacccaacctgcaccccagcttcatcgccatcccccccaagaagatccaggacaagatcatcatccccaccatcaacaccatcgccaccgtggagcccacccccgcccccgccaccgagcccaccgtggacagcgtggtgacccccgaggccttcagcgagagcatcatcaccagcacccccgagaccaccaccgtggccgtgaccccccccaccgcctag

SEQ ID NO: 75548 - DNA, 978 bp, synthetic construct
  misc_feature 1..978: note = Description of Artificial Sequence: Synthetic coding sequence
  source 1..978: mol_type = other DNA
atggccagcagcagcggcagcaaggccgagttcatcgtgggcggcaagtacaagctggtgagaaagatcggcagcggcagcttcggcgacatctacctggccatcaacatcaccaacggcgaggaggtggccgtgaagctggagagccagaaggccagacacccccagctgctgtacgagagcaagctgtacaagatcctgcagggcggcgtgggcatcccccacatcagatggtacggccaggagaaggactacaacgtgctggtgatggacctgctgggccccagcctggaggacctgttcaacttctgcagcagaagattcaccatgaagaccgtgctgatgctggccgaccagatgatcagcagaatcgagtacgtgcacaccaagaacttcatccacagagacatcaagcccgacaacttcctgatgggcatcggcagacactgcaacaagctgttcctgatcgacttcggcctggccaagaagtacagagacaacagaaccagacagcacatcccctacagagaggacaagaacctgaccggcaccgccagatacgccagcatcaacgcccacctgggcatcgagcagagcagaagagacgacatggagagcctgggctacgtgctgatgtacttcaacagaaccagcctgccctggcagggcctgaaggccgccaccaagaagcagaagtacgagaagatcagcgagaagaagatgagcacccccgtggaggtgctgtgcaagggcttccccgccgagttcgccatgtacctgaactactgcagaggcctgagattcgaggaggcccccgactacatgtacctgagacagctgttcagaatcctgttcagaaccctgaaccaccagtacgactacaccttcgactggaccatgctgaagcagaaggccgcccagcaggccgccagcagcagcggccagggccagcaggcccagacccccaccggcttctag

SEQ ID NO: 75549 - DNA, 978 bp, synthetic construct; identical to SEQ ID NO: 75548
  misc_feature 1..978: note = Description of Artificial Sequence: Synthetic coding sequence
  source 1..978: mol_type = other DNA

SEQ ID NO: 75550 - DNA, 1014 bp, synthetic construct
  misc_feature 1..1014: note = Description of Artificial Sequence: Synthetic coding sequence
  source 1..1014: mol_type = other DNA
atggccagcagcagcggcagcaaggccgagttcatcgtgggcggcaagtacaagctggtgagaaagatcggcagcggcagcttcggcgacatctacctggccatcaacatcaccaacggcgaggaggtggccgtgaagctggagagccagaaggccagacacccccagctgctgtacgagagcaagctgtacaagatcctgcagggcggcgtgggcatcccccacatcagatggtacggccaggagaaggactacaacgtgctggtgatggacctgctgggccccagcctggaggacctgttcaacttctgcagcagaagattcaccatgaagaccgtgctgatgctggccgaccagatgatcagcagaatcgagtacgtgcacaccaagaacttcatccacagagacatcaagcccgacaacttcctgatgggcatcggcagacactgcaacaagctgttcctgatcgacttcggcctggccaagaagtacagagacaacagaaccagacagcacatcccctacagagaggacaagaacctgaccggcaccgccagatacgccagcatcaacgcccacctgggcatcgagcagagcagaagagacgacatggagagcctgggctacgtgctgatgtacttcaacagaaccagcctgccctggcagggcctgaaggccgccaccaagaagcagaagtacgagaagatcagcgagaagaagatgagcacccccgtggaggtgctgtgcaagggcttccccgccgagttcgccatgtacctgaactactgcagaggcctgagattcgaggaggcccccgactacatgtacctgagacagctgttcagaatcctgttcagaaccctgaaccaccagtacgactacaccttcgactggaccatgctgaagcagaaggccgcccagcaggccgccagcagcagcggccagggccagcaggcccagacccccaccggcaagcagaccgacaagaccaagagcaacatgaagggcttctag

SEQ ID NO: 75551 - DNA, 1098 bp, synthetic construct
  misc_feature 1..1098: note = Description of Artificial Sequence: Synthetic coding sequence
  source 1..1098: mol_type = other DNA
atggccagcagcagcggcagcaaggccgagttcatcgtgggcggcaagtacaagctggtgagaaagatcggcagcggcagcttcggcgacatctacctggccatcaacatcaccaacggcgaggaggtggccgtgaagctggagagccagaaggccagacacccccagctgctgtacgagagcaagctgtacaagatcctgcagggcggcgtgggcatcccccacatcagatggtacggccaggagaaggactacaacgtgctggtgatggacctgctgggccccagcctggaggacctgttcaacttctgcagcagaagattcaccatgaagaccgtgctgatgctggccgaccagatgatcagcagaatcgagtacgtgcacaccaagaacttcatccacagagacatcaagcccgacaacttcctgatgggcatcggcagacactgcaacaagtgcctggagagccccgtgggcaagagaaagagaagcatgaccgtgagcaccagccaggaccccagcttcagcggcctgaaccagctgttcctgatcgacttcggcctggccaagaagtacagagacaacagaaccagacagcacatcccctacagagaggacaagaacctgaccggcaccgccagatacgccagcatcaacgcccacctgggcatcgagcagagcagaagagacgacatggagagcctgggctacgtgctgatgtacttcaacagaaccagcctgccctggcagggcctgaaggccgccaccaagaagcagaagtacgagaagatcagcgagaagaagatgagcacccccgtggaggtgctgtgcaagggcttccccgccgagttcgccatgtacctgaactactgcagaggcctgagattcgaggaggcccccgactacatgtacctgagacagctgttcagaatcctgttcagaaccctgaaccaccagtacgactacaccttcgactggaccatgctgaagcagaaggccgcccagcaggccgccagcagcagcggccagggccagcaggcccagacccccaccggcaagcagaccgacaagaccaagagcaacatgaagggcttctag

SEQ ID NO: 75552 - DNA, 1029 bp, synthetic construct
  misc_feature 1..1029: note = Description of Artificial Sequence: Synthetic coding sequence
  source 1..1029: mol_type = other DNA
tgcagagaggagatcagcagaatcgagtacatccacagcaagaacttcatccacagagacgtgaagcccgacaacttcctgatgggcctgggcaagaagggcaacctggtgtacatcatcgacttcggcctggccaagaagtacagagacgccagaacccaccagcacatcccctacagagagaacaagaacctgaccggcaccgccagatacgccagcatcaacacccacctgggcatcgagcagagcagaagagacgacctggagagcctgggctacgtgctgatgtacttcaacctgggcagcctgccctggcagggcctgaaggccgccaccaagagacagaagtacgagagaatcagcgagaagaagatgagcacccccatcgaggtgctgtgcaagggctaccccagcgagttcgccacctacctgaacttctgcagaagcctgagattcgacgacaagcccgactacagctacctgagacagctgttcagaaacctgttccacagacagggcttcagctacgactacgtgttcgactggaacatgctgaagttcggcgccagcagagccgccgacgacgccgagagagagagaagagacagagaggagagactgagacacagcagaaaccccgccaccagaggcctgcccagcaccgccagcggcagactgagaggcacccaggaggtggccccccccacccccctgacccccaccagccacaccgccaacaccagccccagacccgtgagcggcatggagagagagagaaaggtgagcatgagactgcacagaggcgcccccgtgaacatcagcagcagcgacctgaccggcagacaggacaccagcagaatgagcaccagccaggtgggcgccgagctgcccggcggcagatgggccagcggctaccccgtgagagtgaagagcggcctgtggttcctgcagggcttcttcttccccttcttcccccccttcctgagagtgttcaacctggccagagtgtggagactgggctgcagatag

SEQ ID NO: 75553 - DNA, 1248 bp, synthetic construct
  misc_feature 1..1248: note = Description of Artificial Sequence: Synthetic coding sequence
  source 1..1248: mol_type = other DNA
atggagctgagagtgggcaacagatacagactgggcagaaagatcggcagcggcagcttcggcgacatctacctgggcaccgacatcgccgccggcgaggaggtggccatcaagctggagtgcgtgaagaccaagcacccccagctgcacatcgagagcaagatctacaagatgatgcagggcggcgtgggcatccccaccatcagatggtgcggcgccgagggcgactacaacgtgatggtgatggagctgctgggccccagcctggaggacctgttcaacttctgcagcagaaagttcagcctgaagaccgtgctgctgctggccgaccagatgatcagcagaatcgagtacatccacagcaagaacttcatccacagagacgtgaagcccgacaacttcctgatgggcctgggcaagaagggcaacctggtgtacatcatcgacttcggcctggccaagaagtacagagacgccagaacccaccagcacatcccctacagagagaacaagaacctgaccggcaccgccagatacgccagcatcaacacccacctgggcatcgagcagagcagaagagacgacctggagagcctgggctacgtgctgatgtacttcaacctgggcagcctgccctggcagggcctgaaggccgccaccaagagacagaagtacgagagaatcagcgagaagaagatgagcacccccatcgaggtgctgtgcaagggctaccccagcgagttcgccacctacctgaacttctgcagaagcctgagattcgacgacaagcccgactacagctacctgagacagctgttcagaaacctgttccacagacagggcttcagctacgactacgtgttcgactggaacatgctgaagttcggcgccagcagagccgccgacgacgccgagagagagagaagagacagagaggagagactgagacacagcagaaaccccgccaccagaggcctgcccagcaccgccagcggcagactgagaggcacccaggaggtggccccccccacccccctgacccccaccagccacaccgccaacaccagccccagacccgtgagcggcatggagagagagagaaaggtgagcatgagactgcacagaggcgcccccgtgaacatcagcagcagcgacctgaccggcagacaggacaccagcagaatgagcaccagccagatccccggcagagtggccagcagcggcctgcagagcgtggtgcacagatag

SEQ ID NO: 75554 - DNA, 1230 bp, synthetic construct
  misc_feature 1..1230: note = Description of Artificial Sequence: Synthetic coding sequence
  source 1..1230: mol_type = other DNA
atggagctgagagtgggcaacagatacagactgggcagaaagatcggcagcggcagcttcggcgacatctacctgggcaccgacatcgccgccggcgaggaggtggccatcaagctggagtgcgtgaagaccaagcacccccagctgcacatcgagagcaagatctacaagatgatgcagggcggcgtgggcatccccaccatcagatggtgcggcgccgagggcgactacaacgtgatggtgatggagctgctgggccccagcctggaggacctgttcaacttctgcagcagaaagttcagcctgaagaccgtgctgctgctggccgaccagatgatcagcagaatcgagtacatccacagcaagaacttcatccacagagacgtgaagcccgacaacttcctgatgggcctgggcaagaagggcaacctggtgtacatcatcgacttcggcctggccaagaagtacagagacgccagaacccaccagcacatcccctacagagagaacaagaacctgaccggcaccgccagatacgccagcatcaacacccacctgggcatcgagcagagcagaagagacgacctggagagcctgggctacgtgctgatgtacttcaacctgggcagcctgccctggcagggcctgaaggccgccaccaagagacagaagtacgagagaatcagcgagaagaagatgagcacccccatcgaggtgctgtgcaagggctaccccagcgagttcgccacctacctgaacttctgcagaagcctgagattcgacgacaagcccgactacagctacctgagacagctgttcagaaacctgttccacagacagggcttcagctacgactacgtgttcgactggaacatgctgaagttcggcgccagcagagccgccgacgacgccgagagagagagaagagacagagaggagagactgagacacagcagaaaccccgccaccagaggcctgcccagcaccgccagcggcagactgagaggcacccaggaggtggccccccccacccccctgacccccaccagccacaccgccaacaccagccccagacccgtgagcggcatggagagagagagaaaggtgagcatgagactgcacagaggcgcccccgtgaacatcagcagcagcgacctgaccggcagacaggacaccagcagaatgagcaccagccagaacagcatccccttcgagcaccacggcaagtag

SEQ ID NO: 75555 - DNA, 1077 bp, synthetic construct
  misc_feature 1..1077: note = Description of Artificial Sequence: Synthetic coding sequence
  source 1..1077: mol_type = other DNA
atgatgcagggcggcgtgggcatccccaccatcagatggtgcggcgccgagggcgactacaacgtgatggtgatggagctgctgggccccagcctggaggacctgttcaacttctgcagcagaaagttcagcctgaagaccgtgctgctgctggccgaccagatgatcagcagaatcgagtacatccacagcaagaacttcatccacagagacgtgaagcccgacaacttcctgatgggcctgggcaagaagggcaacctggtgtacatcatcgacttcggcctggccaagaagtacagagacgccagaacccaccagcacatcccctacagagagaacaagaacctgaccggcaccgccagatacgccagcatcaacacccacctgggcatcgagcagagcagaagagacgacctggagagcctgggctacgtgctgatgtacttcaacctgggcagcctgccctggcagggcctgaaggccgccaccaagagacagaagtacgagagaatcagcgagaagaagatgagcacccccatcgaggtgctgtgcaagggctaccccagcgagttcgccacctacctgaacttctgcagaagcctgagattcgacgacaagcccgactacagctacctgagacagctgttcagaaacctgttccacagacagggcttcagctacgactacgtgttcgactggaacatgctgaagttcggcgccagcagagccgccgacgacgccgagagagagagaagagacagagaggagagactgagacacagcagaaaccccgccaccagaggcctgcccagcaccgccagcggcagactgagaggcacccaggaggtggccccccccacccccctgacccccaccagccacaccgccaacaccagccccagacccgtgagcggcatggagagagagagaaaggtgagcatgagactgcacagaggcgcccccgtgaacatcagcagcagcgacctgaccggcagacaggacaccagcagaatgagcaccagccagatccccggcagagtggccagcagcggcctgcagagcgtggtgcacagatag

SEQ ID NO: 75556 - DNA, 381 bp, synthetic construct
  misc_feature 1..381: note = Description of Artificial Sequence: Synthetic coding sequence
  source 1..381: mol_type = other DNA
atggagctgagagtgggcaacagatacagactgggcagaaagatcggcagcggcagcttcggcgacatctacctgggcaccgacatcgccgccggcgaggaggtggccatcaagctggagtgcgtgaagaccaagcacccccagctgcacatcgagagcaagatctacaagatgatgcagggcggcgtgggcatccccaccatcagatggtgcggcgccgagggcgactacaacgtgatggtgatggagctgctgggccccagcctggaggacctgttcaacttctgcagcagaaagttcagcctgaagaccgtgctgctgctggccgaccagatgaacaaccccgaggagatgacctggagcctgtgggccacctgctag

SEQ ID NO: 75557 - DNA, 1251 bp, synthetic construct
  misc_feature 1..1251: note = Description of Artificial Sequence: Synthetic coding sequence
  source 1..1251: mol_type = other DNA
atggagctgagagtgggcaacaagtacagactgggcagaaagatcggcagcggcagcttcggcgacatctacctgggcgccaacatcgccagcggcgaggaggtggccatcaagctggagtgcgtgaagaccaagcacccccagctgcacatcgagagcaagttctacaagatgatgcagggcggcgtgggcatccccagcatcaagtggtgcggcgccgagggcgactacaacgtgatggtgatggagctgctgggccccagcctggaggacctgttcaacttctgcagcagaaagttcagcctgaagaccgtgctgctgctggccgaccagatgatcagcagaatcgagtacatccacagcaagaacttcatccacagagacgtgaagcccgacaacttcctgatgggcctgggcaagaagggcaacctggtgtacatcatcgacttcggcctggccaagaagtacagagacgccagaacccaccagcacatcccctacagagagaacaagaacctgaccggcaccgccagatacgccagcatcaacacccacctgggcatcgagcagagcagaagagacgacctggagagcctgggctacgtgctgatgtacttcaacctgggcagcctgccctggcagggcctgaaggccgccaccaagagacagaagtacgagagaatcagcgagaagaagatgagcacccccatcgaggtgctgtgcaagggctaccccagcgagttcagcacctacctgaacttctgcagaagcctgagattcgacgacaagcccgactacagctacctgagacagctgttcagaaacctgttccacagacagggcttcagctacgactacgtgttcgactggaacatgctgaagttcggcgccgccagaaaccccgaggacgtggacagagagagaagagagcacgagagagaggagagaatgggccagctgagaggcagcgccaccagagccctgccccccggcccccccaccggcgccaccgccaacagactgagaagcgccgccgagcccgtggccagcacccccgccagcagaatccagcccgccggcaacaccagccccagagccatcagcagagtggacagagagagaaaggtgagcatgagactgcacagaggcgcccccgccaacgtgagcagcagcgacctgaccggcagacaggaggtgagcagaatccccgccagccagaccagcgtgcccttcgaccacctgggcaagtag

SEQ ID NO: 75558 - DNA, 360 bp, synthetic construct
  misc_feature 1..360: note = Description of Artificial Sequence: Synthetic coding sequence
  source 1..360: mol_type = other DNA
tgaagaaaccccgaggacgtggacagagagagaagagagcacgagagagaggagagaatgggccagctgagaggcagcgccaccagagccctgccccccggcccccccaccggcgccaccgccaacagactgagaagcgccgccgagcccgtggccagcacccccgccagcagaatccagcccgccggcaacaccagccccagagccatcagcagagtggacagagagagaaaggtgagcatgagactgcacagaggcgcccccgccaacgtgagcagcagcgacctgaccggcagacaggaggtgagcagaatccccgccagccagaccagcgtgcccttcgaccacctgggcaagtag

SEQ ID NO: 75559 - DNA, 1251 bp, synthetic construct; identical to SEQ ID NO: 75557
  misc_feature 1..1251: note = Description of Artificial Sequence: Synthetic coding sequence
  source 1..1251: mol_type = other DNA

SEQ ID NO: 75560 - DNA, 1251 bp, synthetic construct; identical to SEQ ID NO: 75557
  misc_feature 1..1251: note = Description of Artificial Sequence: Synthetic coding sequence
  source 1..1251: mol_type = other DNA

SEQ ID NO: 75561 - DNA, 1251 bp, synthetic construct; identical to SEQ ID NO: 75557
  misc_feature 1..1251: note = Description of Artificial Sequence: Synthetic coding sequence
  source 1..1251: mol_type = other DNA

SEQ ID NO: 75562 - DNA, 1251 bp, synthetic construct; identical to SEQ ID NO: 75557
  misc_feature 1..1251: note = Description of Artificial Sequence: Synthetic coding sequence
  source 1..1251: mol_type = other DNA

SEQ ID NO: 75563 - DNA, 678 bp, synthetic construct
  misc_feature 1..678: note = Description of Artificial Sequence: Synthetic coding sequence
  source 1..678: mol_type = other DNA
atggagctgagagtgggcaacaagtacagactgggcagaaagatcggcagcggcagcttcggcgacatctacctgggcgccaacatcgccagcggcgaggaggtggccatcaagctggagtgcgtgaagaccaagcacccccagctgcacatcgagagcaagttctacaagatgatgcagggcggcgtgggcatccccagcatcaagtggtgcggcgccgagggcgactacaacgtgatggtgatggagctgctgggccccagcctggaggacctgttcaacttctgcagcagaaagttcagcctgaagaccgtgctgctgctggccgaccagatgatcagcagaatcgagtacatccacagcaagaacttcatccacagagacgtgaagcccgacaacttcctgatgggcctgggcaagaagggcaacctggtgtacatcatcgacttcggcctggccaagaagtacagagacgccagaacccaccagcacatcccctacagagagaacaagaacctgaccggcaccgccagatacgccagcatcaacacccacctgggcatcgagcagagcagaagagacgacctggagagcctgggctacgtgctgatgtacttcaacctgggcagcctgccctggcagggcctgaaggccgccaccaagagacagaagtactag

SEQ ID NO: 75564 - DNA, 435 bp, synthetic construct
  misc_feature 1..435: note = Description of Artificial Sequence: Synthetic coding sequence
  source 1..435: mol_type = other DNA
tgaagaaacctgttccacagacagggcttcagctacgactacgtgttcgactggaacatgctgaagttcggcgccgccagaaaccccgaggacgtggacagagagagaagagagcacgagagagaggagagaatgggccagctgagaggcagcgccaccagagccctgccccccggcccccccaccggcgccaccgccaacagactgagaagcgccgccgagcccgtggccagcacccccgccagcagaatccagcccgccggcaacaccagccccagagccatcagcagagtggacagagagagaaaggtgagcatgagactgcacagaggcgcccccgccaacgtgagcagcagcgacctgaccggcagacaggaggtgagcagaatccccgccagccagaccagcgtgcccttcgaccacctgggcaagtag

SEQ ID NO: 75565 - DNA, 1182 bp, synthetic construct
  misc_feature 1..1182: note = Description of Artificial Sequence: Synthetic coding sequence
  source 1..1182: mol_type = other DNA
atggaccaccccagcagagagaaggacgagagacagagaaccaccaagcccatggcccagagaagcgcccactgcagcagacccagcggcagcagcagcagcagcggcgtgctgatggtgggccccaacttcagagtgggcaagaagatcggctgcggcaacttcggcgagctgagactgggcaagaacctgtacaccaacgagtacgtggccatcaagctggagcccatcaagagcagagccccccagctgcacctggagtacagattctacaagcagctgggcagcgccggcgagggcctgccccaggtgtactacttcggcccctgcggcaagtacaacgccatggtgctggagctgctgggccccagcctggaggacctgttcgacctgtgcgacagaaccttcaccctgaagaccgtgctgatgatcgccatccagctgctgagcagaatggagtacgtgcacagcaagaacctgatctacagagacgtgaagcccgagaacttcctgatcggcagacagggcaacaagaaggagcacgtgatccacatcatcgacttcggcctggccaaggagtacatcgaccccgagaccaagaagcacatcccctacagagagcacaagagcctgaccggcaccgccagatacatgagcatcaacacccacctgggcaaggagcagagcagaagagacgacctggaggccctgggccacatgttcatgtacttcctgagaggcagcctgccctggcagggcctgaaggccgacaccctgaaggagagataccagaagatcggcgacaccaagagaaacacccccatcgaggccctgtgcgagaacttccccgaggagatggccacctacctgagatacgtgagaagactggacttcttcgagaagcccgactacgagtacctgagaaccctgttcaccgacctgttcgagaagaagggctacaccttcgactacgcctacgactgggtgggcagacccatccccacccccgtgggcagcgtgcacgtggacagcggcgccagcgccatcaccagagagagccacacccacagagacagacccagccagcagcagcccctgagaaaccagagcctgagaaccgtgaccgccgagcactacgacgtgaacaacagcgccatctggcacagaggcagaggcacctag

SEQ ID NO: 75566 - DNA, 1269 bp, synthetic construct
  misc_feature 1..1269: note = Description of Artificial Sequence: Synthetic coding sequence
  source 1..1269: mol_type = other DNA
atggaccaccccagcagagagaaggacgagagacagagaaccaccaagcccatggcccagagaagcgcccactgcagcagacccagcggcagcagcagcagcagcggcgtgctgatggtgggccccaacttcagagtgggcaagaagatcggctgcggcaacttcggcgagctgagactgggcaagaacctgtacaccaacgagtacgtggccatcaagctggagcccatcaagagcagagccccccagctgcacctggagtacagattctacaagcagctgggcagcgccggcgagggcctgccccaggtgtactacttcggcccctgcggcaagtacaacgccatggtgctggagctgctgggccccagcctggaggacctgttcgacctgtgcgacagaaccttcaccctgaagaccgtgctgatgatcgccatccagctgctgagcagaatggagtacgtgcacagcaagaacctgatctacagagacgtgaagcccgagaacttcctgatcggcagacagggcaacaagaaggagcacgtgatccacatcatcgacttcggcctggccaaggagtacatcgaccccgagaccaagaagcacatcccctacagagagcacaagagcctgaccggcaccgccagatacatgagcatcaacacccacctgggcaaggagcagagcagaagagacgacctggaggccctgggccacatgttcatgtacttcctgagaggcagcctgccctggcagggcctgaaggccgacaccctgaaggagagataccagaagatcggcgacaccaagagaaacacccccatcgaggccctgtgcgagaacttccccgaggagatggccacctacctgagatacgtgagaagactggacttcttcgagaagcccgactacgagtacctgagaaccctgttcaccgacctgttcgagaagaagggctacaccttcgactacgcctacgactgggtgggcagacccatccccacccccgtgggcagcgtgcacgtggacagcggcgccagcgccatcaccagagagagccacacccacagagacagacccagccagcagcagcccctgagaaaccaggtggtgagcagcaccaacggcgagctgaacgtggacgaccccaccggcgcccacagcaacgcccccatcaccgcccacgccgaggtggaggtggtggaggaggccaagtgctgctgcttcttcaagagaaagagaaagaagaccgcccagagacacaagtag

SEQ ID NO: 75567 - DNA, 1137 bp, synthetic construct
  misc_feature 1..1137: note = Description of Artificial Sequence: Synthetic coding sequence
  source 1..1137: mol_type = other DNA
atggaccaccccagcagagagaaggacgagagacagagaaccaccaagcccatggcccagagaagcgcccactgcagcagacccagcggcagcagcagcagcagcggcgtgctgatggtgggccccaacttcagagtgggcaagaagatcggctgcggcaacttcggcgagctgagactgggcaagaacctgtacaccaacgagtacgtggccatcaagctggagctgctgggccccagcctggaggacctgttcgacctgtgcgacagaaccttcaccctgaagaccgtgctgatgatcgccatccagctgctgagcagaatggagtacgtgcacagcaagaacctgatctacagagacgtgaagcccgagaacttcctgatcggcagacagggcaacaagaaggagcacgtgatccacatcatcgacttcggcctggccaaggagtacatcgaccccgagaccaagaagcacatcccctacagagagcacaagagcctgaccggcaccgccagatacatgagcatcaacacccacctgggcaaggagcagagcagaagagacgacctggaggccctgggccacatgttcatgtacttcctgagaggcagcctgccctggcagggcctgaaggccgacaccctgaaggagagataccagaagatcggcgacaccaagagaaacacccccatcgaggccctgtgcgagaacttccccgaggagatggccacctacctgagatacgtgagaagactggacttcttcgagaagcccgactacgagtacctgagaaccctgttcaccgacctgttcgagaagaagggctacaccttcgactacgcctacgactgggtgggcagacccatccccacccccgtgggcagcgtgcacgtggacagcggcgccagcgccatcaccagagagagccacacccacagagacagacccagccagcagcagcccctgagaaaccaggtggtgagcagcaccaacggcgagctgaacgtggacgaccccaccggcgcccacagcaacgcccccatcaccgcccacgccgaggtggaggtggtggaggaggccaagtgctgctgcttcttcaagagaaagagaaagaagaccgcccagagacacaagtag

SEQ ID NO: 75568 - DNA, 1248 bp, synthetic construct
  misc_feature 1..1248: note = Description of Artificial Sequence: Synthetic coding sequence
  source 1..1248: mol_type = other DNA
atggacttcgacaagaagggcggcaagggcgagaccgaggagggcagaagaatgagcaaggccggcggcggcagaagcagccacggcatcagaagcagcggcaccagcagcggcgtgctgatggtgggccccaacttcagagtgggcaagaagatcggctgcggcaacttcggcgagctgagactgggcaagaacctgtacaccaacgagtacgtggccatcaagctggagcccatcaagagcagagccccccagctgcacctggagtacagattctacaagcagctgagcgccaccgagggcgtgccccaggtgtactacttcggcccctgcggcaagtacaacgccatggtgctggagctgctgggccccagcctggaggacctgttcgacctgtgcgacagaaccttcaccctgaagaccgtgctgatgatcgccatccagctgatcaccagaatggagtacgtgcacaccaagagcctgatctacagagacgtgaagcccgagaacttcctggtgggcagacccggcaccaagagacagcacgccatccacatcatcgacttcggcctggccaaggagtacatcgaccccgagaccaagaagcacatcccctacagagagcacaagagcctgaccggcaccgccagatacatgagcatcaacacccacctgggcaaggagcagagcagaagagacgacctggaggccctgggccacatgttcatgtacttcctgagaggcagcctgccctggcagggcctgaaggccgacaccctgaaggagagataccagaagatcggcgacaccaagagagccacccccatcgaggtgctgtgcgagaacttccccgaggagatggccacctacctgagatacgtgagaagactggacttcttcgagaagcccgactacgactacctgagaaagctgttcaccgacctgttcgacagaagcggcttcgtgttcgactacgagtacgactgggccggcaagcccctgcccacccccatcggcaccgtgcacaccgacctgcccagccagccccagctgagagacaagacccagccccacagcaagaaccaggccctgaacagcaccaacggcgagctgaacgccgacgaccccaccgccggccacagcaacgcccccatcaccgcccccgccgaggtggaggtggccgacgagaccaagtgctgctgcttcttcaagagaagaaagagaaagagcctgcagagacacaagtag

SEQ ID NO: 75569 - DNA, 645 bp, synthetic construct
  misc_feature 1..645: note = Description of Artificial Sequence: Synthetic coding sequence
  source 1..645: mol_type = other DNA
atgagcatcaacacccacctgggcaaggagcagagcagaagagacgacctggaggccctgggccacatgttcatgtacttcctgagaggcagcctgccctggcagggcctgaaggccgacaccctgaaggagagataccagaagatcggcgacaccaagagagccacccccatcgaggtgctgtgcgagaacttccccgaggagatggccacctacctgagatacgtgagaagactggacttcttcgagaagcccgactacgactacctgagaaagctgttcaccgacctgttcgacagaagcggcttcgtgttcgactacgagtacgactgggccggcaagcccctgcccacccccatcggcaccgtgcacaccgacctgcccagccagccccagctgagagacaagacccagccccccgagagcagcccctgcagccccctgggcagagacctggtgagaggccccagaggcccccccaccgccgcccagggccagaccctggccggcagccagaacgccgactgcagaggcagagcctggctgagaagaccccaccccagagacgtgggcagcctgcccagctgcaagaccctggccgagatcagcacccccgtgagcagcccccccctgcaggagcactag

SEQ ID NO: 75570 - DNA, 1272 bp, synthetic construct
  misc_feature 1..1272: note = Description of Artificial Sequence: Synthetic coding sequence
  source 1..1272: mol_type = other DNA
atggagaacaagaagaaggacaaggacaagagcgacgacagaatggccagacccagcggcagaagcggccacaacaccagaggcaccggcagcagcagcagcggcgtgctgatggtgggccccaacttcagagtgggcaagaagatcggctgcggcaacttcggcgagctgagactgggcaagaacctgtacaccaacgagtacgtggccatcaagctggagcccatgaagagcagagccccccagctgcacctggagtacagattctacaagcagctgggcagcggcgacggcatcccccaggtgtactacttcggcccctgcggcaagtacaacgccatggtgctggagctgctgggccccagcctggaggacctgttcgacctgtgcgacagaaccttcagcctgaagaccgtgctgatgatcgccatccagctgatcagcagaatggagtacgtgcacagcaagaacctgatctacagagacgtgaagcccgagaacttcctgatcggcagacccggcaacaagacccagcaggtgatccacatcatcgacttcggcctggccaaggagtacatcgaccccgagaccaagaagcacatcccctacagagagcacaagagcctgaccggcaccgccagatacatgagcatcaacacccacctgggcaaggagcagagcagaagagacgacctggaggccctgggccacatgttcatgtacttcctgagaggcagcctgccctggcagggcctgaaggccgacaccctgaaggagagataccagaagatcggcgacaccaagagagccacccccatcgaggtgctgtgcgagaacttccccgagatggccacctacctgagatacgtgagaagactggacttcttcgagaagcccgactacgactacctgagaaagctgttcaccgacctgttcgacagaaagggctacatgttcgactacgagtacgactggatcggcaagcagctgcccacccccgtgggcgccgtgcagcaggaccccgccctgagcagcaacagagaggcccaccagcacagagacaagatgcagcagagcaagaaccaggtggtgagcagcaccaacggcgagctgaacaccgacgaccccaccgccggcagaagcaacgcccccatcaccgcccccaccgaggtggaggtgatggacgagaccaactgccagaaggtgctgaacatgtggtgctgctgcttcttcaagagaagaaagagaaagaccatccagagacacaagtag

SEQ ID NO: 75571 - DNA, 1368 bp, synthetic construct
  misc_feature 1..1368: note = Description of Artificial Sequence: Synthetic coding sequence
  source 1..1368: mol_type = other DNA
atggagaacaagaagaaggacaaggacaagagcgacgacagaatggccagacccagcggcagaagcggccacaacaccagaggcaccggcagcagcagcagcggcgtgctgatggtgggccccaacttcagagtgggcaagaagatcggctgcggcaacttcggcgagctgagactgggcaagaacctgtacaccaacgagtacgtggccatcaagctggagcccatgaagagcagagccccccagctgcacctggagtacagattctacaagcagctgggcagcggcgacggcatcccccaggtgtactacttcggcccctgcggcaagtacaacgccatggtgctggagctgctgggccccagcctggaggacctgttcgacctgtgcgacagaaccttcagcctgaagaccgtgctgatgatcgccatccagctgatcagcagaatggagtacgtgcacagcaagaacctgatctacagagacgtgaagcccgagaacttcctgatcggcagacccggcaacaagacccagcaggtgatccacatcatcgacttcggcctggccaaggagtacatcgaccccgagaccaagaagcacatcccctacagagagcacaagagcctgaccggcaccgccagatacatgagcatcaacacccacctgggcaaggagcagagcagaagagacgacctggaggccctgggccacatgttcatgtacttcctgagaggcagcctgccctggcagggcctgaaggccgacaccctgaaggagagataccagaagatcggcgacaccaagagagccacccccatcgaggtgctgtgcgagaacttccccgagatggccacctacctgagatacgtgagaagactggacttcttcgagaagcccgactacgactacctgagaaagctgttcaccgacctgttcgacagaaagggctacatgttcgactacgagtacgactggatcggcaagcagctgcccacccccgtgggcgccgtgcagcaggaccccgccctgagcagcaacagagaggcccaccagcacagagacaagatgcagcagagcaagaaccagagcgccgaccacagagccgcctgggacagccagcaggccaacccccaccacctgagagcccacctggccgccgacagacacggcggcagcgtgcaggtggtgagcagcaccaacggcgagctgaacaccgacgaccccaccgccggcagaagcaacgcccccatcaccgcccccaccgaggtggaggtgatggacgagaccaactgccagaaggtgctgaacatgtggtgctgctgcttcttcaagagaagaaagagaaagaccatccagagacacaagtag

SEQ ID NO: 75572 - DNA, 1344 bp, synthetic construct
  misc_feature 1..1344: note = Description of Artificial Sequence: Synthetic coding sequence
  source 1..1344: mol_type = other DNA
atggagaacaagaagaaggacaaggacaagagcgacgacagaatggccagacccagcggcagaagcggccacaacaccagaggcaccggcagcagcagcagcggcgtgctgatggtgggccccaacttcagagtgggcaagaagatcggctgcggcaacttcggcgagctgagactgggcaagaacctgtacaccaacgagtacgtggccatcaagctggagcccatgaagagcagagccccccagctgcacctggagtacagattctacaagcagctgggcagcggcgacggcatcccccaggtgtactacttcggcccctgcggcaagtacaacgccatggtgctggagctgctgggccccagcctggaggacctgttcgacctgtgcgacagaaccttcagcctgaagaccgtgctgatgatcgccatccagctgatcagcagaatggagtacgtgcacagcaagaacctgatctacagagacgtgaagcccgagaacttcctgatcggcagacccggcaacaagacccagcaggtgatccacatcatcgacttcggcctggccaaggagtacatcgaccccgagaccaagaagcacatcccctacagagagcacaagagcctgaccggcaccgccagatacatgagcatcaacacccacctgggcaaggagcagagcagaagagacgacctggaggccctgggccacatgttcatgtacttcctgagaggcagcctgccctggcagggcctgaaggccgacaccctgaaggagagataccagaagatcggcgacaccaagagagccacccccatcgaggtgctgtgcgagaacttccccgagatggccacctacctgagatacgtgagaagactggacttcttcgagaagcccgactacgactacctgagaaagctgttcaccgacctgttcgacagaaagggctacatgttcgactacgagtacgactggatcggcaagcagctgcccacccccgtgggcgccgtgcagcaggaccccgccctgagcagcaacagagaggcccaccagcacagagacaagatgcagcagagcaagaaccagagcgccgaccacagagccgcctgggacagccagcaggccaacccccaccacctgagagcccacctggccgccgacagacacggcggcagcgtgcaggtggtgagcagcaccaacggcgagctgaacaccgacgaccccaccgccggcagaagcaacgcccccatcaccgcccccaccgaggtggaggtgatggacgagaccaagtgctgctgcttcttcaagagaagaaagagaaagaccatccagagacacaagtag

SEQ ID NO: 75573 - DNA, 1344 bp, synthetic construct; identical to SEQ ID NO: 75572
  misc_feature 1..1344: note = Description of Artificial Sequence: Synthetic coding sequence
  source 1..1344: mol_type = other DNA

SEQ ID NO: 75574 - DNA, 1368 bp, synthetic construct; identical to SEQ ID NO: 75571
  misc_feature 1..1368: note = Description of Artificial Sequence: Synthetic coding sequence
  source 1..1368: mol_type = other DNA

SEQ ID NO: 75575 - DNA, 1275 bp, synthetic construct
  misc_feature 1..1275: note = Description of Artificial Sequence: Synthetic coding sequence
  source 1..1275: mol_type = other DNA
atggagaacaagaagaaggacaaggacaagagcgacgacagaatggccagacccagcggcagaagcggccacaacaccagaggcaccggcagcagcagcagcggcgtgctgatggtgggccccaacttcagagtgggcaagaagatcggctgcggcaacttcggcgagctgagactgggcaagaacctgtacaccaacgagtacgtggccatcaagctggagcccatgaagagcagagccccccagctgcacctggagtacagattctacaagcagctgggcagcggcgacggcatcccccaggtgtactacttcggcccctgcggcaagtacaacgccatggtgctggagctgctgggccccagcctggaggacctgttcgacctgtgcgacagaaccttcagcctgaagaccgtgctgatgatcgccatccagctgatcagcagaatggagtacgtgcacagcaagaacctgatctacagagacgtgaagcccgagaacttcctgatcggcagacccggcaacaagacccagcaggtgatccacatcatcgacttcggcctggccaaggagtacatcgaccccgagaccaagaagcacatcccctacagagagcacaagagcctgaccggcaccgccagatacatgagcatcaacacccacctgggcaaggagcagagcagaagagacgacctggaggccctgggccacatgttcatgtacttcctgagaggcagcctgccctggcagggcctgaaggccgacaccctgaaggagagataccagaagatcggcgacaccaagagagccacccccatcgaggtgctgtgcgagaacttccccgaggagatggccacctacctgagatacgtgagaagactggacttcttcgagaagcccgactacgactacctgagaaagctgttcaccgacctgttcgacagaaagggctacatgttcgactacgagtacgactggatcggcaagcagctgcccacccccgtgggcgccgtgcagcaggaccccgccctgagcagcaacagagaggcccaccagcacagagacaagatgcagcagagcaagaaccaggtggtgagcagcaccaacggcgagctgaacaccgacgaccccaccgccggcagaagcaacgcccccatcaccgcccccaccgaggtggaggtgatggacgagaccaactgccagaaggtgctgaacatgtggtgctgctgcttcttcaagagaagaaagagaaagaccatccagagacacaagtag

SEQ ID NO: 75576 - DNA, 1272 bp, synthetic construct; identical to SEQ ID NO: 75570
  misc_feature 1..1272: note = Description of Artificial Sequence: Synthetic coding sequence
  source 1..1272: mol_type = other DNA

SEQ ID NO: 75577 - DNA, 648 bp, synthetic construct
  misc_feature 1..648: note = Description of Artificial Sequence: Synthetic coding sequence
  source 1..648: mol_type = other DNA
atgagcagcagcgaggaggtgagctggatcagctggttctgcggcctgagaggcaacgagttcttctgcgaggtggacgaggactacatccaggacaagttcaacctgaccggcctgaacgagcaggtgccccactacagacaggccctggacatgatcctggacctggagcccgacgaggagctggaggacaaccccaaccagagcgacctgatcgagcaggccgccgagatgctgtacggcctgatccacgccagatacatcctgaccaacagaggcatcgcccagatgctggagaagtaccagcagggcgacttcggctactgccccagagtgtactgcgagaaccagcccatgctgcccatcggcctgagcgacatccccggcgaggccatggtgaagctgtactgccccaagtgcatggacgtgtacacccccaagagcagcagacaccaccacaccgacggcgcctacttcggcaccggcttcccccacatgctgttcatggtgcaccccgagtacagacccaagagacccgccaaccagttcgtgcccagactgtacggcttcaagatccaccccatggcctaccagctgcagctgcaggccgccagcaacttcaagagccccgtgaagaccatcagatag

SEQ ID NO: 75578 - DNA, 648 bp, synthetic construct; identical to SEQ ID NO: 75577
  misc_feature 1..648: note = Description of Artificial Sequence: Synthetic coding sequence
  source 1..648: mol_type = other DNA

SEQ ID NO: 75579 - DNA, 648 bp, synthetic construct; identical to SEQ ID NO: 75577
  misc_feature 1..648: note = Description of Artificial Sequence: Synthetic coding sequence
  source 1..648: mol_type = other DNA

SEQ ID NO: 75580 - DNA, 648 bp, synthetic construct; identical to SEQ ID NO: 75577
  misc_feature 1..648: note = Description of Artificial Sequence: Synthetic coding sequence
  source 1..648: mol_type = other DNA

SEQ ID NO: 75581 - DNA, 687 bp, synthetic construct
  misc_feature 1..687: note = Description of Artificial Sequence: Synthetic coding sequence
  source 1..687: mol_type = other DNA
atgagcagcagcgaggaggtgagctggatcagctggttctgcggcctgagaggcaacgagttcttctgcgaggtggacgaggactacatccaggacaagttcaacctgaccggcctgaacgagcaggtgccccactacagacaggccctggacatgatcctggacctggagcccgacgaggagctggaggacaaccccaaccagagcgacctgatcgagcaggccgccgagatgctgtacggcctgatccacgccagatacatcctgaccaacagaggcatcgcccagatgctggagaagtaccagcagggcgacttcggctactgccccagagtgtactgcgagaaccagcccatgctgcccatcggcctgagcgacatccccggcgaggccatggtgaagctgtactgccccaagtgcatggacgtgtacacccccaagagcagcagacaccaccacaccgacggcgcctacttcggcaccggcttcccccacatgctgttcatggtgcaccccgagtacagacccaagagacccgccaaccagttcgtgcccagcagctgcagcagacaccccgacgtgcccctgctgcccagaagaagacccttctgcagaatgcacttcagactgagagaggtgtaccaccagcagctgatccccgtgcacggcgaccaccacctgctgtag

SEQ ID NO: 75582 - DNA, 648 bp, synthetic construct; identical to SEQ ID NO: 75577
  misc_feature 1..648: note = Description of Artificial Sequence: Synthetic coding sequence
  source 1..648: mol_type = other DNA

SEQ ID NO: 75583 - DNA, 648 bp, synthetic construct; identical to SEQ ID NO: 75577
  misc_feature 1..648: note = Description of Artificial Sequence: Synthetic coding sequence
  source 1..648: mol_type = other DNA

SEQ ID NO: 75584 - DNA, 705 bp, synthetic construct
  misc_feature 1..705: note = Description of Artificial Sequence: Synthetic coding sequence
  source 1..705: mol_type = other DNA
atggagaagtgcaagggcaccagcagaatggccggcaccaccagcgccgacgtgaagatgagcagcagcgaggaggtgagctggatcagctggttctgcggcctgagaggcaacgagttcttctgcgaggtggacgaggactacatccaggacaagttcaacctgaccggcctgaacgagcaggtgccccactacagacaggccctggacatgatcctggacctggagcccgacgaggagctggaggacaaccccaaccagagcgacctgatcgagcaggccgccgagatgctgtacggcctgatccacgccagatacatcctgaccaacagaggcatcgcccagatgctggagaagtaccagcagggcgacttcggctactgccccagagtgtactgcgagaaccagcccatgctgcccatcggcctgagcgacatccccggcgaggccatggtgaagctgtactgccccaagtgcatggacgtgtacacccccaagagcagcagacaccaccacaccgacggcgcctacttcggcaccggcttcccccacatgctgttcatggtgcaccccgagtacagacccaagagacccgccaaccagttcgtgcccagactgtacggcttcaagatccaccccatggcctaccagctgcagctgcaggccgccagcaacttcaagagccccgtgaagaccatcagatag

SEQ ID NO: 75585 - DNA, 648 bp, synthetic construct; identical to SEQ ID NO: 75577
  misc_feature 1..648: note = Description of Artificial Sequence: Synthetic coding sequence
  source 1..648: mol_type = other DNA

SEQ ID NO: 75586 - DNA, 687 bp, synthetic construct; identical to SEQ ID NO: 75581
  misc_feature 1..687: note = Description of Artificial Sequence: Synthetic coding sequence
  source 1..687: mol_type = other DNA

SEQ ID NO: 75587 - DNA, 687 bp, synthetic construct; identical to SEQ ID NO: 75581
  misc_feature 1..687: note = Description of Artificial Sequence: Synthetic coding sequence
  source 1..687: mol_type = other DNA

SEQ ID NO: 75588 - DNA, 648 bp, synthetic construct; identical to SEQ ID NO: 75577
  misc_feature 1..648: note = Description of Artificial Sequence: Synthetic coding sequence
  source 1..648: mol_type = other DNA

SEQ ID NO: 75589 - DNA, 705 bp, synthetic construct; identical to SEQ ID NO: 75584
  misc_feature 1..705: note = Description of Artificial Sequence: Synthetic coding sequence
  source 1..705: mol_type = other DNA

SEQ ID NO: 75590 - DNA, 648 bp, synthetic construct; identical to SEQ ID NO: 75577
  misc_feature 1..648: note = Description of Artificial Sequence: Synthetic coding sequence
  source 1..648: mol_type = other DNA

SEQ ID NO: 75591 - DNA, 705 bp, synthetic construct; identical to SEQ ID NO: 75584
  misc_feature 1..705: note = Description of Artificial Sequence: Synthetic coding sequence
  source 1..705: mol_type = other DNA

SEQ ID NO: 75592 - DNA, 705 bp, synthetic construct; identical to SEQ ID NO: 75584
  misc_feature 1..705: note = Description of Artificial Sequence: Synthetic coding sequence
  source 1..705: mol_type = other DNA

SEQ ID NO: 75593 - DNA, 648 bp, synthetic construct; identical to SEQ ID NO: 75577
  misc_feature 1..648: note = Description of Artificial Sequence: Synthetic coding sequence
  source 1..648: mol_type = other DNA

SEQ ID NO: 75594 - DNA, 648 bp, synthetic construct; identical to SEQ ID NO: 75577
  misc_feature 1..648: note = Description of Artificial Sequence: Synthetic coding sequence
  source 1..648: mol_type = other DNA

SEQ ID NO: 75595 - DNA, 705 bp, synthetic construct; identical to SEQ ID NO: 75584
  misc_feature 1..705: note = Description of Artificial Sequence: Synthetic coding sequence
  source 1..705: mol_type = other DNA

SEQ ID NO: 75596 - DNA, 648 bp, synthetic construct; identical to SEQ ID NO: 75577
  misc_feature 1..648: note = Description of Artificial Sequence: Synthetic coding sequence
  source 1..648: mol_type = other DNA

SEQ ID NO: 75597 - DNA, 687 bp, synthetic construct; identical to SEQ ID NO: 75581
  misc_feature 1..687: note = Description of Artificial Sequence: Synthetic coding sequence
  source 1..687: mol_type = other DNA

SEQ ID NO: 75598 - DNA, 705 bp, synthetic construct; identical to SEQ ID NO: 75584
  misc_feature 1..705: note = Description of Artificial Sequence: Synthetic coding sequence
  source 1..705: mol_type = other DNA

SEQ ID NO: 75599 - DNA, 648 bp, synthetic construct; identical to SEQ ID NO: 75577
  misc_feature 1..648: note = Description of Artificial Sequence: Synthetic coding sequence
  source 1..648: mol_type = other DNA

SEQ ID NO: 75600 - DNA, 648 bp, synthetic construct; identical to SEQ ID NO: 75577
  misc_feature 1..648: note = Description of Artificial Sequence: Synthetic coding sequence
  source 1..648: mol_type = other DNA

SEQ ID NO: 75601 - DNA, 648 bp, synthetic construct; identical to SEQ ID NO: 75577
  misc_feature 1..648: note = Description of Artificial Sequence: Synthetic coding sequence
  source 1..648: mol_type = other DNA

SEQ ID NO: 75602 - DNA, 648 bp, synthetic construct; identical to SEQ ID NO: 75577
  misc_feature 1..648: note = Description of Artificial Sequence: Synthetic coding sequence
  source 1..648: mol_type = other DNA

SEQ ID NO: 75603 - DNA, 648 bp, synthetic construct; identical to SEQ ID NO: 75577
  misc_feature 1..648: note = Description of Artificial Sequence: Synthetic coding sequence
  source 1..648: mol_type = other DNA

SEQ ID NO: 75604 - DNA, 648 bp, synthetic construct; identical to SEQ ID NO: 75577
  misc_feature 1..648: note = Description of Artificial Sequence: Synthetic coding sequence
  source 1..648: mol_type = other DNA

SEQ ID NO: 75605 - DNA, 648 bp, synthetic construct; identical to SEQ ID NO: 75577
  misc_feature 1..648: note = Description of Artificial Sequence: Synthetic coding sequence
  source 1..648: mol_type = other DNA

SEQ ID NO: 75606 - DNA, 648 bp, synthetic construct; identical to SEQ ID NO: 75577
  misc_feature 1..648: note = Description of Artificial Sequence: Synthetic coding sequence
  source 1..648: mol_type = other DNA

SEQ ID NO: 75607 - DNA, 648 bp, synthetic construct; identical to SEQ ID NO: 75577
  misc_feature 1..648: note = Description of Artificial Sequence: Synthetic coding sequence
  source 1..648: mol_type = other DNA

SEQ ID NO: 75608 - DNA, 4296 bp, synthetic construct
  misc_feature 1..4296: note = Description of Artificial Sequence: Synthetic coding sequence
  source 1..4296: mol_type = other DNA
atgggcaaggagcaggagctggtgcaggccgtgaaggccgaggacgtgggcaccgcccagagactgctgcagagacccagacccggcaaggccaagctgctgggcagcaccaagaagatcaacgtgaacttccaggaccccgacggcttcagcgccctgcaccacgccgccctgaacggcaacaccgagctgatcagcctgctgctggaggcccaggccgccgtggacatcaaggacaacaagggcatgagacccctgcactacgccgcctggcagggcagaaaggagcccatgaagctggtgctgaaggccggcagcgccgtgaacatccccagcgacgagggccacatccccctgcacctggccgcccagcacggccactacgacgtgagcgagatgctgctgcagcaccagagcaacccctgcatggtggacaacagcggcaagacccccctggacctggcctgcgagttcggcagagtgggcgtggtgcagctgctgctgagcagcaacatgtgcgccgccctgctggagcccagacccggcgacgccaccgaccccaacggcaccagccccctgcacctggccgccaagaacggccacatcgacatcatcagactgctgctgcaggccggcatcgacatcaacagacagaccaagagcggcaccgccctgcacgaggccgccctgtgcggcaagaccgaggtggtgagactgctgctggacagcggcatcaacgcccacgtgagaaacacctacagccagaccgccctggacatcgtgcaccagttcaccaccagccaggccagcagagagatcaagcagctgctgagagaggccagcgccgccctgcaggtgagagccaccaaggactactgcaacaactacgacctgaccagcctgaacgtgaaggccggcgacatcatcaccgtgctggagcagcaccccgacggcagatggaagggctgcatccacgacaacagaaccggcaacgacagagtgggctacttccccagcagcctgggcgaggccatcgtgaagagagccggcagcagagccggcaccgagcccagcctgccccagggcagcagcagcagcggccccagcgccccccccgaggagatctgggtgctgagaaagcccttcgccggcggcgacagaagcggcagcatcagcggcatggccggcggcagaggcagcggcggccacgccctgcacgccggcagcgagggcgtgaagctgctggccaccgtgctgagccagaagagcgtgagcgagagcggccccggcgacagccccgccaagccccccgagggcagcgccggcgtggccagaagccagccccccgtggcccacgccggccaggtgtacggcgagcagccccccaagaagctggagcccgccagcgagggcaagagcagcgaggccgtgagccagtggctgaccgccttccagctgcagctgtacgcccccaacttcatcagcgccggctacgacctgcccaccatcagcagaatgacccccgaggacctgaccgccatcggcgtgaccaagcccggccacagaaagaagatcgccgccgagatcagcggcctgagcatccccgactggctgcccgagcacaagcccgccaacctggccgtgtggctgagcatgatcggcctggcccagtactacaaggtgctggtggacaacggctacgagaacatcgacttcatcaccgacatcacctgggaggacctgcaggagatcggcatcaccaagctgggccaccagaagaagctgatgctggccgtgagaaagctggccgagctgcagaaggccgagtacgccaagtacgagggcggccccctgagaagaaaggccccccagagcctggaggtgatggccatcgagagcccccccccccccgagcccacccccgccgactgccagagccccaagatgaccaccttccaggacagcgagctgagcgacgagctgcaggccgccatgaccggccccgccgaggtgggccccaccaccgagaagcccagcagccacctgccccccacccccagagccaccaccagacaggacagcagcctgggcggcagagccagacacatgagcagcagccaggagctgctgggcgacggcccccccggccccagcagccccatgagcagaagccaggagtacctgctggacgagggccccgcccccggcaccccccccagagaggccagacccggcagacacggccacagcatcaagagagccagcgtgccccccgtgcccggcaagcccagacaggtgctgccccccggcaccagccacttcacccccccccagacccccaccaagaccagacccggcagcccccaggccctgggcggcccccacggccccgcccccgccaccgccaaggtgaagcccaccccccagctgctgccccccaccgagagacccatgagccccagaagcctgccccagagccccacccacagaggcttcgcctacgtgctgccccagcccgtggagggcgaggtgggccccgccgcccccggccccgcccccccccccgtgcccaccgccgtgcccaccctgtgcctgccccccgaggccgacgccgagcccggcagacccaagaagagagcccacagcctgaacagatacgccgccagcgacagcgagcccgagagagacgagctgctggtgcccgccgccgccggcccctacgccaccgtgcagagaagagtgggcagaagccacagcgtgagagcccccgccggcgccgacaagaacgtgaacagaagccagagcttcgccgtgagacccagaaagaagggcccccccccccccccccccaagagaagcagcagcgccctggccagcgccaacctggccgacgagcccgtgcccgacgccgagcccgaggacggcctgctgggcgtgagagcccagtgcagaagagccagcgacctggccggcagcgtggacaccggcagcgccggcagcgtgaagagcatcgccgccatgctggagctgagcagcatcggcggcggcggcagagccgccagaagaccccccgagggccaccccacccccagacccgccagccccgagcccggcagagtggccaccgtgctggccagcgtgaagcacaaggaggccatcggccccggcggcgaggtggtgaacagaagaagaaccctgagcggccccgtgaccggcctgctggccaccgccagaagaggccccggcgagagcgccgaccccggccccttcgtggaggacggcaccggcagacagagacccagaggccccagcaagggcgaggccggcgtggagggcccccccctggccaaggtggaggccagcgccaccctgaagagaagaatcagagccaagcagaaccagcaggagaacgtgaagttcatcctgaccgagagcgacaccgtgaagagaagacccaaggccaaggagagagaggccggccccgagccccccccccccctgagcgtgtaccacaacggcaccggcaccgtgagaagaagacccgccagcgagcaggccggcccccccgagctgccccccccccccccccccgccgagcccccccccaccgacctggcccacctgccccccctgcccccccccgagggcgaggccagaaagcccgccaagccccccgtgagccccaagcccgtgctgacccagcccgtgcccaagctgcagggcagccccacccccaccagcaagaaggtgcccctgcccggccccggcagccccgaggtgaagagagcccacggcacccccccccccgtgagccccaagcccccccccccccccaccgcccccaagcccgtgaaggccgtggccggcctgcccagcggcagcgccggccccagccccgcccccagccccgccagacagccccccgccgccctggccaagccccccggcaccccccccagcctgggcgccagccccgccaagccccccagccccggcgcccccgccctgcacgtgcccgccaagccccccagagccgccgccgccgccgccgccgccgccgccgccccccccgccccccccgagggcgccagccccggcgacagcgccagacagaagctggaggagaccagcgcctgcctggccgccgccctgcaggccgtggaggagaagatcagacaggaggacgcccagggccccagagacagcgccgccgagaagagcaccggcagcatcctggacgacatcggcagcatgttcgacgacctggccgaccagctggacgccatgctggagtag

SEQ ID NO: 75609 - DNA, 2115 bp, synthetic construct
  misc_feature 1..2115: note = Description of Artificial Sequence: Synthetic coding sequence
  source 1..2115: mol_type = other DNA
atgtgcgccgccctgctggagcccagacccggcgacgccaccgaccccaacggcaccagccccctgcacctggccgccaagaacggccacatcgacatcatcagactgctgctgcaggccggcatcgacatcaacagacagaccaagagcggcaccgccctgcacgaggccgccctgtgcggcaagaccgaggtggtgagactgctgctggacagcggcatcaacgcccacgtgagaaacacctacagccagaccgccctggacatcgtgcaccagttcaccaccagccaggccagcagagagatcaagcagctgctgagagaggccagcgccgccctgcaggtgagagccaccaaggactactgcaacaactacgacctgaccagcctgaacgtgaaggccggcgacatcatcaccgtgctggagcagcaccccgacggcagatggaagggctgcatccacgacaacagaaccggcaacgacagagtgggctacttccccagcagcctgggcgaggccatcgtgaagagagccggcagcagagccggcaccgagcccagcctgccccagggcagcagcagcagcggccccagcgccccccccgaggagatctgggtgctgagaaagcccttcgccggcggcgacagaagcggcagcatcagcggcatggccggcggcagaggcagcggcggccacgccctgcacgccggcagcgagggcgtgaagctgctggccaccgtgctgagccagaagagcgtgagcgagagcggccccggcgacagccccgccaagccccccgagggcagcgccggcgtggccagaagccagccccccgtggcccacgccggccaggtgtacggcgagcagccccccaagaagctggagcccgccagcgagggcaagagcagcgaggccgtgagccagtggctgaccgccttccagctgcagctgtacgcccccaacttcatcagcgccggctacgacctgcccaccatcagcagaatgacccccgaggacctgaccgccatcggcgtgaccaagcccggccacagaaagaagatcgccgccgagatcagcggcctgagcatccccgactggctgcccgagcacaagcccgccaacctggccgtgtggctgagcatgatcggcctggcccagtactacaaggtgctggtggacaacggctacgagaacatcgacttcatcaccgacatcacctgggaggacctgcaggagatcggcatcaccaagctgggccaccagaagaagctgatgctggccgtgagaaagctggccgagctgcagaaggccgagtacgccaagtacgagggcggccccctgagaagaaaggccccccagagcctggaggtgatggccatcgagagcccccccccccccgagcccacccccgccgactgccagagccccaagatgaccaccttccaggacagcgagctgagcgacgagctgcaggccgccatgaccggccccgccgaggtgggccccaccaccgagaagcccagcagccacctgccccccacccccagagccaccaccagacaggacagcagcctgggcggcagagccagacacatgagcagcagccaggagctgctgggcgacggcccccccggccccagcagccccatgagcagaagccaggagtacctgctggacgagggccccgcccccggcaccccccccagagaggccagacccggcagacacggccacagcatcaagagagccagcgtgccccccgtgcccggcaagcccagacaggtgctgccccccggcaccagccacttcacccccccccagacccccaccaagaccagacccggcagcccccaggccctgggcggcccccacggccccgcccccgccaccgccaaggtgaagcccaccccccagctgctgccccccaccgagagacccatgagccccagaagcctgccccagagccccacccagagaaccggccccggccccgcccagaactgccccagcggcagacccgccagcagaagcggcgccgcccagggcaccggcgaccagggccagggcccccccgcccccccccacccccagaacatcagctaccaggagtactag

SEQ ID NO: 75610 - DNA, 3609 bp, synthetic construct
  misc_feature 1..3609: note = Description of Artificial Sequence: Synthetic coding sequence
  source 1..3609: mol_type = other DNA
atgggcagagagcaggacctgatcctggccgtgaagaacggcgacgtgaccggcgtgcagaagctggtggccaaggtgaaggccaccaagaccaagctgctgggcagcaccaagagactgaacgtgaactaccaggacgccgacggcttcagcgccctgcaccacgccgccctgggcggcagcctggagctgatcgccctgctgctggaggcccaggccaccgtggacatcaaggacagcaacggcatgagacccctgcactacgccgcctggcagggcagactggagcccgtgagactgctgctgagagccagcgccgccgtgaacgccgccagcctggacggccagatccccctgcacctggccgcccagtacggccactacgaggtgagcgagatgctgctgcagcaccagagcaacccctgcctggtgaacaaggccaagaagacccccctggacctggcctgcgagttcggcagactgaaggtggcccagctgctgctgaacagccacctgtgcgtggccctgctggagggcgaggccaaggacccctgcgaccccaactacaccacccccctgcacctggccgccaagaacggccacagagaggtgatcagacagctgctgagagccggcatcgagatcaacagacagaccaagaccggcaccgccctgcacgaggccgccctgtacggcaagaccgaggtggtgagactgctgctggagggcggcgtggacgtgaacatcagaaacacctacaaccagaccgccctggacatcgtgaaccagttcaccaccagccaggccagcagagagatcaagcagctgctgagagaggccagcggcatcctgaaggtgagagccctgaaggacttctggaacctgcacgaccccaccgccctgaacgtgagagccggcgacgtgatcaccgtgctggagcagcaccccgacggcagatggaagggccacatccacgagagccagagaggcaccgacagaatcggctacttcccccccggcatcgtggaggtggtgagcaagagagtgggcatccccgccgccagactgcccagcgcccccacccccctgagacccggcttcagcagaaccccccagccccccgccgaggagcccccccaccccctgacctacagccagctgcccagagtgggcctgagccccgacagccccgccggcgacagaaacagcgtgggcagcgagggcagcgtgggcagcatcagaagcgccggcagcggccagagcagcgagggcaccaacggccacggccccggcctgctgatcgagaacgcccagcccctgcccagcgccggcgaggaccaggtgctgcccggcctgcacccccccagcctggccgacaacctgagccacagacccctggccaactgcagaagcggcgagcagatcttcacccaggacgtgagacccgagcagctgctggagggcaaggacgcccaggccatccacaactggctgagcgagttccagctggagggctacaccgcccacttcctgcaggccggctacgacgtgcccaccatcagcagaatgacccccgaggacctgaccgccatcggcgtgaccaagcccggccacagaaagaagatcgccagcgagatcgcccagctgagcatcgccgagtggctgcccagctacatccccaccgacctgctggagtggctgtgcgccctgggcctgccccagtaccacaagcagctggtgagcagcggctacgacagcatgggcctggtggccgacctgacctgggaggagctgcaggagatcggcgtgaacaagctgggccaccagaagaagctgatgctgggcgtgaagagactggccgagctgagaagaggcctgctgcagggcgaggccctgagcgagggcggcagaagactggccaagggccccgagctgatggccatcgagggcctggagaacggcgagggccccgccaccgccggccccagactgctgaccttccagggcagcgagctgagccccgagctgcaggccgccatggccggcggcggccccgagcccctgcccctgccccccgccagaagccccagccaggagagcatcggcgccagaagcagaggcagcggccacagccaggagcagcccgccccccagcccagcggcggcgaccccagccccccccaggagagaaacctgcccgagggcaccgagagaccccccaagctgtgcagcagcctgcccggccagggcccccccccctacgtgttcatgtacccccagggcagccccagcagccccgcccccggccccccccccggcgccccctgggccttcagctacctggccggcccccccgccaccccccccgacccccccagacccaagagaagaagccacagcctgagcagacccggccccaccgagggcgacgccgagggcgaggccgagggccccgtgggcagcaccctgggcagctacgccaccctgaccagaagacccggcagaagcgccctggtgagaaccagccccagcgtgacccccacccccgccagaggcacccccagaagccagagcttcgccctgagagccagaagaaagggcccccccccccccccccccaagagactgagcagcgtgagcggccccagccccgagcccccccccctggacgagagccccggccccaaggagggcgccaccggccccagaagaagaaccctgagcgagcccgccggccccagcgagccccccggcccccccgcccccgccggccccgccagcgacaccgaggaggaggagcccggccccgagggcaccccccccagcagaggcagcagcggcgagggcctgcccttcgccgaggagggcaacctgaccatcaagcagagacccaagcccgccggccccccccccagagagacccccgtgccccccggcctggacttcaacctgaccgagagcgacaccgtgaagagaagacccaagtgcagagagagagagcccctgcagaccgccctgctggccttcggcgtggccagcgccacccccggccccgccgcccccctgcccagccccacccccggcgagagcccccccgccagcagcctgccccagcccgagcccagcagcctgcccgcccagggcgtgcccacccccctggcccccagccccgccatgcagccccccgtgcccccctgccccggccccggcctggagagcagcgccgccagcagatggaacggcgagaccgagccccccgccgcccccgccgccctgctgaaggtgcccggcgccggcaccgcccccaagcccgtgagcgtggcctgcacccagctggccttcagcggccccaagctggcccccagactgggccccagacccgtgcccccccccagacccgagagcaccggcaccgtgggccccggccaggcccagcagagactggagcagaccagcagcagcctggccgccgccctgagagccgccgagaagagcatcggcaccaaggagcaggagggcacccccagcgccagcaccaagcacatcctggacgacatcagcaccatgttcgacgccctggccgaccagctggacgccatgctggactag

SEQ ID NO: 75611 - DNA, 3363 bp, synthetic construct
  misc_feature 1..3363: note = Description of Artificial Sequence: Synthetic coding sequence
  source 1..3363: mol_type = other DNA
atgagacccctgcactacgccgcctggcagggcagactggagcccgtgagactgctgctgagagccagcgccgccgtgaacgccgccagcctggacggccagatccccctgcacctggccgcccagtacggccactacgaggtgagcgagatgctgctgcagcaccagagcaacccctgcctggtgaacaaggccaagaagacccccctggacctggcctgcgagttcggcagactgaaggtggcccagctgctgctgaacagccacctgtgcgtggccctgctggagggcgaggccaaggacccctgcgaccccaactacaccacccccctgcacctggccgccaagaacggccacagagaggtgatcagacagctgctgagagccggcatcgagatcaacagacagaccaagaccggcaccgccctgcacgaggccgccctgtacggcaagaccgaggtggtgagactgctgctggagggcggcgtggacgtgaacatcagaaacacctacaaccagaccgccctggacatcgtgaaccagttcaccaccagccaggccagcagagagatcaagcagctgctgagagaggccagcggcatcctgaaggtgagagccctgaaggacttctggaacctgcacgaccccaccgccctgaacgtgagagccggcgacgtgatcaccgtgctggagcagcaccccgacggcagatggaagggccacatccacgagagccagagaggcaccgacagaatcggctacttcccccccggcatcgtggaggtggtgagcaagagagtgggcatccccgccgccagactgcccagcgcccccacccccctgagacccggcttcagcagaaccccccagccccccgccgaggagcccccccaccccctgacctacagccagctgcccagagtgggcctgagccccgacagccccgccggcgacagaaacagcgtgggcagcgagggcagcgtgggcagcatcagaagcgccggcagcggccagagcagcgagggcaccaacggccacggccccggcctgctgatcgagaacgcccagcccctgcccagcgccggcgaggaccaggtgctgcccggcctgcacccccccagcctggccgacaacctgagccacagacccctggccaactgcagaagcggcgagcagatcttcacccaggacgtgagacccgagcagctgctggagggcaaggacgcccaggccatccacaactggctgagcgagttccagctggagggctacaccgcccacttcctgcaggccggctacgacgtgcccaccatcagcagaatgacccccgaggacctgaccgccatcggcgtgaccaagcccggccacagaaagaagatcgccagcgagatcgcccagctgagcatcgccgagtggctgcccagctacatccccaccgacctgctggagtggctgtgcgccctgggcctgccccagtaccacaagcagctggtgagcagcggctacgacagcatgggcctggtggccgacctgacctgggaggagctgcaggagatcggcgtgaacaagctgggccaccagaagaagctgatgctgggcgtgaagagactggccgagctgagaagaggcctgctgcagggcgaggccctgagcgagggcggcagaagactggccaagggccccgagctgatggccatcgagggcctggagaacggcgagggccccgccaccgccggccccagactgctgaccttccagggcagcgagctgagccccgagctgcaggccgccatggccggcggcggccccgagcccctgcccctgccccccgccagaagccccagccaggagagcatcggcgccagaagcagaggcagcggccacagccaggagcagcccgccccccagcccagcggcggcgaccccagccccccccaggagagaaacctgcccgagggcaccgagagaccccccaagctgtgcagcagcctgcccggccagggcccccccccctacgtgttcatgtacccccagggcagccccagcagccccgcccccggccccccccccggcgccccctgggccttcagctacctggccggcccccccgccaccccccccgacccccccagacccaagagaagaagccacagcctgagcagacccggccccaccgagggcgacgccgagggcgaggccgagggccccgtgggcagcaccctgggcagctacgccaccctgaccagaagacccggcagaagcgccctggtgagaaccagccccagcgtgacccccacccccgccagaggcacccccagaagccagagcttcgccctgagagccagaagaaagggcccccccccccccccccccaagagactgagcagcgtgagcggccccagccccgagcccccccccctggacgagagccccggccccaaggagggcgccaccggccccagaagaagaaccctgagcgagcccgccggccccagcgagccccccggcccccccgcccccgccggccccgccagcgacaccgaggaggaggagcccggccccgagggcaccccccccagcagaggcagcagcggcgagggcctgcccttcgccgaggagggcaacctgaccatcaagcagagacccaagcccgccggccccccccccagagagacccccgtgccccccggcctggacttcaacctgaccgagagcgacaccgtgaagagaagacccaagtgcagagagagagagcccctgcagaccgccctgctggccttcggcgtggccagcgccacccccggccccgccgcccccctgcccagccccacccccggcgagagcccccccgccagcagcctgccccagcccgagcccagcagcctgcccgcccagggcgtgcccacccccctggcccccagccccgccatgcagccccccgtgcccccctgccccggccccggcctggagagcagcgccgccagcagatggaacggcgagaccgagccccccgccgcccccgccgccctgctgaaggtgcccggcgccggcaccgcccccaagcccgtgagcgtggcctgcacccagctggccttcagcggccccaagctggcccccagactgggccccagacccgtgcccccccccagacccgagagcaccggcaccgtgggccccggccaggcccagcagagactggagcagaccagcagcagcctggccgccgccctgagagccgccgagaagagcatcggcaccaaggagcaggagggcacccccagcgccagcaccaagcacatcctggacgacatcagcaccatgttcgacgccctggccgaccagctggacgccatgctggactag

SEQ ID NO: 75612 - DNA, 1026 bp, synthetic construct
  misc_feature 1..1026: note = Description of Artificial Sequence: Synthetic coding sequence
  source 1..1026: mol_type = other DNA
atggccgacgagaagcccagcaacggcgtgctggtgcacatggtgaagctgctgatcaagaccttcctggacggcatcttcgacgacctgatggagaacaacgtgctgaacaccgacgagatccacctgatcggcaagtgcctgaagttcgtggtgagcaacgccgagaacctggtggacgacatcaccgagaccgcccagaccgccggcaagatcttcagagagcacctgtggaacagcaagaagcagctgagcagcgacatcagcagcgacggcgagagagaggccaacatgcccggcctgaacatcagaaacaaggagttcaactacctgcacaacagaaacggcagcgagctggacctgctgggcatgagagacctgctggagaacctgggctacagcgtggtgatcaaggagaacctgaccgcccaggagatggagaccgccctgagacagttcgccgcccaccccgagcaccagagcagcgacagcaccttcctggtgttcatgagccacagcatcctgaacggcatctgcggcaccaagcactgggaccaggagcccgacgtgctgcacgacgacaccatcttcgagatcttcaacaacagaaactgccagagcctgaaggacaagcccaaggtgatcatcatgcaggcctgcagaggcaacggcgccggcatcgtgtggttcaccaccgacagcggcaaggccggcgccgacacccacggcagactgctgcagggcaacatctgcaacgacgccgtgaccaaggcccacgtggagaaggacttcatcgccttcaagagcagcaccccccacaacgtgagctggagacacgagaccaacggcagcgtgttcatcagccagatcatctactacttcagagagtacagctggagccaccacctggaggagatcttccagaaggtgcagcacagcttcgagacccccaacatcctgacccagctgcccaccatcgagagactgagcatgaccagatacttctacctgttccccggcaactag

SEQ ID NO: 75613 - DNA, 1026 bp, synthetic construct; identical to SEQ ID NO: 75612
  misc_feature 1..1026: note = Description of Artificial Sequence: Synthetic coding sequence
  source 1..1026: mol_type = other DNA

SEQ ID NO: 75614 - DNA, 834 bp, synthetic construct
  misc_feature 1..834: note = Description of Artificial Sequence: Synthetic coding sequence
  source 1..834: mol_type = other DNA
atggagaacaccgagaacagcgtggacagcaagagcatcaagaacctggagcccaagatcatccacggcagcgagagcatggacagcggcatcagcctggacaacagctacaagatggactaccccgagatgggcctgtgcatcatcatcaacaacaagaacttccacaagagcaccggcatgaccagcagaagcggcaccgacgtggacgccgccaacctgagagagaccttcagaaacctgaagtacgaggtgagaaacaagaacgacctgaccagagaggagatcgtggagctgatgagagacgtgagcaaggaggaccacagcaagagaagcagcttcgtgtgcgtgctgctgagccacggcgaggagggcatcatcttcggcaccaacggccccgtggacctgaagaagatcaccaacttcttcagaggcgacagatgcagaagcctgaccggcaagcccaagctgttcatcatccaggcctgcagaggcaccgagctggactgcggcatcgagaccgacagcggcgtggacgacgacatggcctgccacaagatccccgtggaggccgacttcctgtacgcctacagcaccgcccccggctactacagctggagaaacagcaaggacggcagctggttcatccagagcctgtgcgccatgctgaagcagtacgccgacaagctggagttcatgcacatcctgaccagagtgaacagaaaggtggccaccgagttcgagagcttcagcttcgacgccaccttccacgccaagaagcagatcccctgcatcgtgagcatgctgaccaaggagctgtacttctaccactag

SEQ ID NO: 75615 - DNA, 471 bp, synthetic construct
  misc_feature 1..471: note = Description of Artificial Sequence: Synthetic coding sequence
  source 1..471: mol_type = other DNA
atgagcgacgccctgatcaaggtgagcatggagaacaccgagaacagcgtggacagcaagagcatcaagaacctggagcccaagatcatccacggcagcgagagcatggacagcggcatcagcctggacaacagctacaagatggactaccccgagatgggcctgtgcatcatcatcaacaacaagaacttccacaagagcaccggcatgaccagcagaagcggcaccgacgtggacgccgccaacctgagagagaccttcagaaacctgaagtacgaggtgagaaacaagaacgacctgaccagagaggagatcgtggagctgatgagagacgtgagcaaggaggaccacagcaagagaagcagcttcgtgtgcgtgctgctgagccacggcgaggagggcatcatcttcggcaccaacggccccgtggacctgaagaacaacaagctgttccagagaggcagcctgtag

SEQ ID NO: 75616 - DNA, 354 bp, synthetic construct
  misc_feature 1..354: note = Description of Artificial Sequence: Synthetic coding sequence
  source 1..354: mol_type = other DNA
atggagaacaccgagaacagcgtggacagcaagagcatcaagaacctggagcccaagatcatccacggcagcgagagcatggacagcggcatcagcctggacaacagctacaagatggactaccccgagatgggcctgtgcatcatcatcaacaacaagaacttccacaagagcaccggcatgaccagcagaagcggcaccgacgtggacgccgccaacctgagagagaccttcagaaacctgaagtacgaggtgagaaacaagaacgacctgaccagagaggagatcgtggagctgatgagagacgtgagcaaggaggaccacagcaagagaagcagcttcgtgtgcgtgtag

SEQ ID NO: 75617 - DNA, 834 bp, synthetic construct; identical to SEQ ID NO: 75614
  misc_feature 1..834: note = Description of Artificial Sequence: Synthetic coding sequence
  source 1..834: mol_type = other DNA

SEQ ID NO: 75618 - DNA, 966 bp, synthetic construct
  misc_feature 1..966: note = Description of Artificial Sequence: Synthetic coding sequence
  source 1..966: mol_type = other DNA
atggccgacagcatgcaggagaagcagagaatggccggccagatgctgctgcagaccttcttcaacatcgaccagatcagccccaacaagaaggcccaccccaacatggaggccggcccccccgagagcggcgagagcaccgacgccctgaagctgtgcccccacgaggagttcctgagactgtgcaaggagagagccgaggagatctaccccatcaaggagagaaacaacagaaccagactggccctgatcatctgcaacaccgagttcgaccacctgccccccagaaacggcgccgacttcgacatcaccggcatgaaggagctgctggagggcctggactacagcgtggacgtggaggagaacctgaccgccagagacatggagagcgccctgagagccttcgccaccagacccgagcacaagagcagcgacagcaccttcctggtgctgatgagccacggcatcctggagggcatctgcggcaccgtgcacgacgagaagaagcccgacgtgctgctgtacgacaccatcttccagatcttcaacaacagaaactgcctgagcctgaaggacaagcccaaggtgatcatcgtgcaggcctgcagaggcgccaacagaggcgagctgtgggtgagagacagccccgccagcctggaggtggccagcagccagagcagcgagaacctggaggaggacgccgtgtacaagacccacgtggagaaggacttcatcgccttctgcagcagcaccccccacaacgtgagctggagagacagcaccatgggcagcatcttcatcacccagctgatcacctgcttccagaagtacagctggtgctgccacctggaggaggtgttcagaaaggtgcagcagagcttcgagacccccagagccaaggcccagatgcccaccatcgagagactgagcatgaccagatacttctacctgttccccggcaactag

SEQ ID NO: 75619 - DNA, 213 bp, synthetic construct
  misc_feature 1..213: note = Description of Artificial Sequence: Synthetic coding sequence
  source 1..213: mol_type = other DNA
atggagaagaaggagtgccccgagaagagcagcagcagcgaggaggagctgcccagaagagacagcggcagcagcagaaacatcgacgccagcaagctgatcagactgcagggcagcagaaagctgctggtggacaacagcatcagagagctgcagtacaccaagaccggcatcttcttccaggccgaggcctgcgtgaccaacgacacctag

SEQ ID NO: 75620 - DNA, 3099 bp, synthetic construct
  misc_feature 1..3099: note = Description of Artificial Sequence: Synthetic coding sequence
  source 1..3099: mol_type = other DNA
atgcccggcagagccgaggccggcgaggccgaggaggaggccggcgccggcagcggcagcgaggccgaggaggacgccctgtgggagagaatcgagggcgtgagacacagactggccagagccctgaaccccgccaagctgaccccctacctgagacagtgcagagtgatcgacgagcaggacgaggaggaggtgctgagcacctacagattcccctgcagagtgaacagaaccggcagactgatggacatcctgagatgcagaggcaagagaggctacgaggccttcctggaggccctggagttctactaccccgagcacttcaccctgctgaccggccaggagcccgcccagagatgcagcatgatcctggacgaggagggccccgagggcctgacccagttcctgatgaccgaggtgagaagactgagagaggccagaaagagccagctgcagagagagcagcagctgcaggccagaggcagagtgctggaggaggagagagccggcctggagcagagactgagagaccagcagcaggcccaggagagatgccagagactgagagaggactgggaggccggcagcctggagctgctgagactgaaggacgagaactacatgatcgccatgagactggcccagctgagcgaggagaagaacagcgccgtgctgagaagcagagacctgcagctggccgtggaccagctgaagctgaaggtgagcagactggaggaggagtgcgccctgctgagaagagccagaggccccccccccggcgccgaggagaaggagaaggagaaggagaaggagaaggagcccgacaacgtggacctggtgagcgagctgagagccgagaaccagagactgaccgccagcctgagagagctgcaggagggcctgcagcaggaggccagcagacccggcgcccccggcagcgagagaatcctgctggacatcctggagcacgactggagagaggcccaggacagcagacaggagctgtgccagaagctgcacgccgtgcagggcgagctgcagtgggccgaggagctgagagaccagtacctgcaggagatggaggacctgagactgaagcacagaaccctgcagaaggactgcgacctgtacaagcacagaatggccaccgtgctggcccagctggaggagatcgagaaggagagagaccaggccatccagagcagagacagaatccagctgcagtacagccagagcctgatcgagaaggaccagtacagaaagcaggtgagaggcctggaggccgagagagacgagctgctgaccaccctgaccagcctggagggcaccaaggccctgctggaggtgcagctgcagagagcccagggcggcacctgcctgaaggcctgcgccagcagccacagcctgtgcagcaacctgagcagcacctggagcctgagcgagttccccagccccctgggcggccccgaggccaccggcgaggccgccgtgatgggcggccccgagccccacaacagcgaggaggccaccgacagcgagaaggagatcaacagactgagcatcctgcccttcccccccagcgccggcagcatcctgagaagacagagagaggaggaccccgccccccccaagagaagcttcagcagcatgagcgacatcaccggcagcgtgaccctgaagccctggagccccggcctgagcagcagcagcagcagcgacagcgtgtggcccctgggcaagcccgagggcctgctggccagaggctgcggcctggacttcctgaacagaagcctggccatcagagtgagcggcagaagcccccccggcggccccgagccccaggacaagggccccgacggcctgagcttctacggcgacagatggagcggcgccgtggtgagaagagtgctgagcggccccggcagcgccagaatggagcccagagagcagagagtggaggccgccggcctggagggcgcctgcctggaggccgaggcccagcagagaaccctgctgtggaaccagggcagcaccctgcccagcctgatggacagcaaggcctgccagagcttccacgaggccctggaggcctgggccaagggccccggcgccgagcccttctacatcagagccaacctgaccctgcccgagagagccgacccccacgccctgtgcgtgaaggcccaggagatcctgagactggtggacagcgcctacaagagaagacaggagtggttctgcaccagagtggaccccctgaccctgagagacctggacagaggcaccgtgcccaactaccagagagcccagcagctgctggaggtgcaggagaagtgcctgcccagcagcagacacagaggccccagaagcaacctgaagaagagagccctggaccagctgagactggtgagacccaagcccgtgggcgcccccgccggcgacagccccgaccagctgctgctggagccctgcgccgagcccgagagaagcctgagaccctacagcctggtgagacccctgctggtgagcgccctgagacccgtggtgctgctgcccgagtgcctggcccccagactgatcagaaacctgctggacctgcccagcagcagactggacttccaggtgtgccccgccgagagcctgagcggcgaggagctgtgccccagcagcgcccccggcgcccccaaggcccagcccgccacccccggcctgggcagcagaatcagagccatccaggagagcgtgggcaagaagcactgcctgctggagctgggcgccagaggcgtgagagagctggtgcagaacgagatctaccccatcgtgatccacgtggaggtgaccgagaagaacgtgagagaggtgagaggcctgctgggcagacccggctggagagacagcgagctgctgagacagtgcagaggcagcgagcaggtgctgtggggcctgccctgcagctgggtgcaggtgcccgcccacgagtggggccacgccgaggagctggccaaggtggtgagaggcagaatcctgcaggagcaggccagactggtgtgggtggagtgcggcagcagcagaggctgccccagcagcagcgaggcctag

SEQ ID NO: 75621 - DNA, 3099 bp, synthetic construct; identical to SEQ ID NO: 75620
  misc_feature 1..3099: note = Description of Artificial Sequence: Synthetic coding sequence
  source 1..3099: mol_type = other DNA

SEQ ID NO: 75622 - DNA, 2241 bp, synthetic construct
  misc_feature 1..2241: note = Description of Artificial Sequence: Synthetic coding sequence
  source 1..2241: mol_type = other DNA
atgggcgtgggcgtgggcctgggcaacggcctgagactgctgccctggatggaggccagcagacccggcgcccccggcagcgagagaatcctgctggacatcctggagcacgactggagagaggcccaggacagcagacaggagctgtgccagaagctgcacgccgtgcagggcgagctgcagtgggccgaggagctgagagaccagtacctgcaggagatggaggacctgagactgaagcacagaaccctgcagaaggactgcgacctgtacaagcacagaatggccaccgtgctggcccagctggaggagatcgagaaggagagagaccaggccatccagagcagagacagaatccagctgcagtacagccagagcctgatcgagaaggaccagtacagaaagcaggtgagaggcctggaggccgagagagacgagctgctgaccaccctgaccagcctggagggcaccaaggccctgctggaggtgcagctgcagagagcccagggcggcacctgcctgaaggcctgcgccagcagccacagcctgtgcagcaacctgagcagcacctggagcctgagcgagttccccagccccctgggcggccccgaggccaccggcgaggccgccgtgatgggcggccccgagccccacaacagcgaggaggccaccgacagcgagaaggagatcaacagactgagcatcctgcccttcccccccagcgccggcagcatcctgagaagacagagagaggaggaccccgccccccccaagagaagcttcagcagcatgagcgacatcaccggcagcgtgaccctgaagccctggagccccggcctgagcagcagcagcagcagcgacagcgtgtggcccctgggcaagcccgagggcctgctggccagaggctgcggcctggacttcctgaacagaagcctggccatcagagtgagcggcagaagcccccccggcggccccgagccccaggacaagggccccgacggcctgagcttctacggcgacagatggagcggcgccgtggtgagaagagtgctgagcggccccggcagcgccagaatggagcccagagagcagagagtggaggccgccggcctggagggcgcctgcctggaggccgaggcccagcagagaaccctgctgtggaaccagggcagcaccctgcccagcctgatggacagcaaggcctgccagagcttccacgaggccctggaggcctgggccaagggccccggcgccgagcccttctacatcagagccaacctgaccctgcccgagagagccgacccccacgccctgtgcgtgaaggcccaggagatcctgagactggtggacagcgcctacaagagaagacaggagtggttctgcaccagagtggaccccctgaccctgagagacctggacagaggcaccgtgcccaactaccagagagcccagcagctgctggaggtgcaggagaagtgcctgcccagcagcagacacagaggccccagaagcaacctgaagaagagagccctggaccagctgagactggtgagacccaagcccgtgggcgcccccgccggcgacagccccgaccagctgctgctggagccctgcgccgagcccgagagaagcctgagaccctacagcctggtgagacccctgctggtgagcgccctgagacccgtggtgctgctgcccgagtgcctggcccccagactgatcagaaacctgctggacctgcccagcagcagactggacttccaggtgtgccccgccgagagcctgagcggcgaggagctgtgccccagcagcgcccccggcgcccccaaggcccagcccgccacccccggcctgggcagcagaatcagagccatccaggagagcgtgggcaagaagcactgcctgctggagctgggcgccagaggcgtgagagagctggtgcagaacgagatctaccccatcgtgatccacgtggaggtgaccgagaagaacgtgagagaggtgagaggcctgctgggcagacccggctggagagacagcgagctgctgagacagtgcagaggcagcgagcaggtgctgtggggcctgccctgcagctgggtgcaggtgcccgcccacgagtggggccacgccgaggagctggccaaggtggtgagaggcagaatcctgcaggagcaggccagactggtgtgggtggagtgcggcagcagcagaggctgccccagcagcagcgaggcctag

SEQ ID NO: 75623 - DNA, 1443 bp, synthetic construct
  misc_feature 1..1443: note = Description of Artificial Sequence: Synthetic coding sequence
  source 1..1443: mol_type = other DNA
atggaggacctgagactgaagcacagaaccctgcagaaggactgcgacctgtacaagcacagaatggccaccgtgctggcccagctggaggagatcgagaaggagagagaccaggccatccagagcagagacagaatccagctgcagtacagccagagcctgatcgagaaggaccagtacagaaagcaggtgagaggcctggaggccgagagagacgagctgctgaccaccctgaccagcctggagggcaccaaggccctgctggaggtgcagctgcagagagcccagggcggcacctgcctgaaggcctgcgccagcagccacagcctgtgcagcaacctgagcagcacctggagcctgagcgagttccccagccccctgggcggccccgaggccaccggcgaggccgccgtgatgggcggccccgagccccacaacagcgaggaggccaccgacagcgagaaggagatcaacagactgagcatcctgcccttcccccccagcgccggcagcatcctgagaagacagagagaggaggaccccgccccccccaagagaagcttcagcagcatgagcgacatcaccggcagcgtgaccctgaagccctggagccccggcctgagcagcagcagcagcagcgacagcgtgtggcccctgggcaagcccgagggcctgctggccagaggctgcggcctggacttcctgaacagaagcctggccatcagagtgagcggcagaagcccccccggcggccccgagccccaggacaagggccccgacggcctgagcttctacggcgacagatggagcggcgccgtggtgagaagagtgctgagcggccccggcagcgccagaatggagcccagagagcagagagtggaggccgccggcctggagggcgcctgcctggaggccgaggcccagcagagaaccctgctgtggaaccagggcagcaccctgcccagcctgatggacagcaaggcctgccagagcttccacgaggccctggaggcctgggccaagggccccggcgccgagcccttctacatcagagccaacctgaccctgcccgagagagccgacccccacgccctgtgcgtgaaggcccaggagatcctgagactggtggacagcgcctacaagagaagacaggagtggttctgcaccagagtggaccccctgaccctgagagacctggacagaggcaccgtgcccaactaccagagagcccagcagctgctggaggtgcaggagaagtgcctgcccagcagcagacacagaggccccagaagcaacctgaagaagagagccctggaccagctgagactggtgagacccaagcccgtgggcgcccccgccggcgacagccccgaccagctgctgctggagccctgcgccgagcccgagagaagcctgagaccctacagcctggtgagaccctag

SEQ ID NO: 75624 - DNA, 222 bp, synthetic construct
  misc_feature 1..222: note = Description of Artificial Sequence: Synthetic coding sequence
  source 1..222: mol_type = other DNA
atgcccggcggcggccccgagatggacgactacatggagaccctgaaggacgaggaggacgccctgtgggagaacgtggagtgcaacagacacatgctgagcagatacatcaaccccgccaagctgaccccctacctgagacagtgcaaggtgatcgacgagcaggacgaggacgaggtgctgaacgcccccatgctgcccagcaagatcaacagagcctag

SEQ ID NO: 75625 - DNA, 3465 bp, synthetic construct
  misc_feature 1..3465: note = Description of Artificial Sequence: Synthetic coding sequence
  source 1..3465: mol_type = other DNA
atgcccggcggcggccccgagatggacgactacatggagaccctgaaggacgaggaggacgccctgtgggagaacgtggagtgcaacagacacatgctgagcagatacatcaaccccgccaagctgaccccctacctgagacagtgcaaggtgatcgacgagcaggacgaggacgaggtgctgaacgcccccatgctgcccagcaagatcaacagagccggcagactgctggacatcctgcacaccaagggccagagaggctacgtggtgttcctggagagcctggagttctactaccccgagctgtacaagctggtgaccggcaaggagcccaccagaagattcagcaccatcgtggtggaggagggccacgagggcctgacccacttcctgatgaacgaggtgatcaagctgcagcagcagatgaaggccaaggacctgcagagatgcgagctgctggccagactgagacagctggaggacgagaagaagcagatgaccctgaccagagtggagctgctgaccttccaggagagatactacaagatgaaggaggagagagacagctacaacgacgagctggtgaaggtgaaggacgacaactacaacctggccatgagatacgcccagctgagcgaggagaagaacatggccgtgatgagaagcagagacctgcagctggagatcgaccagctgaagcacagactgaacaagatggaggaggagtgcaagctggagagaaaccagagcctgaagctgaagaacgacatcgagaacagacccaagaaggagcaggtgctggagctggagagagagaacgagatgctgaagaccaagaaccaggagctgcagagcatcatccaggccggcaagagaagcctgcccgacagcgacaaggccatcctggacatcctggagcacgacagaaaggaggccctggaggacagacaggagctggtgaacagaatctacaacctgcaggaggaggccagacaggccgaggagctgagagacaagtacctggaggagaaggaggacctggagctgaagtgcagcaccctgggcaaggactgcgagatgtacaagcacagaatgaacaccgtgatgctgcagctggaggaggtggagagagagagagaccaggccttccacagcagagacgaggcccagacccagtacagccagtgcctgatcgagaaggacaagtacagaaagcagatcagagagctggaggagaagaacgacgagatgagaatcgagatggtgagaagagaggcctgcatcgtgaacctggagagcaagctgagaagactgagcaaggacagcaacaacctggaccagagcctgcccagaaacctgcccgtgaccatcatcagccaggacttcggcgacgccagccccagaaccaacggccaggaggccgacgacagcagcaccagcgaggagagccccgaggacagcaagtacttcctgccctaccaccccccccagagaagaatgaacctgaagggcatccagctgcagagagccaagagccccatcagcctgaagagaaccagcgacttccaggccaagggccacgaggaggagggcaccgacgccagccccagcagctgcggcagcctgcccatcaccaacagcttcaccaagatgcagccccccagaagcagaagcagcatcatgagcatcaccgccgagccccccggcaacgacagcatcgtgagaagatacaaggaggacgccccccacagaagcaccgtggaggaggacaacgacagcggcggcttcgacgccctggacctggacgacgacagccacgagagatacagcttcggccccagcagcatccacagcagcagcagcagccaccagagcgagggcctggacgcctacgacctggagcaggtgaacctgatgttcagaaagttcagcctggagagacccttcagacccagcgtgaccagcgtgggccacgtgagaggccccggccccagcgtgcagcacaccaccctgaacggcgacagcctgaccagccagctgaccctgctgggcggcaacgccagaggcagcttcgtgcacagcgtgaagcccggcagcctggccgagaaggccggcctgagagagggccaccagctgctgctgctggagggctgcatcagaggcgagagacagagcgtgcccctggacacctgcaccaaggaggaggcccactggaccatccagagatgcagcggccccgtgaccctgcactacaaggtgaaccacgagggctacagaaagctggtgaaggacatggaggacggcctgatcaccagcggcgacagcttctacatcagactgaacctgaacatcagcagccagctggacgcctgcaccatgagcctgaagtgcgacgacgtggtgcacgtgagagacaccatgtaccaggacagacacgagtggctgtgcgccagagtggaccccttcaccgaccacgacctggacatgggcaccatccccagctacagcagagcccagcagctgctgctggtgaagctgcagagactgatgcacagaggcagcagagaggaggtggacggcacccaccacaccctgagagccctgagaaacaccctgcagcccgaggaggccctgagcaccagcgaccccagagtgagccccagactgagcagagccagcttcctgttcggccagctgctgcagttcgtgagcagaagcgagaacaagtacaagagaatgaacagcaacgagagagtgagaatcatcagcggcagccccctgggcagcctggccagaagcagcctggacgccaccaagctgctgaccgagaagcaggaggagctggaccccgagagcgagctgggcaagaacctgagcctgatcccctacagcctggtgagagccttctactgcgagagaagaagacccgtgctgttcacccccaccgtgctggccaagaccctggtgcagagactgctgaacagcggcggcgccatggagttcaccatctgcaagagcgacatcgtgaccagagacgagttcctgagaagacagaagaccgagaccatcatctacagcagagagaagaaccccaacgccttcgagtgcatcgcccccgccaacatcgaggccgtggccgccaagaacaagcactgcctgctggaggccggcatcggctgcaccagagacctgatcaagagcaacatctaccccatcgtgctgttcatcagagtgtgcgagaagaacatcaagagattcagaaagctgctgcccagacccgagaccgaggaggagttcctgagagtgtgcagactgaaggagaaggagctggaggccctgccctgcctgtacgccaccgtggagcccgacatgtggggcagcgtggaggagctgctgagagtggtgaaggacaagatcggcgaggagcagagaaagaccatctgggtggacgaggaccagctgtag

SEQ ID NO: 75626 - DNA, 3114 bp, synthetic construct
  misc_feature 1..3114: note = Description of Artificial Sequence: Synthetic coding sequence
  source 1..3114: mol_type = other DNA
atggccaccgagagcacccccagcgagatcatcgagagagagagaaagaagctgctggagatcctgcagcacgaccccgacagcatcctggacaccctgaccagcagaagactgatcagcgaggaggagtacgagaccctggagaacgtgaccgacctgctgaagaagagcagaaagctgctgatcctggtgcagaagaagggcgaggccacctgccagcacttcctgaagtgcctgttcagcaccttcccccagagcgccgccatctgcggcctgagacacgaggtgctgaagcacgagaacaccgtgcccccccagagcatgggcgccagcagcaacagcgaggacgccttcagccccggcatcaagcagcccgaggcccccgagatcaccgtgttcttcagcgagaaggagcacctggacctggagaccagcgagttcttcagagacaagaagaccagctacagagagaccgccctgagcgccagaaagaacgagaaggagtacgacacccccgaggtgaccctgagctacagcgtggagaaggtgggctgcgaggtgcccgccaccatcacctacatcaaggacggccagagatacgaggagctggacgacagcctgtacctgggcaaggaggagtacctgggcagcgtggacacccccgaggacgccgaggccaccgtggaggaggaggtgtacgacgaccccgagcacgtgggctacgacggcgaggaggacttcgagaacagcgagaccaccgagttcagcggcgaggagcccagctacgagggcagcgagaccagcctgagcctggaggaggagcaggagaagagcatcgaggagagaaagaaggtgttcaaggacgtgctgctgtgcctgaacatggacagaagcagaaaggtgctgcccgacttcgtgaagcagttcagcctggacagaggctgcaagtggacccccgagagccccggcgacctggcctggaacttcctgatgaaggtgcaggccagagacgtgaccgccagagacagcatcctgagccacaaggtgctggacgaggacagcaaggaggacctgctggccggcgtggagaacctggagatcagagacatccagaccatcaaccccctggacgtgctgtgcgccaccatgctgtgcagcgacagcagcctgcagagacaggtgatgagcaacatgtaccagtgccagttcgccctgcccctgctgctgcccgacgccgagaacaacaagagcatcctgatgctgggcgccatgaaggacatcgtgaagaagcagagcacccagttcagcggcggccccaccgaggacaccgagaagttcctgaccctgatgaagatgcccgtgatcagcttcgtgagactgggctactgcagcttcagcaagagcagaatcctgaacaccctgctgagccccgcccagctgaagctgcacaagatcttcctgcaccaggacctgcccctgctggtgctgcccagacagatcagcgacggcctggtggagatcacctggtgcttccccgacagcgacgacagaaaggagaaccccttcttccagaagcccgtggccctggccaacctgagaggcaacctggagagcttctggacccagttcggcttcctgatggaggtgagcagcgccgtgttcttcttcaccgactgcctgggcgagaaggagtgggacctgctgatgttcctgggcgaggccgccatcgagagatgctacttcgtgctgagcagccaggccagagagagcgaggaggcccagatcttccagagaatcctgaacctgaagcccgcccagctgctgttctgggagagaggcgacgccggcgacagaagaaagaacatggagggcctgcaggccgccctgcaggaggtgatgttcagcagctgcctgagatgcgtgagcgtggaggacatggccgccctggccagagagctgggcatccaggtggacgaggacttcgagaacacccagagaatccaggtgagcagcggcgagaacatggccggcaccgccgagggcgagggccagcagagacacagccagctgaagagcagcagcaagagccaggccctgatgcccatccaggagcccggcacccagtgcgagctgagccagaacctgcagaacctgtacggcacccccgtgttcagacccgtgctggagaacagctggctgttccccaccagaatcggcggcaacttcaaccacgtgagcctgaaggccagctgggtgatgggcagacccttcggcagcgagcagagacccaagtggttccaccccctgcccttccagaacgccggcgcccagggcagaggcaagagcttcggcatccagagcttccacccccagatcttctacagcggcgagagattcatgaagttcagcagagtggccagaggctgccacagcaacggcaccttcggcagactgcccagacccatctgccagcacgtgcaggcctgccccgagagaccccagatgatgggcaccctggagagaagcagagccgtggccagcaagatcggccacagctacagcctggacagccagcccgccagagccgtgggcaagccctggccccagcaggcctgcaccagagtgaccgagctgaccgaggccaccggcaagctgatcagaaccagccacatcggcaagccccacccccagagcttccagcccgccgccgccacccagaagctgagacccgccagccagcagggcgtgcagatgaagacccagggcggcgccagcaaccccgccctgcagatcggcagccaccccatgtgcaagagcagccagttcaagagcgaccagagcaaccccagcaccgtgaagcacagccagcccaagcccttccacagcgtgcccagccagcccaagagcagccagaccaagagctgccagagccagcccagccagaccaagcccagcccctgcaagagcacccagcccaagcccagccagccctggcccccccagagcaagcccagccagcccagacccccccagcccaagagcagcagcaccaaccccagccaggccaaggcccaccacagcaaggccggccagaagagaggcggcaagcactag

SEQ ID NO: 75627 - DNA, 933 bp, synthetic construct
  misc_feature 1..933: note = Description of Artificial Sequence: Synthetic coding sequence
  source 1..933: mol_type = other DNA
atggccaccgagagcacccccagcgagatcatcgagagagagagaaagaagctgctggagatcctgcagcacgaccccgacagcatcctggacaccctgaccagcagaagactgatcagcgaggaggagtacgagaccctggagaacgtgaccgacctgctgaagaagagcagaaagctgctgatcctggtgcagaagaagggcgaggccacctgccagcacttcctgaagtgcctgttcagcaccttcccccagagcgccgccatctgcggcctgagacccgaggtgctgaagcacgagaacaccgtgcccccccagagcatgggcgccagcagcaacagcgaggacgccttcagccccggcatcaagcagcccgaggcccccgagatcaccgtgttcttcagcgagaaggagcacctggacctggagaccagcgagttcttcagagacaagaagaccagctacagagagaccgccctgagcgccagaaagaacgagaaggagtacgacacccccgaggtgaccctgagctacagcgtggagaaggtgggctgcgaggtgcccgccaccatcacctacatcaaggacggccagagatacgaggagctggacgacagcctgtacctgggcaaggaggagtacctgggcagcgtggacacccccgaggacgccgaggccaccgtggaggaggaggtgtacgacgaccccgagcacgtgggctacgacggcgaggaggacttcgagaacagcgagaccaccgagttcagcggcgaggagcccagctacgagggcagcgagaccagcctgagcctggaggaggagcaggagaagagcatcgagggctggagcagaacccacggcctgaagagaagcagccacgtgggcctgcccaagtgctgggactacagaagagagcccccctgcctggcctag

SEQ ID NO: 75628 - DNA, 1446 bp, synthetic construct
  misc_feature 1..1446: note = Description of Artificial Sequence: Synthetic coding sequence
  source 1..1446: mol_type = other DNA
atggccaccgagagcacccccagcgagatcatcgagagagagagaaagaagctgctggagatcctgcagcacgaccccgacagcatcctggacaccctgaccagcagaagactgatcagcgaggaggagtacgagaccctggagaacgtgaccgacctgctgaagaagagcagaaagctgctgatcctggtgcagaagaagggcgaggccacctgccagcacttcctgaagtgcctgttcagcaccttcccccagagcgccgccatctgcggcctgagacacgaggtgctgaagcacgagaacaccgtgcccccccagagcatgggcgccagcagcaacagcgaggacgccttcagccccggcatcaagcagcccgaggcccccgagatcaccgtgttcttcagcgagaaggagcacctggacctggagaccagcgagttcttcagagacaagaagaccagctacagagagaccgccctgagcgccagaaagaacgagaaggagtacgacacccccgaggtgaccctgagctacagcgtggagaaggtgggctgcgaggtgcccgccaccatcacctacatcaaggacggccagagatacgaggagctggacgacagcctgtacctgggcaaggaggagtacctgggcagcgtggacacccccgaggacgccgaggccaccgtggaggaggaggtgtacgacgaccccgagcacgtgggctacgacggcgaggaggacttcgagaacagcgagaccaccgagttcagcggcgaggagcccagctacgagggcagcgagaccagcctgagcctggaggaggagcaggagaagagcatcgaggagagaaagaaggtgttcaaggacgtgctgctgtgcctgaacatggacagaagcagaaaggtgctgcccgacttcgtgaagcagttcagcctggacagaggctgcaagtggacccccgagagccccggcgacctggcctggaacttcctgatgaaggtgcaggccagagacgtgaccgccagagacagcatcctgagccacaaggtgctggacgaggacagcaaggaggacctgctggccggcgtggagaacctggagatcagagacatccagaccatcaaccccctggacgtgctgtgcgccaccatgctgtgcagcgacagcagcctgcagagacaggtgatgagcaacatgtaccagtgccagttcgccctgcccctgctgctgcccgacgccgagaacaacaagagcatcctgatgctgggcgccatgaaggacatcgtgaagaagcagagcacccagttcagcggcggccccaccgaggacaccgagaagttcctgaccctgatgaagaccctgaagaccctgagagagttcaagttccccctggagaagacctggctgggccagctgaaggtgagagtgagcaaggacaccgtgagctag

SEQ ID NO: 75629 - DNA, 570 bp, synthetic construct
  misc_feature 1..570: note = Description of Artificial Sequence: Synthetic coding sequence
  source 1..570: mol_type = other DNA
atggtgctggagcaccccgccagagtggagcccttctacgccgtgctggagagccccagcttcagcctgatgggcatcctgctgagaatcgccagcggcaccagactgagcatccccatcaccagcaacaccctgatctactaccacccccaccccgaggacatcaagttccacctgtacctggtgcccagcgacgccctgctgaccaaggccatcgacgacgaggaggacagattccacggcgtgagactgcagaccagcccccccatggagcccctgaacttcggcagcagctacatcgtgagcaacagcgccaacctgaaggtgatgcccaaggagctgaagctgagctacagaagccccggcgagatccagcacttcagcaagttctacgccggccagatgaaggagcccatccagctggagatcaccgagaagagacacggcaccctggtgtgggacaccgaggtgaagcccgtggacctgcagctggtggccgccagcgcccccccccccttcagcggcctgctgtggcagagacagcccctgaaccccccccccgccagatag

SEQ ID NO: 75630 - DNA, 1296 bp, synthetic construct
  misc_feature 1..1296: note = Description of Artificial Sequence: Synthetic coding sequence
  source 1..1296: mol_type = other DNA
atgatgagacagagacagagccactactgcagcgtgctgttcctgagcgtgaactacctgggcggcaccttccccggcgacatctgcagcgaggagaaccagatcgtgagcagctacgccagcaaggtgtgcttcgagatcgaggaggactacaagaacagacagttcctgggccccgagggcaacgtggacgtggagctgatcgacaagagcaccaacagatacagcgtgtggttccccaccgccggctggtacctgtggagcgccaccggcctgggcttcctggtgagagacgaggtgaccgtgaccatcgccttcggcagctggagccagcacctggccctggacctgcagcaccacgagcagtggctggtgggcggccccctgttcgacgtgaccgccgagcccgaggaggccgtggccgagatccacctgccccacttcatcagcctgcagggcgaggtggacgtgagctggttcctggtggcccacttcaagaacgagggcatggtgctggagcaccccgccagagtggagcccttctacgccgtgctggagagccccagcttcagcctgatgggcatcctgctgagaatcgccagcggcaccagactgagcatccccatcaccagcaacaccctgatctactaccacccccaccccgaggacatcaagttccacctgtacctggtgcccagcgacgccctgctgaccaaggccatcgacgacgaggaggacagattccacggcgtgagactgcagaccagcccccccatggagcccctgaacttcggcagcagctacatcgtgagcaacagcgccaacctgaaggtgatgcccaaggagctgaagctgagctacagaagccccggcgagatccagcacttcagcaagttctacgccggccagatgaaggagcccatccagctggagatcaccgagaagagacacggcaccctggtgtgggacaccgaggtgaagcccgtggacctgcagctggtggccgccagcgcccccccccccttcagcggcgccgccttcgtgaaggagaaccacagacagctgcaggccagaatgggcgacctgaagggcgtgctggacgacctgcaggacaacgaggtgctgaccgagaacgagaaggagctggtggagcaggagaagaccagacagagcaagaacgaggccctgctgagcatggtggagaagaagggcgacctggccctggacgtgctgttcagaagcatcagcgagagagacccctacctggtgagctacctgagacagcagaacctgtag

SEQ ID NO: 75631 - DNA, 1614 bp, synthetic construct
  misc_feature 1..1614: note = Description of Artificial Sequence: Synthetic coding sequence
  source 1..1614: mol_type = other DNA
atggagaagaaggagtgccccgagaagagcagcagcagcgaggaggagctgcccagaagagacagcggcagcagcagaaacatcgacgccagcaagctgatcagactgcagggcagcagaaagctgctggtggacaacagcatcagagagctgcagtacaccaagaccggcatcttcttccaggccgaggcctgcgtgaccaacgacaccgtgtacagagagctgccctgcgtgagcgagaccctgtgcgacatcagccacttcttccaggaggacgacgagaccgaggccgagcccctgctgttcagagccgtgcccgagtgccagctgagcggcggcgacatccccagcgtgagcgaggagcaggagagcagcgagggccaggacagcggcgacatctgcagcgaggagaaccagatcgtgagcagctacgccagcaaggtgtgcttcgagatcgaggaggactacaagaacagacagttcctgggccccgagggcaacgtggacgtggagctgatcgacaagagcaccaacagatacagcgtgtggttccccaccgccggctggtacctgtggagcgccaccggcctgggcttcctggtgagagacgaggtgaccgtgaccatcgccttcggcagctggagccagcacctggccctggacctgcagcaccacgagcagtggctggtgggcggccccctgttcgacgtgaccgccgagcccgaggaggccgtggccgagatccacctgccccacttcatcagcctgcaggccggcgaggtggacgtgagctggttcctggtggcccacttcaagaacgagggcatggtgctggagcaccccgccagagtggagcccttctacgccgtgctggagagccccagcttcagcctgatgggcatcctgctgagaatcgccagcggcaccagactgagcatccccatcaccagcaacaccctgatctactaccacccccaccccgaggacatcaagttccacctgtacctggtgcccagcgacgccctgctgaccaaggccatcgacgacgaggaggacagattccacggcgtgagactgcagaccagcccccccatggagcccctgaacttcggcagcagctacatcgtgagcaacagcgccaacctgaaggtgatgcccaaggagctgaagctgagctacagaagccccggcgagatccagcacttcagcaagttctacgccggccagatgaaggagcccatccagctggagatcaccgagaagagacacggcaccctggtgtgggacaccgaggtgaagcccgtggacctgcagctggtggccgccagcgcccccccccccttcagcggcgccgccttcgtgaaggagaaccacagacagctgcaggccagaatgggcgacctgaagggcgtgctggacgacctgcaggacaacgaggtgctgaccgagaacgagaaggagctggtggagcaggagaagaccagacagagcaagaacgaggccctgctgagcatggtggagaagaagggcgacctggccctggacgtgctgttcagaagcatcagcgagagagacccctacctggtgagctacctgagacagcagaacctgtag

SEQ ID NO: 75632 - DNA, 1464 bp, synthetic construct
  misc_feature 1..1464: note = Description of Artificial Sequence: Synthetic coding sequence
  source 1..1464: mol_type = other DNA
atggagaagaaggagtgccccgagaagagcagcagcagcgaggaggagctgcccagaagagtgtacagagagctgccctgcgtgagcgagaccctgtgcgacatcagccacttcttccaggaggacgacgagaccgaggccgagcccctgctgttcagagccgtgcccgagtgccagctgagcggcggcgacatccccagcgtgagcgaggagcaggagagcagcgagggccaggacagcggcgacatctgcagcgaggagaaccagatcgtgagcagctacgccagcaaggtgtgcttcgagatcgaggaggactacaagaacagacagttcctgggccccgagggcaacgtggacgtggagctgatcgacaagagcaccaacagatacagcgtgtggttccccaccgccggctggtacctgtggagcgccaccggcctgggcttcctggtgagagacgaggtgaccgtgaccatcgccttcggcagctggagccagcacctggccctggacctgcagcaccacgagcagtggctggtgggcggccccctgttcgacgtgaccgccgagcccgaggaggccgtggccgagatccacctgccccacttcatcagcctgcaggccggcgaggtggacgtgagctggttcctggtggcccacttcaagaacgagggcatggtgctggagcaccccgccagagtggagcccttctacgccgtgctggagagccccagcttcagcctgatgggcatcctgctgagaatcgccagcggcaccagactgagcatccccatcaccagcaacaccctgatctactaccacccccaccccgaggacatcaagttccacctgtacctggtgcccagcgacgccctgctgaccaaggccatcgacgacgaggaggacagattccacggcgtgagactgcagaccagcccccccatggagcccctgaacttcggcagcagctacatcgtgagcaacagcgccaacctgaaggtgatgcccaaggagctgaagctgagctacagaagccccggcgagatccagcacttcagcaagttctacgccggccagatgaaggagcccatccagctggagatcaccgagaagagacacggcaccctggtgtgggacaccgaggtgaagcccgtggacctgcagctggtggccgccagcgcccccccccccttcagcggcgccgccttcgtgaaggagaaccacagacagctgcaggccagaatgggcgacctgaagggcgtgctggacgacctgcaggacaacgaggtgctgaccgagaacgagaaggagctggtggagcaggagaagaccagacagagcaagaacgaggccctgctgagcatggtggagaagaagggcgacctggccctggacgtgctgttcagaagcatcagcgagagagacccctacctggtgagctacctgagacagcagaacctgtag

SEQ ID NO: 75633 - DNA, 1101 bp, synthetic construct
  misc_feature 1..1101: note = Description of Artificial Sequence: Synthetic coding sequence
  source 1..1101: mol_type = other DNA
atgagcgactacgagaacgacgacgagtgctggagcgtgctggagggcttcagagtgaccctgaccagcgtgatcgaccccagcagaatcaccccctacctgagacagtgcaaggtgctgaaccccgacgacgaggagcaggtgctgagcgaccccaacctggtgatcagaaagagaaaggtgggcgtgctgctggacatcctgcagagaaccggccacaagggctacgtggccttcctggagagcctggagctgtactacccccagctgtacaagaaggtgaccggcaaggagcccgccagagtgttcagcatgatcatcgacgccagcggcgagagcggcctgacccagctgctgatgaccgaggtgatgaagctgcagaagaaggtgcaggacctgaccgccctgctgagcagcaaggacgacttcatcaaggagctgagagtgaaggacagcctgctgagaaagcaccaggagagagtgcagagactgaaggaggagtgcgaggccggcagcagagagctgaagagatgcaaggaggagaactacgacctggccatgagactggcccaccagagcgaggagaagggcgccgccctgatgagaaacagagacctgcagctggagatcgaccagctgaagcacagcctgatgaaggccgaggacgactgcaaggtggagagaaagcacaccctgaagctgagacacgccatggagcagagacccagccaggagctgctgtgggagctgcagcaggagaaggccctgctgcaggccagagtgcaggagctggaggccagcgtgcaggagggcaagctggacagaagcagcccctacatccaggtgctggaggaggactggagacaggccctgagagaccaccaggagcaggccaacaccatcttcagcctgagaaaggacctgagacagggcgaggccagaagactgagatgcatggaggagaaggagatgttcgagctgcagtgcctggccctgagaaaggacagcaagatgtacaaggacagaatcgaggccatcctgctgcagatggaggaggtggccatcgagagagaccagagcacccagatggagggcctgtag

SEQ ID NO: 75634 - DNA, 1611 bp, synthetic construct
  misc_feature 1..1611: note = Description of Artificial Sequence: Synthetic coding sequence
  source 1..1611: mol_type = other DNA
atgagcgactacgagaacgacgacgagtgctggagcgtgctggagggcttcagagtgaccctgaccagcgtgatcgaccccagcagaatcaccccctacctgagacagtgcaaggtgctgaaccccgacgacgaggagcaggtgctgagcgaccccaacctggtgatcagaaagagaaaggtgggcgtgctgctggacatcctgcagagaaccggccacaagggctacgtggccttcctggagagcctggagctgtactacccccagctgtacaagaaggtgaccggcaaggagcccgccagagtgttcagcatgatcatcgacgccagcggcgagagcggcctgacccagctgctgatgaccgaggtgatgaagctgcagaagaaggtgcaggacctgaccgccctgctgagcagcaaggacgacttcatcaaggagctgagagtgaaggacagcctgctgagaaagcaccaggagagagtgcagagactgaaggaggagtgcgaggccggcagcagagagctgaagagatgcaaggaggagaactacgacctggccatgagactggcccaccagagcgaggagaagggcgccgccctgatgagaaacagagacctgcagctggagatcgaccagctgaagcacagcctgatgaaggccgaggacgactgcaaggtggagagaaagcacaccctgaagctgagacacgccatggagcagagacccagccaggagctgctgtgggagctgcagcaggagaaggccctgctgcaggccagagtgcaggagctggaggccagcgtgcaggagggcaagctggacagaagcagcccctacatccaggtgctggaggaggactggagacaggccctgagagaccaccaggagcaggccaacaccatcttcagcctgagaaaggacctgagacagggcgaggccagaagactgagatgcatggaggagaaggagatgttcgagctgcagtgcctggccctgagaaaggacagcaagatgtacaaggacagaatcgaggccatcctgctgcagatggaggaggtggccatcgagagagaccaggccatcgccaccagagaggagctgcacgcccagcacgccagaggcctgcaggagaaggacgccctgagaaagcaggtgagagagctgggcgagaaggccgacgagctgcagctgcaggtgttccagtgcgaggcccagctgctggccgtggagggcagactgagaagacagcagctggagaccctggtgctgagcagcgacctggaggacggcagccccagaagaagccaggagctgagcctgccccaggacctggaggacacccagctgagcgacaagggctgcctggccggcggcggcagccccaagcagcccttcgccgccctgcaccaggagcaggtgctgagaaacccccacgacgccggcctgagcagcggcgagccccccgagaaggagagaagaagactgaaggagagcttcgagaactacagaagaaagagagccctgagaaagatgcagaagggctggagacagggcgaggaggacagagagaacaccaccggcagcgacaacaccgacaccgagggcagctag

SEQ ID NO: 75635 - DNA, 1479 bp, synthetic construct
  misc_feature 1..1479: note = Description of Artificial Sequence: Synthetic coding sequence
  source 1..1479: mol_type = other DNA
atgagcgactacgagaacgacgacgagtgctggagcgtgctggagggcttcagagtgaccctgaccagcgtgatcgaccccagcagaatcaccccctacctgagacagtgcaaggtgctgaaccccgacgacgaggagcaggtgctgagcgaccccaacctggtgatcagaaagagaaaggtgggcgtgctgctggacatcctgcagagaaccggccacaagggctacgtggccttcctggagagcctggagctgtactacccccagctgtacaagaaggtgaccggcaaggagcccgccagagtgttcagcatgatcatcgacgccagcggcgagagcggcctgacccagctgctgatgaccgaggtgatgaagctgcagaagaaggtgcaggacctgaccgccctgctgagcagcaaggacgacttcatcaaggagctgagagtgaaggacagcctgctgagaaagcaccaggagagagtgcagagactgaaggaggagtgcgaggccggcagcagagagctgaagagatgcaaggaggagaactacgacctggccatgagactggcccaccagagcgaggagaagggcgccgccctgatgagaaacagagacctgcagctggagatcgaccagctgaagcacagcctgatgaaggccgaggacgactgcaaggtggagagaaagcacaccctgaagctgagacacgccatggagcagagacccagccaggagctgctgtgggagctgcagcaggagaaggccctgctgcaggccagagtgcaggagctggaggccagcgtgcaggagggcaagctggacagaagcagcccctacatccaggtgctggaggaggactggagacaggccctgagagaccaccaggagcaggccaacaccatcttcagcctgagaaaggacctgagacagggcgaggccagaagactgagatgcatggaggagaaggagatgttcgagctgcagtgcctggccctgagaaaggacagcaagatgtacaaggacagaatcgaggccatcctgctgcagatggaggaggtggccatcgagagagaccaggccatcgccaccagagaggagctgcacgcccagcacgccagaggcctgcaggagaaggacgccctgagaaagcaggtgagagagctgggcgagaaggccgacgagctgcagctgcaggtgttccagtgcgaggcccagctgctggccgtggagggcagactgagaagacagcagctggagaccctggtgctgagcagcgacctggaggacggcagccccagaagaagccaggagctgagcctgccccaggacctggaggacacccagctgagcgacaagggctgcctggccggcggcggcagccccaagcagcccttcgccgccctgcaccaggagcaggtgctgagaaacccccacgacgccggccccgccggcctgcccggcatcggcgccgtgtgctag

SEQ ID NO: 75636 - DNA, 3501 bp, synthetic construct
  misc_feature 1..3501: note = Description of Artificial Sequence: Synthetic coding sequence
  source 1..3501: mol_type = other DNA
atggacctgggcaccgccgagggcaccagatgcaccgacccccccgccggcaagcccgccatggcccccaagagaaagggcggcctgaagctgaacgccatctgcgccaagctgagcagacaggtggtggtggagaagagagccgacgccggcagccacaccgagggcagccccagccagcccagagaccaggagagaagcggccccgagagcggcgccgccagagcccccagaagcgaggaggacaagagaagagccgtgatcgagaagtgggtgaacggcgagtacagcgaggagcccgcccccacccccgtgctgggcagaatcgccagagagggcctggagctgccccccgagggcgtgtacatggtgcagccccagggctgcagcgacgaggaggaccacgccgaggagcccagcaaggacggcggcgccctggaggagaaggacagcgacggcgccgccagcaaggaggacagcggccccagcaccagacaggccagcggcgaggccagcagcctgagagactacgccgccagcaccatgaccgagttcctgggcatgttcggctacgacgaccagaacaccagagacgagctggccagaaagatcagcttcgagaagctgcacgccggcagcacccccgaggccgccaccagcagcatgctgcccaccagcgaggacaccctgagcaagagagccagattcagcaagtacgaggagtacatcagaaagctgaaggccggcgagcagctgagctggcccgcccccagcaccaagaccgaggagagagtgggcaaggaggtggtgggcaccctgcccggcctgagactgcccagcagcaccgcccacctggagaccaaggccaccatcctgcccctgcccagccacagcagcgtgcagatgcagaacctggtggccagagccagcaagtacgacttcttcatccagaagctgaagaccggcgagaacctgagaccccagaacggcagcacctacaagaagcccagcaagtacgacctggagaacgtgaagtacctgcacctgttcaagcccggcgagggcagccccgacatgggcggcgccatcgccttcaagaccggcaaggtgggcagacccagcaagtacgacgtgagaggcatccagaagcccggccccgccaaggtgccccccacccccagcctggcccccgcccccctggccagcgtgcccagcgcccccagcgcccccggccccggccccgagccccccgccagcctgagcttcaacacccccgagtacctgaagagcaccttcagcaagaccgacagcatcaccaccggcaccgtgagcaccgtgaagaacggcctgcccaccgacaagcccgccgtgaccgaggacgtgaacatctaccagaagtacatcgccagattcagcggcagccagcactgcggccacatccactgcgcctaccagtacagagagcactaccactgcctggaccccgagtgcaactaccagagattcaccagcaagcaggacgtgatcagacactacaacatgcacaagaagagagacaacagcctgcagcacggcttcatgagattcagccccctggacgactgcagcgtgtactaccacggctgccacctgaacggcaagagcacccactaccactgcatgcaggtgggctgcaacaaggtgtacaccagcaccagcgacgtgatgacccacgagaacttccacaagaagaacacccagctgatcaacgacggcttccagagattcagagccaccgaggactgcggcaccgccgactgccagttctacggccagaagaccacccacttccactgcagaagacccggctgcaccttcaccttcaagaacaagtgcgacatcgagaagcacaagagctaccacatcaaggacgacgcctacgccaaggacggcttcaagaagttctacaagtacgaggagtgcaagtacgagggctgcgtgtacagcaaggccaccaaccacttccactgcatcagagccggctgcggcttcaccttcaccagcaccagccagatgaccagccacaagagaaagcacgagagaagacacatcagaagcagcggcgccctgggcctgccccccagcctgctgggcgccaaggacaccgagcacgaggagagcagcaacgacgacctggtggacttcagcgccctgagcagcaagaacagcagcctgagcgccagccccaccagccagcagagcagcgccagcctggccgccgccaccgccgccaccgaggccggccccagcgccaccaagccccccaacagcaagatcagcggcctgctgccccagggcctgcccggcagcatccccctggccctggccctgagcaacagcggcctgcccacccccaccccctacttccccatcctggccggcagaggcagcaccagcctgcccgtgggcacccccagcctgctgggcgccgtgagcagcggcagcgccgccagcgccacccccgacacccccaccctggtggccagcggcgccggcgacagcgcccccgtggccgccgccagcgtgcccgccccccccgccagcatcatggagagaatcagcgccagcaagggcctgatcagccccatgatggccagactggccgccgccgccctgaagcccagcgccaccttcgaccccggcagcggccagcaggtgacccccgccagattcccccccgcccaggtgaagcccgagcccggcgagagcaccggcgcccccggcccccacgaggccagccaggacagaagcctggacctgaccgtgaaggagcccagcaacgagagcaacggccacgccgtgcccgccaacagcagcctgctgagcagcctgatgaacaagatgagccagggcaaccccggcctgggcagcctgctgaacatcaaggccgaggccgagggcagccccgccgccgagcccagccccttcctgggcaaggccgtgaaggccctggtgcaggagaagctggccgagccctggaaggtgtacctgagaagattcggcaccaaggacttctgcgacggccagtgcgacttcctgcacaaggcccacttccactgcgtggtggaggagtgcggcgccctgttcagcaccctggacggcgccatcaagcacgccaacttccacttcagaaccgagggcggcgccgccaagggcaacaccgaggccgccttccccgccagcgccgccgagaccaagccccccatggcccccagcagcccccccgtgccccccgtgaccaccgccaccgtgagcagcctggagggccccgcccccagccccgccagcgtgcccagcacccccaccctgctggcctggaagcagctggccagcaccatcccccagatgccccagatccccgccagcgtgccccacctgcccgccagccccctggccaccaccagcctggagaacgccaagccccaggtgaagcccggcttcctgcagttccaggagaagtag

SEQ ID NO: 75637 - DNA, 5280 bp, synthetic construct
  misc_feature 1..5280: note = Description of Artificial Sequence: Synthetic coding sequence
  source 1..5280: mol_type = other DNA
atggacctgggcaccgccgagggcaccagatgcaccgacccccccgccggcaagcccgccatggcccccaagagaaagggcggcctgaagctgaacgccatctgcgccaagctgagcagacaggtggtggtggagaagagagccgacgccggcagccacaccgagggcagccccagccagcccagagaccaggagagaagcggccccgagagcggcgccgccagagcccccagaagcgaggaggacaagagaagagccgtgatcgagaagtgggtgaacggcgagtacagcgaggagcccgcccccacccccgtgctgggcagaatcgccagagagggcctggagctgccccccgagggcgtgtacatggtgcagccccagggctgcagcgacgaggaggaccacgccgaggagcccagcaaggacggcggcgccctggaggagaaggacagcgacggcgccgccagcaaggaggacagcggccccagcaccagacaggccagcggcgaggccagcagcctgagagactacgccgccagcaccatgaccgagttcctgggcatgttcggctacgacgaccagaacaccagagacgagctggccagaaagatcagcttcgagaagctgcacgccggcagcacccccgaggccgccaccagcagcatgctgcccaccagcgaggacaccctgagcaagagagccagattcagcaagtacgaggagtacatcagaaagctgaaggccggcgagcagctgagctggcccgcccccagcaccaagaccgaggagagagtgggcaaggaggtggtgggcaccctgcccggcctgagactgcccagcagcaccgcccacctggagaccaaggccaccatcctgcccctgcccagccacagcagcgtgcagatgcagaacctggtggccagagccagcaagtacgacttcttcatccagaagctgaagaccggcgagaacctgagaccccagaacggcagcacctacaagaagcccagcaagtacgacctggagaacgtgaagtacctgcacctgttcaagcccggcgagggcagccccgacatgggcggcgccatcgccttcaagaccggcaaggtgggcagacccagcaagtacgacgtgagaggcatccagaagcccggccccgccaaggtgccccccacccccagcctggcccccgcccccctggccagcgtgcccagcgcccccagcgcccccggccccggccccgagccccccgccagcctgagcttcaacacccccgagtacctgaagagcaccttcagcaagaccgacagcatcaccaccggcaccgtgagcaccgtgaagaacggcctgcccaccgacaagcccgccgtgaccgaggacgtgaacatctaccagaagtacatcgccagattcagcggcagccagcactgcggccacatccactgcgcctaccagtacagagagcactaccactgcctggaccccgagtgcaactaccagagattcaccagcaagcaggacgtgatcagacactacaacatgcacaagaagagagacaacagcctgcagcacggcttcatgagattcagccccctggacgactgcagcgtgtactaccacggctgccacctgaacggcaagagcacccactaccactgcatgcaggtgggctgcaacaaggtgtacaccagcaccagcgacgtgatgacccacgagaacttccacaagaagaacacccagctgatcaacgacggcttccagagattcagagccaccgaggactgcggcaccgccgactgccagttctacggccagaagaccacccacttccactgcagaagacccggctgcaccttcaccttcaagaacaagtgcgacatcgagaagcacaagagctaccacatcaaggacgacgcctacgccaaggacggcttcaagaagttctacaagtacgaggagtgcaagtacgagggctgcgtgtacagcaaggccaccaaccacttccactgcatcagagccggctgcggcttcaccttcaccagcaccagccagatgaccagccacaagagaaagcacgagagaagacacatcagaagcagcggcgccctgggcctgccccccagcctgctgggcgccaaggacaccgagcacgaggagagcagcaacgacgacctggtggacttcagcgccctgagcagcaagaacagcagcctgagcgccagccccaccagccagcagagcagcgccagcctggccgccgccaccgccgccaccgaggccggccccagcgccaccaagccccccaacagcaagatcagcggcctgctgccccagggcctgcccggcagcatccccctggccctggccctgagcaacagcggcctgcccacccccaccccctacttccccatcctggccggcagaggcagcaccagcctgcccgtgggcacccccagcctgctgggcgccgtgagcagcggcagcgccgccagcgccacccccgacacccccaccctggtggccagcggcgccggcgacagcgcccccgtggccgccgccagcgtgcccgccccccccgccagcatcatggagagaatcagcgccagcaagggcctgatcagccccatgatggccagactggccgccgccgccctgaagcccagcgccaccttcgaccccggcagcggccagcaggtgacccccgccagattcccccccgcccaggtgaagcccgagcccggcgagagcaccggcgcccccggcccccacgaggccagccaggacagaagcctggacctgaccgtgaaggagcccagcaacgagagcaacggccacgccgtgcccgccaacagcagcctgctgagcagcctgatgaacaagatgagccagggcaaccccggcctgggcagcctgctgaacatcaaggccgaggccgagggcagccccgccgccgagcccagccccttcctgggcaaggccgtgaaggccctggtgcaggagaagctggccgagccctggaaggtgtacctgagaagattcggcaccaaggacttctgcgacggccagtgcgacttcctgcacaaggcccacttccactgcgtggtggaggagtgcggcgccctgttcagcaccctggacggcgccatcaagcacgccaacttccacttcagaaccgagggcggcgccgccaagggcaacaccgaggccgccttccccgccagcgccgccgagaccaagccccccatggcccccagcagcccccccgtgccccccgtgaccaccgccaccgtgagcagcctggagggccccgcccccagccccgccagcgtgcccagcacccccaccctgctggcctggaagcagctggccagcaccatcccccagatgccccagatccccgccagcgtgccccacctgcccgccagccccctggccaccaccagcctggagaacgccaagccccaggtgaagcccggcttcctgcagttccaggagaacgacccctgcctggccaccgactgcaagtacgccaacaagttccacttccactgcctgttcggcaactgcaagtacgtgtgcaagaccagcggcaaggccgagagccactgcctggaccacatcaaccccaacaacaacctggtgaacgtgagagaccagttcgcctactacagcctgcagtgcctgtgccccaaccagcactgcgagttcagaatgagaggccactaccactgcctgagaaccggctgctacttcgtgaccaacatcaccaccaagctgccctggcacatcaagaagcacgagaaggccgagagaagagccgccaacggcttcaagtacttcaccaagagagaggagtgcggcagactgggctgcaagtacaaccaggtgaacagccacttccactgcatcagagagggctgccagttcagcttcctgctgaagcaccagatgaccagccacgccagaaagcacatgagaagaatgctgggcaagaacttcgacagagtgccccccagccagggcccccccggcctgatggacgccgagaccgacgagtgcatggactacaccggctgcagccccggcgccatgagcagcgagagcagcaccatggacagaagctgcagcagcacccccgtgggcaacgagagcaccgccgccggcaacaccatcagcatgcccaccgccagcggcgccaagaagagattctggatcatcgaggacatgagccccttcggcaagagaagaaagaccgccagcagcagaaagatgctggacgagggcatgatgctggagggcttcagaagattcgacctgtacgaggactgcaaggacgccgcctgccagttcagcctgaaggtgacccactaccactgcaccagagagaactgcggctacaagttctgcggcagaacccacatgtacaagcacgcccagcaccacgacagagtggacaacctggtgctggacgacttcaagagattcaaggccagcctgagctgccacttcgccgactgccccttcagcggcaccagcacccacttccactgcctgagatgcagattcagatgcaccgacagcaccaaggtgaccgcccacagaaagcaccacggcaagcaggacgtgatcagcgccgccggcttctgccagttcagcagcagcgccgactgcgccgtgcccgactgcaagtacaagctgaagtgcagccacttccactgcaccttccccggctgcagacacaccgtggtgggcatgagccagatggacagccacaagagaaagcacgagaagcaggagagaggcgagcccgccgccgagggccccgcccccggcccccccatcagcctggacggcagcctgagcctgggcgccgagcccggcagcctgctgttcctgcagagcgccgccgccggcctgggcctggccctgggcgacgccggcgaccccggcccccccgacgccgccgcccccggccccagagagggcgccgccgccgccgccgccgccgccggcgagagcagccaggaggacgaggaggaggagctggagctgcccgaggaggaggccgaggacgacgaggacgaggacgacgacgaggacgacgacgacgaggacgacgacgaggacgacgacgacgaggacctgagaaccgacagcgaggagagcctgcccgaggccgccgccgaggccgccggcgccggcgccagaacccccgccctggccgccctggccgccctgggcgcccccggccccgcccccaccgccgccagcagcccctag

SEQ ID NO: 75638 - DNA, 4332 bp, synthetic construct
  misc_feature 1..4332: note = Description of Artificial Sequence: Synthetic coding sequence
  source 1..4332: mol_type = other DNA
caggagctggaggccgccctgcacagagacgacgtggagttcatcagcgacctgatcgcctgcctgctgcagggctgctaccagagaagagacatcaccccccagaccttccacagctacctggaggacatcatcaactacagatgggagctggaggagggcaagcccaaccccctgagagaggccagcttccaggacctgcccctgagaaccagagtggagatcctgcacagactgtgcgactacagactggacgccgacgacgtgttcgacctgctgaagggcctggacgccgacagcctgagagtggagcccctgggcgaggacaacagcggcgccctgtactggtacttctacggcaccagaatgtacaaggaggaccccgtgcagggcaagagcaacggcgagctgagcctgagcagagagagcgagggccagaagaacgtgagcagcatccccggcaagaccggcaagagaagaggcagaccccccaagagaaagaagctgcaggaggagatcctgctgagcgagaagcaggaggagaacagcctggccagcgagccccagaccagacacggcagccagggccccggccagggcacctggtggctgctgtgccagaccgaggaggagtggagacaggtgaccgagagcttcagagagagaaccagcctgagagagagacagctgtacaagctgctgagcgaggacttcctgcccgagatctgcaacatgatcgcccagaagggcaagagaccccagagaaccaaggccgagctgcaccccagatggatgagcgaccacctgagcatcaagcccgtgaagcaggaggagacccccgtgctgaccagaatcgagaagcagaagagaaaggaggaggaggaggagagacagatcctgctggccgtgcagaagaaggagcaggagcagatgctgaaggaggagagaaagagagagctggaggagaaggtgaaggccgtggagggcatgtgcagcgtgagagtggtgtggagaggcgcctgcctgagcaccagcagacccgtggacagagccaagagaagaaagctgagagaggagagagcctggctgctggcccagggcaaggagctgccccccgagctgagccacctggaccccaacagccccatgagagaggagaagaagaccaaggacctgttcgagctggacgacgacttcaccgccatgtacaaggtgctggacgtggtgaaggcccacaaggacagctggcccttcctggagcccgtggacgagagctacgcccccaactactaccagatcatcaaggcccccatggacatcagcagcatggagaagaagctgaacggcggcctgtactgcaccaaggaggagttcgtgaacgacatgaagaccatgttcagaaactgcagaaagtacaacggcgagagcagcgagtacaccaagatgagcgacaacctggagagatgcttccacagagccatgatgaagcacttccccggcgaggacggcgacaccgacgaggagttctggatcagagaggacgagaagagagagaagagaagaagcagagccggcagaagcggcggcagccacgtgtggaccagaagcagagaccccgagggcagcagcagaaagcagcagcccatggagaacggcggcaagagcctgccccccaccagaagagcccccagcagcggcgacgaccagagcagcagcagcacccagccccccagagaggtgggcaccagcaacggcagaggcttcagccaccccctgcactgcggcggcacccccagccaggcccccttcctgaaccagatgagacccgccgtgcccggcaccttcggccccctgagaggcagcgaccccgccaccctgtacggcagcagcggcgtgcccgagccccaccccggcgagcccgtgcagcagagacagcccttcaccatgcagccccccgtgggcatcaacagcctgagaggccccagactgggcacccccgaggagaagcagatgtgcggcggcctgacccacctgagcaacatgggcccccaccccggcagcctgcagctgggccagatcagcggccccagccaggacggcagcatgtacgcccccgcccagttccagcccggcttcatcccccccagacacggcggcgcccccgccagaccccccgacttccccgagagcagcgagatcccccccagccacatgtacagaagctacaagtacctgaacagagtgcacagcgccgtgtggaacggcaaccacggcgccaccaaccagggccccctgggccccgacgagaagccccacctgggccccggccccagccaccagcccagaaccctgggccacgtgatggacagcagagtgatgagaccccccgtgccccccaaccagtggaccgagcagagcggcttcctgccccacggcgtgcccagcagcggctacatgagacccccctgcaagagcgccggccacagactgcagcccccccccgtgcccgcccccagcagcctgttcggcgcccccgcccaggccctgagaggcgtgcagggcggcgacagcatgatggacagccccgagatgatcgccatgcagcagctgagcagcagagtgtgcccccccggcgtgccctaccacccccaccagcccgcccaccccagactgcccggccccttcccccaggtggcccaccccatgagcgtgaccgtgagcgcccccaagcccgccctgggcaaccccggcagagcccccgagaacagcgaggcccaggagcccgagaacgaccaggccgagcccctgcccggcctggaggagaagccccccggcgtgggcaccagcgagggcgtgtacctgacccagctgccccaccccaccccccccctgcagaccgactgcaccagacagagcagcccccaggagagagagaccgtgggccccgagctgaagagcagcagcagcgagagcgccgacaactgcaaggccatgaagggcaagaacccctggcccagcgacagcagctaccccggccccgccgcccagggctgcgtgagagacctgagcaccgtggccgacagaggcgccctgagcgagaacggcgtgatcggcgaggccagcccctgcggcagcgagggcaagggcctgggcagcagcggcagcgagaagctgctgtgccccagaggcagaaccctgcaggagaccatgccctgcaccggccagaacgccgccaccccccccagcaccgaccccggcctgaccggcggcaccgtgagccagttcccccccctgtacatgcccggcctggagtaccccaacagcgccgcccactaccacatcagccccggcctgcagggcgtgggccccgtgatgggcggcaagagccccgccagccacccccagcacttcccccccagaggcttccagagcaaccacccccacagcggcggcttccccagatacagacccccccagggcatgagatacagctaccacccccccccccagcccagctaccaccactaccagagaaccccctactacgcctgcccccagagcttcagcgactggcagagacccctgcacccccagggcagccccagcggcccccccgccagccagccccccccccccagaagcctgttcagcgacaagaacgccatggccagcctgcagggctgcgagaccctgaacgccgccctgaccagccccaccagaatggacgccgtggccgccaaggtgcccaacgacggccagaaccccggccccgaggaggagaagctggacgagagcatggagagacccgagagccccaaggagttcctggacctggacaaccacaacgccgccaccaagagacagagcagcctgagcgccagcgagtacctgtacggcacccccccccccctgagcagcggcatgggcttcggcagcagcgccttccccccccacagcgtgatgctgcagaccggccccccctacaccccccagagacccgccagccacttccagcccagagcctacagcagccccgtggccgccctgcccccccaccaccccggcgccacccagcccaacggcctgagccaggagggccccatctacagatgccaggaggagggcctgggccacttccaggccgtgatgatggagcagatcggcaccagaagcggcatcagaggccccttccaggagatgtacagacccagcggcatgcagatgcaccccgtgcagagccaggccagcttccccaagacccccaccgccgccaccagccaggaggaggtgcccccccacaagccccccaccctgcccctggaccagagctag

SEQ ID NO: 75639 - DNA, 1371 bp, synthetic construct
  misc_feature 1..1371: note = Description of Artificial Sequence: Synthetic coding sequence
  source 1..1371: mol_type = other DNA
gagctggaggccgccctgcacagagacgacgtggagttcatcagcgacctgatcgcctgcctgctgcagggctgctaccagagaagagacatcaccccccagaccttccacagctacctggaggacatcatcaactacagatgggagctggaggagggcaagcccaaccccctgagagaggccagcttccaggacctgcccctgagaaccagagtggagatcctgcacagactgtgcgactacagactggacgccgacgacgtgttcgacctgctgaagggcctggacgccgacagcctgagagtggagcccctgggcgaggacaacagcggcgccctgtactggtacttctacggcaccagaatgtacaaggaggaccccgtgcagggcaagagcaacggcgagctgagcctgagcagagagagcgagggccagaagaacgtgagcagcatccccggcaagaccggcaagagaagaggcagaccccccaagagaaagaagctgcaggaggagatcctgctgagcgagaagcaggaggagaacagcctggccagcgagccccagaccagacacggcagccagggccccggccagggcacctggtggctgctgtgccagaccgaggaggagtggagacaggtgaccgagagcttcagagagagaaccagcctgagagagagacagctgtacaagctgctgagcgaggacttcctgcccgagatctgcaacatgatcgcccagaaggagacccccgtgctgaccagaatcgagaagcagaagagaaaggaggaggaggaggagagacagatcctgctggccgtgcagaagaaggagcaggagcagatgctgaaggaggagagaaagagagagctggaggagaaggtgaaggccgtggagggcatgtgcagcgtgagagtggtgtggagaggcgcctgcctgagcaccagcagacccgtggacagagccaagagaagaaagctgagagaggagagagcctggctgctggcccagggcaaggagctgccccccgagctgagccacctggaccccaacagccccatgagagaggagaagaagaccaaggacctgttcgagctggacgacgacttcaccgccatgtacaaggtgctggacgtggtgaaggcccacaaggacagctggcccttcctggagcccgtggacgagagctacgcccccaactactaccagatcatcaaggcccccatggacatcagcagcatggagaagaagctgaacggcggcctgtactgcaccaaggaggagttcgtgaacgacatgaagaccatgttcagaaactgcagaaagtacaacggcgagagcagcggcaagcagggcagaagcctgtgctag

SEQ ID NO: 75640 - DNA, 1584 bp, synthetic construct
  misc_feature 1..1584: note = Description of Artificial Sequence: Synthetic coding sequence
  source 1..1584: mol_type = other DNA
atggccgacagcagagaccccgccagcgaccagatgcagcactggaaggagcagagagccgcccagaaggccgacgtgctgaccaccggcgccggcaaccccgtgggcgacaagctgaacgtgatcaccgtgggccccagaggccccctgctggtgcaggacgtggtgttcaccgacgagatggcccacttcgacagagagagaatccccgagagagtggtgcacgccaagggcgccggcgccttcggctacttcgaggtgacccacgacatcaccaagtacagcaaggccaaggtgttcgagcacatcggcaagaagacccccatcgccgtgagattcagcaccgtggccggcgagagcggcagcgccgacaccgtgagagaccccagaggcttcgccgtgaagttctacaccgaggacggcaactgggacctggtgggcaacaacacccccatcttcttcatcagagaccccatcctgttccccagcttcatccacagccagaagagaaacccccagacccacctgaaggaccccgacatggtgtgggacttctggagcctgagacccgagagcctgcaccaggtgagcttcctgttcagcgacagaggcatccccgacggccacagacacatgaacggctacggcagccacaccttcaagctggtgaacgccaacggcgaggccgtgtactgcaagttccactacaagaccgaccagggcatcaagaacctgagcgtggaggacgccgccagactgagccaggaggaccccgactacggcatcagagacctgttcaacgccatcgccaccggcaagtaccccagctggaccttctacatccaggtgatgaccttcaaccaggccgagaccttccccttcaaccccttcgacctgaccaaggtgtggccccacaaggactaccccctgatccccgtgggcaagctggtgctgaacagaaaccccgtgaactacttcgccgaggtggagcagatcgccttcgaccccagcaacatgccccccggcatcgaggccagccccgacaagatgctgcagggcagactgttcgcctaccccgacacccacagacacagactgggccccaactacctgcacatccccgtgaactgcccctacagagccagagtggccaactaccagagagacggccccatgtgcatgcaggacaaccagggcggcgcccccaactactaccccaacagcttcggcgcccccgagcagcagcccagcgccctggagcacagcatccagtacagcggcgaggtgagaagattcaacaccgccaacgacgacaacgtgacccaggtgagagccttctacgtgaacgtgctgaacgaggagcagagaaagagactgtgcgagaacatcgccggccacctgaaggacgcccagatcttcatccagaagaaggccgtgaagaacttcaccgaggtgcaccccgactacggcagccacatccaggccctgctggacaagtacaacgccgagaagcccaagaacgccatccacaccttcgtgcagagcggcagccacctggccgccagagagaaggccaacctgtag

SEQ ID NO: 75641 - DNA, 816 bp, synthetic construct
  misc_feature 1..816: note = Description of Artificial Sequence: Synthetic coding sequence
  source 1..816: mol_type = other DNA
atgcccgaggccccccccctgctgctggccgccgtgctgctgggcctggtgctgctggtggtgctgctgctgctgctgagacactggggctggggcctgtgcctgatcggctggaacgagttcatcctgcagcccatccacaacctgctgatgggcgacaccaaggagcagagaatcctgaaccacgtgctgcagcacgccgagcccggcaacgcccagagcgtgctggaggccatcgacacctactgcgagcagaaggagtgggccatgaacgtgggcgacaagaagggcaagatcgtggacgccgtgatccaggagcaccagcccagcgtgctgctggagctgggcgcctactgcggctacagcgccgtgagaatggccagactgctgagccccggcgccagactgatcaccatcgagatcaaccccgactgcgccgccatcacccagagaatggtggacttcgccggcgtgaaggacaaggtgaccctggtggtgggcgccagccaggacatcatcccccagctgaagaagaagtacgacgtggacaccctggacatggtgttcctggaccactggaaggacagatacctgcccgacaccctgctgctggaggagtgcggcctgctgagaaagggcaccgtgctgctggccgacaacgtgatctgccccggcgcccccgacttcctggcccacgtgagaggcagcagctgcttcgagtgcacccactaccagagcttcctggagtacagagaggtggtggacggcctggagaaggccatctacaagggccccggcagcgaggccggcccctag

SEQ ID NO: 75642 - DNA, 816 bp, synthetic construct; identical to SEQ ID NO: 75641
  misc_feature 1..816: note = Description of Artificial Sequence: Synthetic coding sequence
  source 1..816: mol_type = other DNA

SEQ ID NO: 75643 - DNA, 816 bp, synthetic construct; identical to SEQ ID NO: 75641
  misc_feature 1..816: note = Description of Artificial Sequence: Synthetic coding sequence
  source 1..816: mol_type = other DNA

SEQ ID NO: 75644 - DNA, 666 bp, synthetic construct
  misc_feature 1..666: note = Description of Artificial Sequence: Synthetic coding sequence
  source 1..666: mol_type = other DNA
atgggcgacaccaaggagcagagaatcctgaaccacgtgctgcagcacgccgagcccggcaacgcccagagcgtgctggaggccatcgacacctactgcgagcagaaggagtgggccatgaacgtgggcgacaagaagggcaagatcgtggacgccgtgatccaggagcaccagcccagcgtgctgctggagctgggcgcctactgcggctacagcgccgtgagaatggccagactgctgagccccggcgccagactgatcaccatcgagatcaaccccgactgcgccgccatcacccagagaatggtggacttcgccggcgtgaaggacaaggtgaccctggtggtgggcgccagccaggacatcatcccccagctgaagaagaagtacgacgtggacaccctggacatggtgttcctggaccactggaaggacagatacctgcccgacaccctgctgctggaggagtgcggcctgctgagaaagggcaccgtgctgctggccgacaacgtgatctgccccggcgcccccgacttcctggcccacgtgagaggcagcagctgcttcgagtgcacccactaccagagcttcctggagtacagagaggtggtggacggcctggagaaggccatctacaagggccccggcagcgaggccggcccctag

SEQ ID NO: 75645 - DNA, 672 bp, synthetic construct
  misc_feature 1..672: note = Description of Artificial Sequence: Synthetic coding sequence
  source 1..672: mol_type = other DNA
atgcccgaggccccccccctgctgctggccgccgtgctgctgggcctggtgctgctggtggtgctgctgctgctgctgagacactggggctggggcctgtgcctgatcggctggaacgagttcatcctgcagcccatccacaacctgctgatgggcgacaccaaggagcagagaatcctgaaccacgtgctgcagcacgccgagcccggcaacgcccagagcgtgctggaggccatcgacacctactgcgagcagaaggagtgggccatgaacgtgggcgacaagaagggcaagatcgtggacgccgtgatccaggagcaccagcccagcgtgctgctggagctgggcgcctactgcggctacagcgccgtgagaatggccagactgctgagccccggcgccagactgatcaccatcgagatcaaccccgactgcgccgccatcacccagagaatggtggacttcgccggcgtgaaggacaaggtgaccctggtggtgggcgccagccaggacatcatcccccagctgaagaagaagtacgacgtggacaccctggacatggtgttcctggaccactggaaggacagatacctgcccgacaccctgctgctggaggagtgcggcctgctgagaaagggcaccgtgctgctggccgacaacgtgatctgctag

SEQ ID NO: 75646 - DNA, 666 bp, synthetic construct; identical to SEQ ID NO: 75644
  misc_feature 1..666: note = Description of Artificial Sequence: Synthetic coding sequence
  source 1..666: mol_type = other DNA

SEQ ID NO: 75647 - DNA, 2664 bp, synthetic construct
  misc_feature 1..2664: note = Description of Artificial Sequence: Synthetic coding sequence
  source 1..2664: mol_type = other DNA
atggccaacggcaccctgaccagaagacaccagaacggcagattcgtgggcgacgccgacctggagagacagaagttcagcgacctgaagctgaacggcccccaggaccacagccacctgctgtacagcaccatccccagaatgcaggagcccggccagatcgtggagacctacaccgaggaggaccccgagggcgccatgagcgtggtgagcgtggagaccagcgacgacggcaccaccagaagaaccgagaccaccgtgaagaaggtggtgaagaccgtgaccaccagaaccgtgcagcccgtggccatgggccccgacggcctgcccgtggacgccagcagcgtgagcaacaactacatccagaccctgggcagagacttcagaaagaacggcaacggcggccccggcccctacgtgggccaggccggcaccgccaccctgcccagaaacttccactacccccccgacggctacagcagacactacgaggacggctaccccggcggcagcgacaactacggcagcctgagcagagtgaccagaatcgaggagagatacagacccagcatggagggctacagagcccccagcagacaggacgtgtacggcccccagccccaggtgagagtgggcggcagcagcgtggacctgcacagattccaccccgagccctacggcctggaggacgaccagagaagcatgggctacgacgacctggactacggcatgatgagcgactacggcaccgccagaagaaccggcacccccagcgaccccagaagaagactgagaagctacgaggacatgatcggcgaggaggtgcccagcgaccagtactactgggcccccctggcccagcacgagagaggcagcctggccagcctggacagcctgagaaagggcggcccccccccccccaactggagacagcccgagctgcccgaggtgatcgccatgctgggcttcagactggacgccgtgaagagcaacgccgccgcctacctgcagcacctgtgctacagaaacgacaaggtgaagaccgacgtgagaaagctgaagggcatccccgtgctggtgggcctgctggaccaccccaagaaggaggtgcacctgggcgcctgcggcgccctgaagaacatcagcttcggcagagaccaggacaacaagatcgccatcaagaactgcgacggcgtgcccgccctggtgagactgctgagaaaggccagagacatggacctgaccgaggtgatcaccggcaccctgtggaacctgagcagccacgacagcatcaagatggagatcgtggaccacgccctgcacgccctgaccgacgaggtgatcatcccccacagcggctgggagagagagcccaacgaggactgcaagcccagacacatcgagtgggagagcgtgctgaccaacaccgccggctgcctgagaaacgtgagcagcgagagaagcgaggccagaagaaagctgagagagtgcgacggcctggtggacgccctgatcttcatcgtgcaggccgagatcggccagaaggacagcgacagcaagctggtggagaactgcgtgtgcctgctgagaaacctgagctaccaggtgcacagagagatcccccaggccgagagataccaggaggccgcccccaacgtggccaacaacaccggcccccacgccgccagctgcttcggcgccaagaagggcaagggcaagaagcccatcgaggaccccgccaacgacaccgtggacttccccaagagaaccagccccgccagaggctacgagctgctgttccagcccgaggtggtgagaatctacatcagcctgctgaaggagagcaagacccccgccatcctggaggccagcgccggcgccatccagaacctgtgcgccggcagatggacctacggcagatacatcagaagcgccctgagacaggagaaggccctgagcgccatcgccgacctgctgaccaacgagcacgagagagtggtgaaggccgccagcggcgccctgagaaacctggccgtggacgccagaaacaaggagctgatcggcaagcacgccatccccaacctggtgaagaacctgcccggcggccagcagaacagcagctggaacttcagcgaggacaccgtgatcagcatcctgaacaccatcaacgaggtgatcgccgagaacctggaggccgccaagaagctgagagagacccagggcatcgagaagctggtgctgatcaacaagagcggcaacagaagcgagaaggaggtgagagccgccgccctggtgctgcagaccatctggggctacaaggagctgagaaagcccctggagaaggagggctggaagaagagcgacttccaggtgaacctgaacaacgccagcagaagccagagcagccacagctacgacgacagcaccctgcccctgatcgacagaaaccagaagagcgacaacaactacagcacccccaacgagagaggcgaccacaacagaaccctggacagaagcggcgacctgggcgacatggagcccctgaagggcaccacccccctgatgcaggacgagggccaggagagcctggaggaggagctggacgtgctggtgctggacgacgagggcggccaggtgagctaccccagcatgcagaagatctag

SEQ ID NO: 75648 - DNA, 1755 bp, synthetic construct
  misc_feature 1..1755: note = Description of Artificial Sequence: Synthetic coding sequence
  source 1..1755: mol_type = other DNA
atggacggctggagaagacccctgcagagcgtgggcaaggtgtgcgagaagaacatgaagaccagcgagatgcacaccatgagcggcgcccagaccggcagaaaggagaagggcgaccccctgaacatcgccatcgacaagatgaccaagaagaccagagacctgagaagacagctgagaaaggccgtgatggaccacatcagcgacagcttcctggagaccaacgtgcccctgctggtgctgatcgaggccgccaagagcggcaacgagaaggaggtgaaggagtacgcccaggtgttcagagagcacgccaacaagctggtggaggtggccaacctggcctgcagcatcagcaacaacgaggagggcgtgaagctggtgagaatggccgccacccagatcgacagcctgtgcccccaggtgatcaacgccgccctgaccctggccgccagaccccagagcaaggtggcccaggacaacatggacgtgttcaaggaccagtgggagaagcaggtgagagtgctgaccgaggccgtggacgacatcaccagcgtggacgacttcctgagcgtgagcgagaaccacatcctggaggacgtgaacaagtgcgtgatcgccctgcaggagggcgacgtggacaccctggacagaaccgccggcgccatcagaggcagagccgccagagtgatccacatcatcaacgccgagatggagaactacgaggccggcgtgtacaccgagaaggtgctggaggccaccaagctgctgagcgagaccgtgatgcccagattcgccgagcaggtggaggtggccatcgaggccctgagcgccaacgtgccccagcccttcgaggagaacgagttcatcgacgccagcagactggtgtacgacggcgtgagagacatcagaaaggccgtgctgatgatcagaacccccgaggagctggaggacgacagcgacttcgagcaggaggactacgacgtgagaagcagaaccagcgtgcagaccgaggacgaccagctgatcgccggccagagcgccagagccatcatggcccagctgccccaggaggagaaggccaagatcgccgagcaggtggagatcttccaccaggagaagagcaagctggacgccgaggtggccaagtgggacgacagcggcaacgacatcatcgtgctggccaagcagatgtgcatgatcatgatggagatgaccgacttcaccagaggcaagggccccctgaagaacaccagcgacgtgatcaacgccgccaagaagatcgccgaggccggcagcagaatggacaagctggccagagccgtggccgaccagtgccccgacagcgcctgcaagcaggacctgctggcctacctgcagagaatcgccctgtactgccaccagctgaacatctgcagcaaggtgaaggccgaggtgcagaacctgggcggcgagctgatcgtgagcggcctggacagcgccaccagcctgatccaggccgccaagaacctgatgaacgccgtggtgctgaccgtgaaggccagctacgtggccagcaccaagtaccagaaggtgtacggcaccgccgccgtgaacagccccgtggtgagctggaagatgaaggcccccgagaagaagcccctggtgaagagagagaagcccgaggagttccagaccagagtgagaagaggcagccagaagaagcacatcagccccgtgcaggccctgagcgagttcaaggccatggacagcttctag

SEQ ID NO: 75649 - DNA, 2820 bp, synthetic construct
  misc_feature 1..2820: note = Description of Artificial Sequence: Synthetic coding sequence
  source 1..2820: mol_type = other DNA
atgagcggcctgatctgcctgcagtacggcctgtggcacggccagaagatcgacttcggcggccccagaagactgctgcagagaaacagaggcgagggcagcatgaccagcgccaccagccccatcatcctgaagtgggaccccaagagcctggagatcagaaccctgaccgtggagagactgctggagcccctggtgacccaggtgaccaccctggtgaacaccagcaacaagggccccagcggcaagaagaagggcagaagcaagaaggcccacgtgctggccgccagcgtggagcaggccacccagaacttcctggagaagggcgagcagatcgccaaggagagccaggacctgaaggaggagctggtggccgccgtggaggacgtgagaaagcagggcgagaccatgagaatcgccagcagcgagttcgccgacgacccctgcagcagcgtgaagagaggcaccatggtgagagccgccagagccctgctgagcgccgtgaccagactgctgatcctggccgacatggccgacgtgatgagactgctgagccacctgaagatcgtggaggaggccctggaggccgtgaagaacgccaccaacgagcaggacctggccaacagattcaaggagttcggcaaggagatggtgaagctgaactacgtggccgccagaagacagcaggagctgaaggacccccactgcagagacgagatggccgccgccagaggcgccctgaagaagaacgccaccatgctgtacaccgccagccaggccttcctgagacaccccgacgtggccgccaccagagccaacagagactacgtgttcaagcaggtgcaggaggccatcgccggcatcagcaacgccgcccaggccaccagccccaccgacgaggccaagggccacaccggcatcggcgagctggccgccgccctgaacgagttcgacaacaagatcatcctggaccccatgaccttcagcgaggccagattcagacccagcctggaggagagactggagagcatcatcagcggcgccgccctgatggccgacagcagctgcaccagagacgacagaagagagagaatcgtggccgagtgcaacgccgtgagacaggccctgcaggacctgctgagcgagtacatgaacaacaccggcagaaaggagaagggcgaccccctgaacatcgccatcgacaagatgaccaagaagaccagagacctgagaagacagctgagaaaggccgtgatggaccacatcagcgacagcttcctggagaccaacgtgcccctgctggtgctgatcgaggccgccaagagcggcaacgagaaggaggtgaaggagtacgcccaggtgttcagagagcacgccaacaagctggtggaggtggccaacctggcctgcagcatcagcaacaacgaggagggcgtgaagctggtgagaatggccgccacccagatcgacagcctgtgcccccaggtgatcaacgccgccctgaccctggccgccagaccccagagcaaggtggcccaggacaacatggacgtgttcaaggaccagtgggagaagcaggtgagagtgctgaccgaggccgtggacgacatcaccagcgtggacgacttcctgagcgtgagcgagaaccacatcctggaggacgtgaacaagtgcgtgatcgccctgcaggagggcgacgtggacaccctggacagaaccgccggcgccatcagaggcagagccgccagagtgatccacatcatcaacgccgagatggagaactacgaggccggcgtgtacaccgagaaggtgctggaggccaccaagctgctgagcgagaccgtgatgcccagattcgccgagcaggtggaggtggccatcgaggccctgagcgccaacgtgccccagcccttcgaggagaacgagttcatcgacgccagcagactggtgtacgacggcgtgagagacatcagaaaggccgtgctgatgatcagaacccccgaggagctggaggacgacagcgacttcgagcaggaggactacgacgtgagaagcagaaccagcgtgcagaccgaggacgaccagctgatcgccggccagagcgccagagccatcatggcccagctgccccaggaggagaaggccaagatcgccgagcaggtggagatcttccaccaggagaagagcaagctggacgccgaggtggccaagtgggacgacagcggcaacgacatcatcgtgctggccaagcagatgtgcatgatcatgatggagatgaccgacttcaccagaggcaagggccccctgaagaacaccagcgacgtgatcaacgccgccaagaagatcgccgaggccggcagcagaatggacaagctggccagagccgtggccgaccagtgccccgacagcgcctgcaagcaggacctgctggcctacctgcagagaatcgccctgtactgccaccagctgaacatctgcagcaaggtgaaggccgaggtgcagaacctgggcggcgagctgatcgtgagcggcctggacagcgccaccagcctgatccaggccgccaagaacctgatgaacgccgtggtgctgaccgtgaaggccagctacgtggccagcaccaagtaccagaaggtgtacggcaccgccgccgtgaacagccccgtggtgagctggaagatgaaggcccccgagaagaagcccctggtgaagagagagaagcccgaggagttccagaccagagtgagaagaggcagccagaagaagcacatcagccccgtgcaggccctgagcgagttcaaggccatggacagcttctag

SEQ ID NO: 75650 - DNA, 2862 bp, synthetic construct
  misc_feature 1..2862: note = Description of Artificial Sequence: Synthetic coding sequence
  source 1..2862: mol_type = other DNA
atgaccagcgccaccagccccatcatcctgaagtgggaccccaagagcctggagatcagaaccctgaccgtggagagactgctggagcccctggtgacccaggtgaccaccctggtgaacaccagcaacaagggccccagcggcaagaagaagggcagaagcaagaaggcccacgtgctggccgccagcgtggagcaggccacccagaacttcctggagaagggcgagcagatcgccaaggagagccaggacctgaaggaggagctggtggccgccgtggaggacgtgagaaagcagggcgagaccatgagaatcgccagcagcgagttcgccgacgacccctgcagcagcgtgaagagaggcaccatggtgagagccgccagagccctgctgagcgccgtgaccagactgctgatcctggccgacatggccgacgtgatgagactgctgagccacctgaagatcgtggaggaggccctggaggccgtgaagaacgccaccaacgagcaggacctggccaacagattcaaggagttcggcaaggagatggtgaagctgaactacgtggccgccagaagacagcaggagctgaaggacccccactgcagagacgagatggccgccgccagaggcgccctgaagaagaacgccaccatgctgtacaccgccagccaggccttcctgagacaccccgacgtggccgccaccagagccaacagagactacgtgttcaagcaggtgcaggaggccatcgccggcatcagcaacgccgcccaggccaccagccccaccgacgaggccaagggccacaccggcatcggcgagctggccgccgccctgaacgagttcgacaacaagatcatcctggaccccatgaccttcagcgaggccagattcagacccagcctggaggagagactggagagcatcatcagcggcgccgccctgatggccgacagcagctgcaccagagacgacagaagagagagaatcgtggccgagtgcaacgccgtgagacaggccctgcaggacctgctgagcgagtacatgaacaacaccggcagaaaggagaagggcgaccccctgaacatcgccatcgacaagatgaccaagaagaccagagacctgagaagacagctgagaaaggccgtgatggaccacatcagcgacagcttcctggagaccaacgtgcccctgctggtgctgatcgaggccgccaagagcggcaacgagaaggaggtgaaggagtacgcccaggtgttcagagagcacgccaacaagctggtggaggtggccaacctggcctgcagcatcagcaacaacgaggagggcgtgaagctggtgagaatggccgccacccagatcgacagcctgtgcccccaggtgatcaacgccgccctgaccctggccgccagaccccagagcaaggtggcccaggacaacatggacgtgttcaaggaccagtgggagaagcaggtgagagtgctgaccgaggccgtggacgacatcaccagcgtggacgacttcctgagcgtgagcgagaaccacatcctggaggacgtgaacaagtgcgtgatcgccctgcaggagggcgacgtggacaccctggacagaaccgccggcgccatcagaggcagagccgccagagtgatccacatcatcaacgccgagatggagaactacgaggccggcgtgtacaccgagaaggtgctggaggccaccaagctgctgagcgagaccgtgatgcccagattcgccgagcaggtggaggtggccatcgaggccctgagcgccaacgtgccccagcccttcgaggagaacgagttcatcgacgccagcagactggtgtacgacggcgtgagagacatcagaaaggccgtgctgatgatcagaacccccgaggagctggaggacgacagcgacttcgagcaggaggactacgacgtgagaagcagaaccagcgtgcagaccgaggacgaccagctgatcgccggccagagcgccagagccatcatggcccagctgccccaggaggagaaggccaagatcgccgagcaggtggagatcttccaccaggagaagagcaagctggacgccgaggtggccaagtgggacgacagcggcaacgacatcatcgtgctggccaagcagatgtgcatgatcatgatggagatgaccgacttcaccagaggcaagggccccctgaagaacaccagcgacgtgatcaacgccgccaagaagatcgccgaggccggcagcagaatggacaagctggccagagccgtggccgaccagtgccccgacagcgcctgcaagcaggacctgctggcctacctgcagagaatcgccctgtactgccaccagctgaacatctgcagcaaggtgaaggccgaggtgcagaacctgggcggcgagctgatcgtgagcggcaccggcgtgcagagcaccttcaccaccttctacgaggtggactgcgacgtgatcgacggcggcagagccagccagctgagcacccacctgcccacctgcgccgagggcgcccccatcggcagcggcagcagcgacagcagcatgctggacagcgccaccagcctgatccaggccgccaagaacctgatgaacgccgtggtgctgaccgtgaaggccagctacgtggccagcaccaagtaccagaaggtgtacggcaccgccgccgtgaacagccccgtggtgagctggaagatgaaggcccccgagaagaagcccctggtgaagagagagaagcccgaggagttccagaccagagtgagaagaggcagccagaagaagcacatcagccccgtgcaggccctgagcgagttcaaggccatggacagcttctag

SEQ ID NO: 75651 - DNA, 354 bp, synthetic construct
  misc_feature 1..354: note = Description of Artificial Sequence: Synthetic coding sequence
  source 1..354: mol_type = other DNA
atgaccagcgccaccagccccatcatcctgaagtgggaccccaagagcctggagatcagaaccctgaccgtggagagactgctggagcccctggtgacccaggtgaccaccctggtgaacaccagcaacaagggccccagcggcaagaagaagggcagaagcaagaaggcccacgtgctggccgccagcgtggagcaggccacccagaacttcctggagaagggcgagcagatcgccaaggagagccaggacctgaaggaggagctggtggccgccgtggaggacgtgagaaagcagggcgagaccatgagaatcgccagcagcgagttcgccgacgacccctgcagcagctag

SEQ ID NO: 75652 - DNA, 201 bp, synthetic construct
  misc_feature 1..201: note = Description of Artificial Sequence: Synthetic coding sequence
  source 1..201: mol_type = other DNA
atgaccagcgccaccagccccatcatcctgaagtgggaccccaagagcctggagatcagaaccctgaccgtggagagactgctggagcccctggtgacccaggtgaccaccctggtgaacaccagcaacaagggccccagcggcaagaagaagggcagaagcaagaaggcccacgtgctggccgccagcgtggagcagtag

SEQ ID NO: 75653 - DNA, 2718 bp, synthetic construct
  misc_feature 1..2718: note = Description of Artificial Sequence: Synthetic coding sequence
  source 1..2718: mol_type = other DNA
atgaccagcgccaccagccccatcatcctgaagtgggaccccaagagcctggagatcagaaccctgaccgtggagagactgctggagcccctggtgacccaggtgaccaccctggtgaacaccagcaacaagggccccagcggcaagaagaagggcagaagcaagaaggcccacgtgctggccgccagcgtggagcaggccacccagaacttcctggagaagggcgagcagatcgccaaggagagccaggacctgaaggaggagctggtggccgccgtggaggacgtgagaaagcagggcgagaccatgagaatcgccagcagcgagttcgccgacgacccctgcagcagcgtgaagagaggcaccatggtgagagccgccagagccctgctgagcgccgtgaccagactgctgatcctggccgacatggccgacgtgatgagactgctgagccacctgaagatcgtggaggaggccctggaggccgtgaagaacgccaccaacgagcaggacctggccaacagattcaaggagttcggcaaggagatggtgaagctgaactacgtggccgccagaagacagcaggagctgaaggacccccactgcagagacgagatggccgccgccagaggcgccctgaagaagaacgccaccatgctgtacaccgccagccaggccttcctgagacaccccgacgtggccgccaccagagccaacagagactacgtgttcaagcaggtgcaggaggccatcgccggcatcagcaacgccgcccaggccaccagccccaccgacgaggccaagggccacaccggcatcggcgagctggccgccgccctgaacgagttcgacaacaagatcatcctggaccccatgaccttcagcgaggccagattcagacccagcctggaggagagactggagagcatcatcagcggcgccgccctgatggccgacagcagctgcaccagagacgacagaagagagagaatcgtggccgagtgcaacgccgtgagacaggccctgcaggacctgctgagcgagtacatgaacaacaccggcagaaaggagaagggcgaccccctgaacatcgccatcgacaagatgaccaagaagaccagagacctgagaagacagctgagaaaggccgtgatggaccacatcagcgacagcttcctggagaccaacgtgcccctgctggtgctgatcgaggccgccaagagcggcaacgagaaggaggtgaaggagtacgcccaggtgttcagagagcacgccaacaagctggtggaggtggccaacctggcctgcagcatcagcaacaacgaggagggcgtgaagctggtgagaatggccgccacccagatcgacagcctgtgcccccaggtgatcaacgccgccctgaccctggccgccagaccccagagcaaggtggcccaggacaacatggacgtgttcaaggaccagtgggagaagcaggtgagagtgctgaccgaggccgtggacgacatcaccagcgtggacgacttcctgagcgtgagcgagaaccacatcctggaggacgtgaacaagtgcgtgatcgccctgcaggagggcgacgtggacaccctggacagaaccgccggcgccatcagaggcagagccgccagagtgatccacatcatcaacgccgagatggagaactacgaggccggcgtgtacaccgagaaggtgctggaggccaccaagctgctgagcgagaccgtgatgcccagattcgccgagcaggtggaggtggccatcgaggccctgagcgccaacgtgccccagcccttcgaggagaacgagttcatcgacgccagcagactggtgtacgacggcgtgagagacatcagaaaggccgtgctgatgatcagaacccccgaggagctggaggacgacagcgacttcgagcaggaggactacgacgtgagaagcagaaccagcgtgcagaccgaggacgaccagctgatcgccggccagagcgccagagccatcatggcccagctgccccaggaggagaaggccaagatcgccgagcaggtggagatcttccaccaggagaagagcaagctggacgccgaggtggccaagtgggacgacagcggcaacgacatcatcgtgctggccaagcagatgtgcatgatcatgatggagatgaccgacttcaccagaggcaagggccccctgaagaacaccagcgacgtgatcaacgccgccaagaagatcgccgaggccggcagcagaatggacaagctggccagagccgtggccgaccagtgccccgacagcgcctgcaagcaggacctgctggcctacctgcagagaatcgccctgtactgccaccagctgaacatctgcagcaaggtgaaggccgaggtgcagaacctgggcggcgagctgatcgtgagcggcctggacagcgccaccagcctgatccaggccgccaagaacctgatgaacgccgtggtgctgaccgtgaaggccagctacgtggccagcaccaagtaccagaaggtgtacggcaccgccgccgtgaacagccccgtggtgagctggaagatgaaggcccccgagaagaagcccctggtgaagagagagaagcccgaggagttccagaccagagtgagaagaggcagccagaagaagcacatcagccccgtgcaggccctgagcgagttcaaggccatggacagcttctag

SEQ ID NO: 75654 - DNA, 2718 bp, synthetic construct; identical to SEQ ID NO: 75653
  misc_feature 1..2718: note = Description of Artificial Sequence: Synthetic coding sequence
  source 1..2718: mol_type = other DNA

SEQ ID NO: 75655 - DNA, 2583 bp, synthetic construct
  misc_feature 1..2583: note = Description of Artificial Sequence: Synthetic coding sequence
  source 1..2583: mol_type = other DNA
atgaccagcgccaccagccccatcatcctgaagtgggaccccaagagcctggagatcagaaccctgaccgtggagagactgctggagcccctggtgacccaggtgaccaccctggtgaacaccagcaacaagggccccagcggcaagaagaagggcagaagcaagaaggcccacgtgctggccgccagcgtggagcaggccacccagaacttcctggagaagggcgagcagatcgccaaggagagccaggacctgaaggaggagctggtggccgccgtggaggacgtgagaaagcagggcgagaccatgagaatcgccagcagcgagttcgccgacgacccctgcagcagcgtgaagagaggcaccatggtgagagccgccagagccctgctgagcgccgtgaccagactgctgatcctggccgacatggccgacgtgatgagactgctgagccacctgaagatcgtggaggaggccctggaggccgtgaagaacgccaccaacgagcaggacctggccaacagattcaaggagttcggcaaggagatggtgaagctgaactacgtggccgccagaagacagcaggagctgaaggacccccactgcagagacgagatggccgccgccagaggcgccctgaagaagaacgccaccatgctgtacaccgccagccaggccttcctgagacaccccgacgtggccgccaccagagccaacagagactacgtgttcaagcaggtgcaggaggccatcgccggcatcagcaacgccgcccaggccaccagccccaccgacgaggccaagggccacaccggcatcggcgagctggccgccgccctgaacgagttcgacaacaagatcatcctggaccccatgaccttcagcgaggccagattcagacccagcctggaggagagactggagagcatcatcagcggcgccgccctgatggccgacagcagctgcaccagagacgacagaagagagagaatcgtggccgagtgcaacgccgtgagacaggccctgcaggacctgctgagcgagtacatgaacaacaccggcagaaaggagaagggcgaccccctgaacatcgccatcgacaagatgaccaagaagaccagagacctgagaagacagctgagaaaggccgtgatggaccacatcagcgacagcttcctggagaccaacgtgcccctgctggtgctgatcgaggccgccaagagcggcaacgagaaggaggtgaaggagtacgcccaggtgttcagagagcacgccaacaagctggtggaggtggccaacctggcctgcagcatcagcaacaacgaggagggcgtgaagctggtgagaatggccgccacccagatcgacagcctgtgcccccaggtgatcaacgccgccctgaccctggccgccagaccccagagcaaggtggcccaggacaacatggacgtgttcaaggaccagtgggagaagcaggtgagagtgctgaccgaggccgtggacgacatcaccagcgtggacgacttcctgagcgtgagcgagaaccacatcctggaggacgtgaacaagtgcgtgatcgccctgcaggagggcgacgtggacaccctggacagaaccgccggcgccatcagaggcagagccgccagagtgatccacatcatcaacgccgagatggagaactacgaggccggcgtgtacaccgagaaggtgctggaggccaccaagctgctgagcgagaccgtgatgcccagattcgccgagcaggtggaggtggccatcgaggccctgagcgccaacgtgccccagcccttcgaggagaacgagttcatcgacgccagcagactggtgtacgacggcgtgagagacatcagaaaggccgtgctgatgatcagaacccccgaggagctggaggacgacagcgacttcgagcaggaggactacgacgtgagaagcagaaccagcgtgcagaccgaggacgaccagctgatcgccggccagagcgccagagccatcatggcccagctgccccaggaggagaaggccaagatcgccgagcaggtggagatcttccaccaggagaagagcaagctggacgccgaggtggccaagtgggacgacagcggcaacgacatcatcgtgctggccaagcagatgtgcatgatcatgatggagatgaccgacttcaccagaggcaagggccccctgaagaacaccagcgacgtgatcaacgccgccaagaagatcgccgaggccggcagcagaatggacaagctggccagagccgtggccgaccagctggacagcgccaccagcctgatccaggccgccaagaacctgatgaacgccgtggtgctgaccgtgaaggccagctacgtggccagcaccaagtaccagaaggtgtacggcaccgccgccgtgaacagccccgtggtgagctggaagatgaaggcccccgagaagaagcccctggtgaagagagagaagcccgaggagttccagaccagagtgagaagaggcagccagaagaagcacatcagccccgtgcaggccctgagcgagttcaaggccatggacagcttctag

SEQ ID NO: 75656 - DNA, 2718 bp, synthetic construct; identical to SEQ ID NO: 75653
  misc_feature 1..2718: note = Description of Artificial Sequence: Synthetic coding sequence
  source 1..2718: mol_type = other DNA

SEQ ID NO: 75657 - DNA, 582 bp, synthetic construct
  misc_feature 1..582: note = Description of Artificial Sequence: Synthetic coding sequence
  source 1..582: mol_type = other DNA
atgagcgccgagacccccatcaccctgaacatcgacccccaggacctgcaggtgcagaccttcaccgtggagaagctgctggagcccctgatcatccaggtgaccaccctggtgaactgcccccagaaccccagcagcagaaagaagggcagaagcaagagagccagcgtgctgctggccagcgtggaggaggccacctggaacctgctggacaagggcgagaagatcgcccaggaggccaccgtgctgaaggacgagctgaccgccagcctggaggaggtgagaaaggagagcgaggccctgaaggtgagcgccgagagattcaccgacgacccctgcttcctgcccaagagagaggccgtggtgcaggccgccagagccctgctggccgccgtgaccagactgctgatcctggccgacatgatcgacgtgatgtgcctgctgcagcacgtgagcgccttccagagaaccttcgagagcctgaagaacgtggccaacaagagcgacctgcagaagacctaccagaagctgggcaaggagctggagaacctggactacctggccttcaagagacagcagtag

SEQ ID NO: 75658 - DNA, 705 bp, synthetic construct
  misc_feature 1..705: note = Description of Artificial Sequence: Synthetic coding sequence
  source 1..705: mol_type = other DNA
atgacccagctgcccgaggccgagaaggagaagatcgccgagcaggtggccgacttcaagaaggtgaagagcaagctggacgccgagatcgagatctgggacgacaccagcaacgacatcatcgtgctggccaagaacatgtgcatgatcatgatggagatgaccgacttcaccagaggcaagggccccctgaagcacaccaccgacgtgatctacgccgccaagatgatcagcgagagcggcagcagaatggacgtgctggccagacagatcgccaaccagtgccccgaccccagctgcaagcaggacctgctggcctacctggagcagatcaagttctacagccaccagctgaagatctgcagccaggtgaaggccgagatccagaacctgggcggcgagctgatcatgagcgccctggacagcgtgaccagcctgatccaggccgccaagaacctgatgaacgccgtggtgcagaccgtgaagatgagctacatcgccagcaccaagatcatcagaatccagagccccgccggccccagacaccccgtggtgatgtggagaatgaaggcccccgccaagaagcccctgatcaagagagagaagcccgaggagacctgcgccgccgtgagaagaggcagcgccaagaagaagatccaccccctgcaggtgatgagcgagttcagaggcagacagatctactag

SEQ ID NO: 75659 - DNA, 2688 bp, synthetic construct
  misc_feature 1..2688: note = Description of Artificial Sequence: Synthetic coding sequence
  source 1..2688: mol_type = other DNA
atgagcgccgagacccccatcaccctgaacatcgacccccaggacctgcaggtgcagaccttcaccgtggagaagctgctggagcccctgatcatccaggtgaccaccctggtgaactgcccccagaaccccagcagcagaaagaagggcagaagcaagagagccagcgtgctgctggccagcgtggaggaggccacctggaacctgctggacaagggcgagaagatcgcccaggaggccaccgtgctgaaggacgagctgaccgccagcctggaggaggtgagaaaggagagcgaggccctgaaggtgagcgccgagagattcaccgacgacccctgcttcctgcccaagagagaggccgtggtgcaggccgccagagccctgctggccgccgtgaccagactgctgatcctggccgacatgatcgacgtgatgtgcctgctgcagcacgtgagcgccttccagagaaccttcgagagcctgaagaacgtggccaacaagagcgacctgcagaagacctaccagaagctgggcaaggagctggagaacctggactacctggccttcaagagacagcaggacctgaagagccccaaccagagagacgagatcgccggcgccagagccagcctgaaggagaacagccccctgctgcacagcatctgcagcgcctgcctggagcacagcgacgtggccagcctgaaggccagcaaggacaccgtgtgcgaggagatccagaacgccctgaacgtgatcagcaacgccagccagggcatccagaacatgaccaccccccccgagccccaggccgccaccctgggcagcgccctggacgagctggagaacctgatcgtgctgaaccccctgaccgtgaccgaggaggagatcagacccagcctggagaagagactggaggccatcatcagcggcgccgccctgctggccgacagcagctgcaccagagacctgcacagagagagaatcatcgccgagtgcaacgccatcagacaggccctgcaggacctgctgagcgagtacatgaacaacgccggcaagaaggagagaagcaacaccctgaacatcgccctggacaacatgtgcaagaagaccagagacctgagaagacagctgagaaaggccatcatcgaccacgtgagcgacagcttcctggacaccaccgtgcccctgctggtgctgatcgaggccgccaagaacggcagagagaaggagatcaaggagtacgccgccatcttccacgagcacaccagcagactggtggaggtggccaacctggcctgcagcatgagcaccaacgaggacggcatcaagatcgtgaagatcgccgccaaccacctggagaccctgtgcccccagatcatcaacgccgccctggccctggccgccagacccaagagccaggccgtgaagaacaccatggagatgtacaagagaacctgggagaaccacatccacgtgctgaccgaggccgtggacgacatcaccagcatcgacgacttcctggccgtgagcgagagccacatcctggaggacgtgaacaagtgcatcatcgccctgagagaccaggacgccgacaacctggacagagccgccggcgccatcagaggcagagccgccagagtggcccacatcgtgaccggcgagatggacagctacgagcccggcgcctacaccgagggcgtgatgagaaacgtgaacttcctgaccagcaccgtgatccccgagttcgtgacccaggtgaacgtggccctggaggccctgagcaagagcagcctgaacgtgctggacgacaaccagttcgtggacatcagcaagaagatctacgacaccatccacgacatcagatgcagcgtgatgatgatcagaacccccgaggagctggaggacgtgagcgacctggaggaggagcacgaggtgagaagccacaccagcatccagaccgagggcaagaccgacagagccaagatgacccagctgcccgaggccgagaaggagaagatcgccgagcaggtggccgacttcaagaaggtgaagagcaagctggacgccgagatcgagatctgggacgacaccagcaacgacatcatcgtgctggccaagaacatgtgcatgatcatgatggagatgaccgacttcaccagaggcaagggccccctgaagcacaccaccgacgtgatctacgccgccaagatgatcagcgagagcggcagcagaatggacgtgctggccagacagatcgccaaccagtgccccgaccccagctgcaagcaggacctgctggcctacctggagcagatcaagttctacagccaccagctgaagatctgcagccaggtgaaggccgagatccagaacctgggcggcgagctgatcatgagcgccctggacagcgtgaccagcctgatccaggccgccaagaacctgatgaacgccgtggtgcagaccgtgaagatgagctacatcgccagcaccaagatcatcagaatccagagccccgccggccccagacaccccgtggtgatgtggagaatgaaggcccccgccaagaagcccctgatcaagagagagaagcccgaggagacctgcgccgccgtgagaagaggcagcgccaagaagaagatccaccccctgcaggtgatgagcgagttcagaggcagacagatctactag

SEQ ID NO: 75660 - DNA, 2688 bp, synthetic construct; identical to SEQ ID NO: 75659
  misc_feature 1..2688: note = Description of Artificial Sequence: Synthetic coding sequence
  source 1..2688: mol_type = other DNA

SEQ ID NO: 75661 - DNA, 1131 bp, synthetic construct
  misc_feature 1..1131: note = Description of Artificial Sequence: Synthetic coding sequence
  source 1..1131: mol_type = other DNA
atgagcgccgagacccccatcaccctgaacatcgacccccaggacctgcaggtgcagaccttcaccgtggagaagctgctggagcccctgatcatccaggtgaccaccctggtgaactgcccccagaaccccagcagcagaaagaagggcagaagcaagagagccagcgtgctgctggccagcgtggaggaggccacctggaacctgctggacaagggcgagaagatcgcccaggaggccaccgtgctgaaggacgagctgaccgccagcctggaggaggtgagaaaggagagcgaggccctgaaggtgagcgccgagagattcaccgacgacccctgcttcctgcccaagagagaggccgtggtgcaggccgccagagccctgctggccgccgtgaccagactgctgatcctggccgacatgatcgacgtgatgtgcctgctgcagcacgtgagcgccttccagagaaccttcgagagcctgaagaacgtggccaacaagagcgacctgcagaagacctaccagaagctgggcaaggagctggagaacctggactacctggccttcaagagacagcaggacctgaagagccccaaccagagagacgagatcgccggcgccagagccagcctgaaggagaacagccccctgctgcacagcatctgcagcgcctgcctggagcacagcgacgtggccagcctgaaggccagcaaggacaccgtgtgcgaggagatccagaacgccctgaacgtgatcagcaacgccagccagggcatccagaacatgaccaccccccccgagccccaggccgccaccctgggcagcgccctggacgagctggagaacctgatcgtgctgaaccccctgaccgtgaccgaggaggagatcagacccagcctggagaagagactggaggccatcatcagcggcgccgccctgctggccgacagcagctgcaccagagacctgcacagagagagaatcatcgccgagtgcaacgccatcagacaggccctgcaggacctgctgagcgagtacatgaacaacctgtgcaaccagaagagcgacctgggcctgaccggcgtgaagatcaagctgctggaggagtgcatcatcttctggagcctgtag

SEQ ID NO: 75662 - DNA, 582 bp, synthetic construct; identical to SEQ ID NO: 75657
  misc_feature 1..582: note = Description of Artificial Sequence: Synthetic coding sequence
  source 1..582: mol_type = other DNA

SEQ ID NO: 75663 - DNA, 1131 bp, synthetic construct; identical to SEQ ID NO: 75661
  misc_feature 1..1131: note = Description of Artificial Sequence: Synthetic coding sequence
  source 1..1131: mol_type = other DNA

SEQ ID NO: 75664 - DNA, 2205 bp, synthetic construct
  misc_feature 1..2205: note = Description of Artificial Sequence: Synthetic coding sequence
  source 1..2205: mol_type = other DNA
atggccgccagccccggccccgccggcgtgggcggcgccggcgccgtgtacggcagcggcagcagcggcttcgccctggacagcggcctggagatcaagaccagaagcgtggagcagaccctgctgcccctggtgagccagatcaccaccctgatcaaccacaaggacaacaccaagaagagcgacaagaccctgcaggccatccagagagtgggccaggccgtgaacctggccgtgggcagattcgtgaaggtgggcgaggccatcgccaacgagaactgggacctgaaggaggagatcaacatcgcctgcatcgaggccaagcaggccggcgagaccatcgccgccctgaccgacatcaccaacctgaaccacctggagagcgacggccagatcaccatcttcaccgacaagaccggcgtgatcaaggccgccagactgctgctgagcagcgtgaccaaggtgctgctgctggccgacagagtggtgatcaagcagatcatcaccagcagaaacaaggtgctggccaccatggagagactggagaaggtgaacagcttccaggagttcgtgcagatcttcagccagttcggcaacgagatggtggagttcgcccacctgagcggcgacagacagaacgacctgaaggacgagaagaagaaggccaagatggccgccgccagagccgtgctggagaagtgcaccatgatgctgctgaccgccagcaagacctgcctgagacaccccaactgcgagagcgcccacaagaacaaggagggcgtgttcgacagaatgaaggtggccctggacaaggtgatcgagatcgtgaccgactgcaagcccaacggcgagaccgacatcagcagcatcagcatcttcaccggcatcaaggagttcaagatgaacatcgaggccctgagagagaacctgtacttccagagcaaggagaacctgagcgtgaccctggaggtgatcctggagagaatggaggacttcaccgacagcgcctacaccagccacgagcacagagagagaatcctggagctgagcacccaggccagaatggagctgcagcagctgatcagcgtgtggatccaggcccagagcaagaagaccaagagcatcgccgaggagctggagctgagcatcctgaagatcagccacagcctgaacgagctgaagaaggagctgcacagcaccgccacccagctggccgccgacctgctgaagtaccacgccgaccacgtggtgctgaaggccctgaagctgaccggcgtggagggcaacctggaggccctggccgagtacgcctgcaagctgagcgagcagaaggagcagctggtggagacctgcagactgctgagacacatcagcggcaccgagcccctggagatcacctgcatccacgccgaggagaccttccaggtgaccggccagcagatcatcagcgccgccgagaccctgaccctgcaccccagcagcaagatcgccaaggagaacctggacgtgttctgcgaggcctgggagagccagatcagcgacatgagcaccctgctgagagagatcaacgacgtgttcgagggcagaagaggcgagaagtacggctacctgagcctgcccaagcccatgaagaacaacgccaacctgaagagcctgaagcccgacaagcccgacagcgaggagcaggccaagatcgccaagctgggcctgaagctgggcctgctgaccagcgacgccgactgcgagatcgagaagtgggaggaccaggagaacgagatcgtgcagtacggcagaaacatgagcagcatggcctacagcctgtacctgttcaccagaggcgagggccccctgaagaccagccaggacctgatccaccagctggaggtgttcgccgccgagggcctgaagctgaccagcagcgtgcaggccttcagcaagcagctgaaggacgacgacaagctgatgctgctgctggagatcaacaagctgatccccctgtgccaccagctgcagaccgtgaccaagaccagcctgcagaacaaggtgttcctgaaggtggacaagtgcatcaccaagaccagaagcatgatggccctgctggtgcagctgctgagcctgtgctacaagctgctgaagaagctgcagatggagaacaacggctgggtgagcgtgaccaacaaggacaccatggacagcaagacctag

SEQ ID NO: 75665 - DNA, 1953 bp, synthetic construct
  misc_feature 1..1953: note = Description of Artificial Sequence: Synthetic coding sequence
  source 1..1953: mol_type = other DNA
atggccgccagccccggccccgccggcgtgggcggcgccggcgccgtgtacggcagcggcagcagcggcttcgccctggacagcggcctggagatcaagaccagaagcgtggagcagaccctgctgcccctggtgagccagatcaccaccctgatcaaccacaaggacaacaccaagaagagcgacaagaccctgcaggccatccagagagtgggccaggccgtgaacctggccgtgggcagattcgtgaaggtgggcgaggccatcgccaacgagaactgggacctgaaggaggagatcaacatcgcctgcatcgaggccaagcaggccggcgagaccatcgccgccctgaccgacatcaccaacctgaaccacctggagagcgacggccagatcaccatcttcaccgacaagaccggcgtgatcaaggccgccagactgctgctgagcagcgtgaccaaggtgctgctgctggccgacagagtggtgatcaagcagatcatcaccagcagaaacaaggtgctggccaccatggagagactggagaaggtgaacagcttccaggagttcgtgcagatcttcagccagttcggcaacgagatggtggagttcgcccacctgagcggcgacagacagaacgacctgaaggacgagaagaagaaggccaagatggccgccgccagagccgtgctggagaagtgcaccatgatgctgctgaccgccagcaagacctgcctgagacaccccaactgcgagagcgcccacaagaacaaggagggcgtgttcgacagaatgaaggtggccctggacaaggtgatcgagatcgtgaccgactgcaagcccaacggcgagaccgacatcagcagcatcagcatcttcaccggcatcaaggagttcaagatgaacatcgaggccctgagagagaacctgtacttccagagcaaggagaacctgagcgtgaccctggaggtgatcctggagagaatggaggacttcaccgacagcgcctacaccagccacgagcacagagagagaatcctggagctgagcacccaggccagaatggagctgcagcagctgatcagcgtgtggatccaggcccagagcaagaagaccaagagcatcgccgaggagctggagctgagcatcctgaagatcagccacagcctgaacgagctgaagaaggagatcatcagcgccgccgagaccctgaccctgcaccccagcagcaagatcgccaaggagaacctggacgtgttctgcgaggcctgggagagccagatcagcgacatgagcaccctgctgagagagatcaacgacgtgttcgagggcagaagaggcgagaagtacggctacctgagcctgcccaagcccatgaagaacaacgccaacctgaagagcctgaagcccgacaagcccgacagcgaggagcaggccaagatcgccaagctgggcctgaagctgggcctgctgaccagcgacgccgactgcgagatcgagaagtgggaggaccaggagaacgagatcgtgcagtacggcagaaacatgagcagcatggcctacagcctgtacctgttcaccagaggcgagggccccctgaagaccagccaggacctgatccaccagctggaggtgttcgccgccgagggcctgaagctgaccagcagcgtgcaggccttcagcaagcagctgaaggacgacgacaagctgatgctgctgctggagatcaacaagctgatccccctgtgccaccagctgcagaccgtgaccaagaccagcctgcagaacaaggtgttcctgaaggtggacaagtgcatcaccaagaccagaagcatgatggccctgctggtgcagctgctgagcctgtgctacaagctgctgaagaagctgcagatggagaacaacggctgggtgagcgtgaccaacaaggacaccatggacagcaagacctag

SEQ ID NO: 75666 - DNA, 552 bp, synthetic construct
  misc_feature 1..552: note = Description of Artificial Sequence: Synthetic coding sequence
  source 1..552: mol_type = other DNA
atggccgccagccccggccccgccggcgtgggcggcgccggcgccgtgtacggcagcggcagcagcggcttcgccctggacagcggcctggagatcaagaccagaagcgtggagcagaccctgctgcccctggtgagccagatcaccaccctgatcaaccacaaggacaacaccaagaagagcgacaagaccctgcaggccatccagagagtgggccaggccgtgaacctggccgtgggcagattcgtgaaggtgggcgaggccatcgccaacgagaactgggacctgaaggaggagatcaacatcgcctgcatcgaggccaagcaggccggcgagaccatcgccgccctgaccgacatcaccaacctgaaccacctggagagcgacggccagatcaccatcttcaccgacaagaccggcgtgatcaaggccgccagactgctgctgagcagcgtgaccaaggtgctgctgctggccgacagagtggtgatcaagcagatcatcaccagcagaaacaagagactgaccatctacaacctgagacacagctag

SEQ ID NO: 75667 - DNA, 408 bp, synthetic construct
  misc_feature 1..408: note = Description of Artificial Sequence: Synthetic coding sequence
  source 1..408: mol_type = other DNA
atgagcagcatggcctacagcctgtacctgttcaccagaggcgagggccccctgaagaccagccaggacctgatccaccagctggaggtgttcgccgccgagggcctgaagctgaccagcagcgtgcaggccttcagcaagcagctgaaggacgacgacaagctgatgctgctgctggagatcaacaagctgatccccctgtgccaccagctgcagaccgtgaccaagaccagcctgcagaacaaggtgttcctgaaggtggacaagtgcatcaccaagaccagaagcatgatggccctgctggtgcagctgctgagcctgtgctacaagctgctgaagaagctgcagatggagaacaacggctgggtgagcgtgaccaacaaggacaccatggacagcaagacctag

SEQ ID NO: 75668 - DNA, 2157 bp, synthetic construct
  misc_feature 1..2157: note = Description of Artificial Sequence: Synthetic coding sequence
  source 1..2157: mol_type = other DNA
atggccgccagccccggccccgccggcgtgggcggcgccggcgccgtgtacggcagcggcagcagcggcttcgccctggacagcggcctggagatcaagaccagaagcgtggagcagaccctgctgcccctggtgagccagatcaccaccctgatcaaccacaaggacaacaccaagaagagcgacaagaccctgcaggccatccagagagtgggccaggccgtgaacctggccgtgggcagattcgtgaaggtgggcgaggccatcgccaacgagaactgggacctgaaggaggagatcaacatcgcctgcatcgaggccaagcaggccggcgagaccatcgccgccctgaccgacatcaccaacctgaaccacctggagagcgacggccagatcaccatcttcaccgacaagaccggcgtgatcaaggccgccagactgctgctgagcagcgtgaccaaggtgctgctgctggccgacagagtggtgatcaagcagatcatcaccagcagaaacaaggtgctggccaccatggagagactggagaaggtgaacagcttccaggagttcgtgcagatcttcagccagttcggcaacgagatggtggagttcgcccacctgagcggcgacagacagaacgacctgaaggacgagaagaagaaggccaagatggccgccgccagagccgtgctggagaagtgcaccatgatgctgctgaccgccagcaagacctgcctgagacaccccaactgcgagagcgcccacaagaacaaggagggcgtgttcgacagaatgaaggtggccctggacaaggtgatcgagatcgtgaccgactgcaagcccaacggcgagaccgacatcagcagcatcagcatcttcaccggcatcaaggagttcaagatgaacatcgaggccctgagagagaacctgtacttccagagcaaggagaacctgagcgtgaccctggaggtgatcctggagagaatggaggacttcaccgacagcgcctacaccagccacgagcacagagagagaatcctggagctgagcacccaggccagaatggagctgcagcagctgatcagcgtgtggatccaggcccagagcaagaagaccaagagcatcgccgaggagctggagctgagcatcctgaagatcagccacagcctgaacgagctgaagaaggagctgcacagcaccgccacccagctggccgccgacctgctgaagtaccacgccgaccacgtggtgctgaaggccctgaagctgaccggcgtggagggcaacctggaggccctggccgagtacgcctgcaagctgagcgagcagaaggagcagctggtggagacctgcagactgctgagacacatcagcggcaccgagcccctggagatcacctgcatccacgccgaggagaccttccaggtgaccggccagcagatcatcagcgccgccgagaccctgaccctgcaccccagcagcaagatcgccaaggagaacctggacgtgttctgcgaggcctgggagagccagatcagcgacatgagcaccctgctgagagagatcaacgacgtgttcgagggcagaagaggcgagaagtacggctacctgagcctgcccaagcccatgaagaacaacgccaacctgaagagcctgaagcccgacaagcccgacagcgaggagcaggccaagatcgccaagctgggcctgaagctgggcctgctgaccagcgacgccgactgcgagatcgagaagtgggaggaccaggagaacgagatcgtgcagtacggcagaaacatgagcagcatggcctacagcctgtacctgttcaccagaggcgagggccccctgaagaccagccaggacctgatccaccagctggaggtgttcgccgccgagggcctgaagctgaccagcagcgtgcaggccttcagcaagcagctgaaggacgacgacaagctgatgctgctgctggagatcaacaagctgatccccctgtgccaccagctgcagaccgtgaccaagaccagcctgcagaacaaggtgttcctgaaggtggacaagtgcatcaccaagaccagaagcatgatggccctgctggtgcagctgctgagcctgtgctacaagctgctgaagaagagcgagaccagatactag

SEQ ID NO: 75669 - DNA, 2802 bp, synthetic construct
  misc_feature 1..2802: note = Description of Artificial Sequence: Synthetic coding sequence
  source 1..2802: mol_type = other DNA
atggacgacagcgaggtggagagcaccgccagcatcctggccagcgtgaaggagcaggaggcccagttcgagaagctgaccagagccctggaggaggagagaagacacgtgagcgcccagctggagagagtgagagtgagcccccaggacgccaaccccctgatggccaacggcaccctgaccagaagacaccagaacggcagattcgtgggcgacgccgacctggagagacagaagttcagcgacctgaagctgaacggcccccaggaccacagccacctgctgtacagcaccatccccagaatgcaggagcccggccagatcgtggagacctacaccgaggaggaccccgagggcgccatgagcgtggtgagcgtggagaccagcgacgacggcaccaccagaagaaccgagaccaccgtgaagaaggtggtgaagaccgtgaccaccagaaccgtgcagcccgtggccatgggccccgacggcctgcccgtggacgccagcagcgtgagcaacaactacatccagaccctgggcagagacttcagaaagaacggcaacggcggccccggcccctacgtgggccaggccggcaccgccaccctgcccagaaacttccactacccccccgacggctacagcagacactacgaggacggctaccccggcggcagcgacaactacggcagcctgagcagagtgaccagaatcgaggagagatacagacccagcatggagggctacagagcccccagcagacaggacgtgtacggcccccagccccaggtgagagtgggcggcagcagcgtggacctgcacagattccaccccgagccctacggcctggaggacgaccagagaagcatgggctacgacgacctggactacggcatgatgagcgactacggcaccgccagaagaaccggcacccccagcgaccccagaagaagactgagaagctacgaggacatgatcggcgaggaggtgcccagcgaccagtactactgggcccccctggcccagcacgagagaggcagcctggccagcctggacagcctgagaaagggcggcccccccccccccaactggagacagcccgagctgcccgaggtgatcgccatgctgggcttcagactggacgccgtgaagagcaacgccgccgcctacctgcagcacctgtgctacagaaacgacaaggtgaagaccgacgtgagaaagctgaagggcatccccgtgctggtgggcctgctggaccaccccaagaaggaggtgcacctgggcgcctgcggcgccctgaagaacatcagcttcggcagagaccaggacaacaagatcgccatcaagaactgcgacggcgtgcccgccctggtgagactgctgagaaaggccagagacatggacctgaccgaggtgatcaccggcaccctgtggaacctgagcagccacgacagcatcaagatggagatcgtggaccacgccctgcacgccctgaccgacgaggtgatcatcccccacagcggctgggagagagagcccaacgaggactgcaagcccagacacatcgagtgggagagcgtgctgaccaacaccgccggctgcctgagaaacgtgagcagcgagagaagcgaggccagaagaaagctgagagagtgcgacggcctggtggacgccctgatcttcatcgtgcaggccgagatcggccagaaggacagcgacagcaagctggtggagaactgcgtgtgcctgctgagaaacctgagctaccaggtgcacagagagatcccccaggccgagagataccaggaggccgcccccaacgtggccaacaacaccggcccccacgccgccagctgcttcggcgccaagaagggcaagggcaagaagcccatcgaggaccccgccaacgacaccgtggacttccccaagagaaccagccccgccagaggctacgagctgctgttccagcccgaggtggtgagaatctacatcagcctgctgaaggagagcaagacccccgccatcctggaggccagcgccggcgccatccagaacctgtgcgccggcagatggacctacggcagatacatcagaagcgccctgagacaggagaaggccctgagcgccatcgccgacctgctgaccaacgagcacgagagagtggtgaaggccgccagcggcgccctgagaaacctggccgtggacgccagaaacaaggagctgatcggcaagcacgccatccccaacctggtgaagaacctgcccggcggccagcagaacagcagctggaacttcagcgaggacaccgtgatcagcatcctgaacaccatcaacgaggtgatcgccgagaacctggaggccgccaagaagctgagagagacccagggcatcgagaagctggtgctgatcaacaagagcggcaacagaagcgagaaggaggtgagagccgccgccctggtgctgcagaccatctggggctacaaggagctgagaaagcccctggagaaggagggctggaagaagagcgacttccaggtgaacctgaacaacgccagcagaagccagagcagccacagctacgacgacagcaccctgcccctgatcgacagaaaccagaagagcgacaagaagcccgacagagaggagatccagatgagcaacatgggcagcaacaccaagagcctggacaacaactacagcacccccaacgagagaggcgaccacaacagaaccctggacagaagcggcgacctgggcgacatggagcccctgaagggcaccacccccctgatgcagaagatctag

SEQ ID NO: 75670 - DNA, 2844 bp, synthetic construct
  misc_feature 1..2844: note = Description of Artificial Sequence: Synthetic coding sequence
  source 1..2844: mol_type = other DNA
atggacgacagcgaggtggagagcaccgccagcatcctggccagcgtgaaggagcaggaggcccagttcgagaagctgaccagagccctggaggaggagagaagacacgtgagcgcccagctggagagagtgagagtgagcccccaggacgccaaccccctgatggccaacggcaccctgaccagaagacaccagaacggcagattcgtgggcgacgccgacctggagagacagaagttcagcgacctgaagctgaacggcccccaggaccacagccacctgctgtacagcaccatccccagaatgcaggagcccggccagatcgtggagacctacaccgaggaggaccccgagggcgccatgagcgtggtgagcgtggagaccagcgacgacggcaccaccagaagaaccgagaccaccgtgaagaaggtggtgaagaccgtgaccaccagaaccgtgcagcccgtggccatgggccccgacggcctgcccgtggacgccagcagcgtgagcaacaactacatccagaccctgggcagagacttcagaaagaacggcaacggcggccccggcccctacgtgggccaggccggcaccgccaccctgcccagaaacttccactacccccccgacggctacagcagacactacgaggacggctaccccggcggcagcgacaactacggcagcctgagcagagtgaccagaatcgaggagagatacagacccagcatggagggctacagagcccccagcagacaggacgtgtacggcccccagccccaggtgagagtgggcggcagcagcgtggacctgcacagattccaccccgagccctacggcctggaggacgaccagagaagcatgggctacgacgacctggactacggcatgatgagcgactacggcaccgccagaagaaccggcacccccagcgaccccagaagaagactgagaagctacgaggacatgatcggcgaggaggtgcccagcgaccagtactactgggcccccctggcccagcacgagagaggcagcctggccagcctggacagcctgagaaagggcggcccccccccccccaactggagacagcccgagctgcccgaggtgatcgccatgctgggcttcagactggacgccgtgaagagcaacgccgccgcctacctgcagcacctgtgctacagaaacgacaaggtgaagaccgacgtgagaaagctgaagggcatccccgtgctggtgggcctgctggaccaccccaagaaggaggtgcacctgggcgcctgcggcgccctgaagaacatcagcttcggcagagaccaggacaacaagatcgccatcaagaactgcgacggcgtgcccgccctggtgagactgctgagaaaggccagagacatggacctgaccgaggtgatcaccggcaccctgtggaacctgagcagccacgacagcatcaagatggagatcgtggaccacgccctgcacgccctgaccgacgaggtgatcatcccccacagcggctgggagagagagcccaacgaggactgcaagcccagacacatcgagtgggagagcgtgctgaccaacaccgccggctgcctgagaaacgtgagcagcgagagaagcgaggccagaagaaagctgagagagtgcgacggcctggtggacgccctgatcttcatcgtgcaggccgagatcggccagaaggacagcgacagcaagctggtggagaactgcgtgtgcctgctgagaaacctgagctaccaggtgcacagagagatcccccaggccgagagataccaggaggccgcccccaacgtggccaacaacaccggcccccacgccgccagctgcttcggcgccaagaagggcaaggacgagtggttcagcagaggcaagaagcccatcgaggaccccgccaacgacaccgtggacttccccaagagaaccagccccgccagaggctacgagctgctgttccagcccgaggtggtgagaatctacatcagcctgctgaaggagagcaagacccccgccatcctggaggccagcgccggcgccatccagaacctgtgcgccggcagatggacctacggcagatacatcagaagcgccctgagacaggagaaggccctgagcgccatcgccgacctgctgaccaacgagcacgagagagtggtgaaggccgccagcggcgccctgagaaacctggccgtggacgccagaaacaaggagctgatcggcaagcacgccatccccaacctggtgaagaacctgcccggcggccagcagaacagcagctggaacttcagcgaggacaccgtgatcagcatcctgaacaccatcaacgaggtgatcgccgagaacctggaggccgccaagaagctgagagagacccagggcatcgagaagctggtgctgatcaacaagagcggcaacagaagcgagaaggaggtgagagccgccgccctggtgctgcagaccatctggggctacaaggagctgagaaagcccctggagaaggagggctggaagaagagcgacttccaggtgaacctgaacaacgccagcagaagccagagcagccacagctacgacgacagcaccctgcccctgatcgacagaaaccagaagagcgacaacaactacagcacccccaacgagagaggcgaccacaacagaaccctggacagaagcggcgacctgggcgacatggagcccctgaagggcaccacccccctgatgcaggacgagggccaggagagcctggaggaggagctggacgtgctggtgctggacgacgagggcggccaggtgagctaccccagcatgcagaagatctag

SEQ ID NO: 75671 - DNA, 2889 bp, synthetic construct
  misc_feature 1..2889: note = Description of Artificial Sequence: Synthetic coding sequence
  source 1..2889: mol_type = other DNA
atggacgacagcgaggtggagagcaccgccagcatcctggccagcgtgaaggagcaggaggcccagttcgagaagctgaccagagccctggaggaggagagaagacacgtgagcgcccagctggagagagtgagagtgagcccccaggacgccaaccccctgatggccaacggcaccctgaccagaagacaccagaacggcagattcgtgggcgacgccgacctggagagacagaagttcagcgacctgaagctgaacggcccccaggaccacagccacctgctgtacagcaccatccccagaatgcaggagcccggccagatcgtggagacctacaccgaggaggaccccgagggcgccatgagcgtggtgagcgtggagaccagcgacgacggcaccaccagaagaaccgagaccaccgtgaagaaggtggtgaagaccgtgaccaccagaaccgtgcagcccgtggccatgggccccgacggcctgcccgtggacgccagcagcgtgagcaacaactacatccagaccctgggcagagacttcagaaagaacggcaacggcggccccggcccctacgtgggccaggccggcaccgccaccctgcccagaaacttccactacccccccgacggctacagcagacactacgaggacggctaccccggcggcagcgacaactacggcagcctgagcagagtgaccagaatcgaggagagatacagacccagcatggagggctacagagcccccagcagacaggacgtgtacggcccccagccccaggtgagagtgggcggcagcagcgtggacctgcacagattccaccccgagccctacggcctggaggacgaccagagaagcatgggctacgacgacctggactacggcatgatgagcgactacggcaccgccagaagaaccggcacccccagcgaccccagaagaagactgagaagctacgaggacatgatcggcgaggaggtgcccagcgaccagtactactgggcccccctggcccagcacgagagaggcagcctggccagcctggacagcctgagaaagggcggcccccccccccccaactggagacagcccgagctgcccgaggtgatcgccatgctgggcttcagactggacgccgtgaagagcaacgccgccgcctacctgcagcacctgtgctacagaaacgacaaggtgaagaccgacgtgagaaagctgaagggcatccccgtgctggtgggcctgctggaccaccccaagaaggaggtgcacctgggcgcctgcggcgccctgaagaacatcagcttcggcagagaccaggacaacaagatcgccatcaagaactgcgacggcgtgcccgccctggtgagactgctgagaaaggccagagacatggacctgaccgaggtgatcaccggcaccctgtggaacctgagcagccacgacagcatcaagatggagatcgtggaccacgccctgcacgccctgaccgacgaggtgatcatcccccacagcggctgggagagagagcccaacgaggactgcaagcccagacacatcgagtgggagagcgtgctgaccaacaccgccggctgcctgagaaacgtgagcagcgagagaagcgaggccagaagaaagctgagagagtgcgacggcctggtggacgccctgatcttcatcgtgcaggccgagatcggccagaaggacagcgacagcaagctggtggagaactgcgtgtgcctgctgagaaacctgagctaccaggtgcacagagagatcccccaggccgagagataccaggaggccgcccccaacgtggccaacaacaccggcccccacgccgccagctgcttcggcgccaagaagggcaagggcaagaagcccatcgaggaccccgccaacgacaccgtggacttccccaagagaaccagccccgccagaggctacgagctgctgttccagcccgaggtggtgagaatctacatcagcctgctgaaggagagcaagacccccgccatcctggaggccagcgccggcgccatccagaacctgtgcgccggcagatggacctacggcagatacatcagaagcgccctgagacaggagaaggccctgagcgccatcgccgacctgctgaccaacgagcacgagagagtggtgaaggccgccagcggcgccctgagaaacctggccgtggacgccagaaacaaggagctgatcggcaagcacgccatccccaacctggtgaagaacctgcccggcggccagcagaacagcagctggaacttcagcgaggacaccgtgatcagcatcctgaacaccatcaacgaggtgatcgccgagaacctggaggccgccaagaagctgagagagacccagggcatcgagaagctggtgctgatcaacaagagcggcaacagaagcgagaaggaggtgagagccgccgccctggtgctgcagaccatctggggctacaaggagctgagaaagcccctggagaaggagggctggaagaagagcgacttccaggtgaacctgaacaacgccagcagaagccagagcagccacagctacgacgacagcaccctgcccctgatcgacagaaaccagaagagcgacaagaagcccgacagagaggagatccagatgagcaacatgggcagcaacaccaagagcctggacaacaactacagcacccccaacgagagaggcgaccacaacagaaccctggacagaagcggcgacctgggcgacatggagcccctgaagggcaccacccccctgatgcaggacgagggccaggagagcctggaggaggagctggacgtgctggtgctggacgacgagggcggccaggtgagctaccccagcatgcagaagatctag

SEQ ID NO: 75672 - DNA, 2826 bp, synthetic construct
  misc_feature 1..2826: note = Description of Artificial Sequence: Synthetic coding sequence
  source 1..2826: mol_type = other DNA
atggacgacagcgaggtggagagcaccgccagcatcctggccagcgtgaaggagcaggaggcccagttcgagaagctgaccagagccctggaggaggagagaagacacgtgagcgcccagctggagagagtgagagtgagcccccaggacgccaaccccctgatggccaacggcaccctgaccagaagacaccagaacggcagattcgtgggcgacgccgacctggagagacagaagttcagcgacctgaagctgaacggcccccaggaccacagccacctgctgtacagcaccatccccagaatgcaggagcccggccagatcgtggagacctacaccgaggaggaccccgagggcgccatgagcgtggtgagcgtggagaccagcgacgacggcaccaccagaagaaccgagaccaccgtgaagaaggtggtgaagaccgtgaccaccagaaccgtgcagcccgtggccatgggccccgacggcctgcccgtggacgccagcagcgtgagcaacaactacatccagaccctgggcagagacttcagaaagaacggcaacggcggccccggcccctacgtgggccaggccggcaccgccaccctgcccagaaacttccactacccccccgacggctacagcagacactacgaggacggctaccccggcggcagcgacaactacggcagcctgagcagagtgaccagaatcgaggagagatacagacccagcatggagggctacagagcccccagcagacaggacgtgtacggcccccagccccaggtgagagtgggcggcagcagcgtggacctgcacagattccaccccgagccctacggcctggaggacgaccagagaagcatgggctacgacgacctggactacggcatgatgagcgactacggcaccgccagaagaaccggcacccccagcgaccccagaagaagactgagaagctacgaggacatgatcggcgaggaggtgcccagcgaccagtactactgggcccccctggcccagcacgagagaggcagcctggccagcctggacagcctgagaaagggcggcccccccccccccaactggagacagcccgagctgcccgaggtgatcgccatgctgggcttcagactggacgccgtgaagagcaacgccgccgcctacctgcagcacctgtgctacagaaacgacaaggtgaagaccgacgtgagaaagctgaagggcatccccgtgctggtgggcctgctggaccaccccaagaaggaggtgcacctgggcgcctgcggcgccctgaagaacatcagcttcggcagagaccaggacaacaagatcgccatcaagaactgcgacggcgtgcccgccctggtgagactgctgagaaaggccagagacatggacctgaccgaggtgatcaccggcaccctgtggaacctgagcagccacgacagcatcaagatggagatcgtggaccacgccctgcacgccctgaccgacgaggtgatcatcccccacagcggctgggagagagagcccaacgaggactgcaagcccagacacatcgagtgggagagcgtgctgaccaacaccgccggctgcctgagaaacgtgagcagcgagagaagcgaggccagaagaaagctgagagagtgcgacggcctggtggacgccctgatcttcatcgtgcaggccgagatcggccagaaggacagcgacagcaagctggtggagaactgcgtgtgcctgctgagaaacctgagctaccaggtgcacagagagatcccccaggccgagagataccaggaggccgcccccaacgtggccaacaacaccggcccccacgccgccagctgcttcggcgccaagaagggcaagggcaagaagcccatcgaggaccccgccaacgacaccgtggacttccccaagagaaccagccccgccagaggctacgagctgctgttccagcccgaggtggtgagaatctacatcagcctgctgaaggagagcaagacccccgccatcctggaggccagcgccggcgccatccagaacctgtgcgccggcagatggacctacggcagatacatcagaagcgccctgagacaggagaaggccctgagcgccatcgccgacctgctgaccaacgagcacgagagagtggtgaaggccgccagcggcgccctgagaaacctggccgtggacgccagaaacaaggagctgatcggcaagcacgccatccccaacctggtgaagaacctgcccggcggccagcagaacagcagctggaacttcagcgaggacaccgtgatcagcatcctgaacaccatcaacgaggtgatcgccgagaacctggaggccgccaagaagctgagagagacccagggcatcgagaagctggtgctgatcaacaagagcggcaacagaagcgagaaggaggtgagagccgccgccctggtgctgcagaccatctggggctacaaggagctgagaaagcccctggagaaggagggctggaagaagagcgacttccaggtgaacctgaacaacgccagcagaagccagagcagccacagctacgacgacagcaccctgcccctgatcgacagaaaccagaagagcgacaacaactacagcacccccaacgagagaggcgaccacaacagaaccctggacagaagcggcgacctgggcgacatggagcccctgaagggcaccacccccctgatgcaggacgagggccaggagagcctggaggaggagctggacgtgctggtgctggacgacgagggcggccaggtgagctaccccagcatgcagaagatctag

SEQ ID NO: 75673 - DNA, 2802 bp, synthetic construct; identical to SEQ ID NO: 75669
  misc_feature 1..2802: note = Description of Artificial Sequence: Synthetic coding sequence
  source 1..2802: mol_type = other DNA

SEQ ID NO: 75674 - DNA, 2817 bp, synthetic construct
  misc_feature 1..2817: note = Description of Artificial Sequence: Synthetic coding sequence
  source 1..2817: mol_type = other DNA
atggacgacagcgaggtggagagcaccgccagcatcctggccagcgtgaaggagcaggaggcccagttcgagaagctgaccagagccctggaggaggagagaagacacgtgagcgcccagctggagagagtgagagtgagcccccaggacgccaaccccctgatggccaacggcaccctgaccagaagacaccagaacggcagattcgtgggcgacgccgacctggagagacagaagttcagcgacctgaagctgaacggcccccaggaccacagccacctgctgtacagcaccatccccagaatgcaggagcccggccagatcgtggagacctacaccgaggaggaccccgagggcgccatgagcgtggtgagcgtggagaccagcgacgacggcaccaccagaagaaccgagaccaccgtgaagaaggtggtgaagaccgtgaccaccagaaccgtgcagcccgtggccatgggccccgacggcctgcccgtggacgccagcagcgtgagcaacaactacatccagaccctgggcagagacttcagaaagaacggcaacggcggccccggcccctacgtgggccaggccggcaccgccaccctgcccagaaacttccactacccccccgacggctacagcagacactacgaggacggctaccccggcggcagcgacaactacggcagcctgagcagagtgaccagaatcgaggagagatacagacccagcatggagggctacagagcccccagcagacaggacgtgtacggcccccagccccaggtgagagtgggcggcagcagcgtggacctgcacagattccaccccgagccctacggcctggaggacgaccagagaagcatgggctacgacgacctggactacggcatgatgagcgactacggcaccgccagaagaaccggcacccccagcgaccccagaagaagactgagaagctacgaggacatgatcggcgaggaggtgcccagcgaccagtactactgggcccccctggcccagcacgagagaggcagcctggccagcctggacagcctgagaaagggcggcccccccccccccaactggagacagcccgagctgcccgaggtgatcgccatgctgggcttcagactggacgccgtgaagagcaacgccgccgcctacctgcagcacctgtgctacagaaacgacaaggtgaagaccgacgtgagaaagctgaagggcatccccgtgctggtgggcctgctggaccaccccaagaaggaggtgcacctgggcgcctgcggcgccctgaagaacatcagcttcggcagagaccaggacaacaagatcgccatcaagaactgcgacggcgtgcccgccctggtgagactgctgagaaaggccagagacatggacctgaccgaggtgatcaccggcaccctgtggaacctgagcagccacgacagcatcaagatggagatcgtggaccacgccctgcacgccctgaccgacgaggtgatcatcccccacagcggctgggagagagagcccaacgaggactgcaagcccagacacatcgagtgggagagcgtgctgaccaacaccgccggctgcctgagaaacgtgagcagcgagagaagcgaggccagaagaaagctgagagagtgcgacggcctggtggacgccctgatcttcatcgtgcaggccgagatcggccagaaggacagcgacagcaagctggtggagaactgcgtgtgcctgctgagaaacctgagctaccaggtgcacagagagatcccccaggccgagagataccaggaggccgcccccaacgtggccaacaacaccggcccccacgccgccagctgcttcggcgccaagaagggcaaggacgagtggttcagcagaggcaagaagcccatcgaggaccccgccaacgacaccgtggacttccccaagagaaccagccccgccagaggctacgagctgctgttccagcccgaggtggtgagaatctacatcagcctgctgaaggagagcaagacccccgccatcctggaggccagcgccggcgccatccagaacctgtgcgccggcagatggacctacggcagatacatcagaagcgccctgagacaggagaaggccctgagcgccatcgccgacctgctgaccaacgagcacgagagagtggtgaaggccgccagcggcgccctgagaaacctggccgtggacgccagaaacaaggagctgatcggcaagcacgccatccccaacctggtgaagaacctgcccggcggccagcagaacagcagctggaacttcagcgaggacaccgtgatcagcatcctgaacaccatcaacgaggtgatcgccgagaacctggaggccgccaagaagctgagagagacccagggcatcgagaagctggtgctgatcaacaagagcggcaacagaagcgagaaggaggtgagagccgccgccctggtgctgcagaccatctggggctacaaggagctgagaaagcccctggagaaggagggctggaagaagagcgacttccaggtgaacctgaacaacgccagcagaagccagagcagccacagctacgacgacagcaccctgcccctgatcgacagaaaccagaagagcgacaagaagcccgacagagaggagatccagatgagcaacatgggcagcaacaccaagagcctggacaacaactacagcacccccaacgagagaggcgaccacaacagaaccctggacagaagcggcgacctgggcgacatggagcccctgaagggcaccacccccctgatgaagatctag

SEQ ID NO: 75675 - DNA, 2907 bp, synthetic construct
  misc_feature 1..2907: note = Description of Artificial Sequence: Synthetic coding sequence
  source 1..2907: mol_type = other DNA
atggacgacagcgaggtggagagcaccgccagcatcctggccagcgtgaaggagcaggaggcccagttcgagaagctgaccagagccctggaggaggagagaagacacgtgagcgcccagctggagagagtgagagtgagcccccaggacgccaaccccctgatggccaacggcaccctgaccagaagacaccagaacggcagattcgtgggcgacgccgacctggagagacagaagttcagcgacctgaagctgaacggcccccaggaccacagccacctgctgtacagcaccatccccagaatgcaggagcccggccagatcgtggagacctacaccgaggaggaccccgagggcgccatgagcgtggtgagcgtggagaccagcgacgacggcaccaccagaagaaccgagaccaccgtgaagaaggtggtgaagaccgtgaccaccagaaccgtgcagcccgtggccatgggccccgacggcctgcccgtggacgccagcagcgtgagcaacaactacatccagaccctgggcagagacttcagaaagaacggcaacggcggccccggcccctacgtgggccaggccggcaccgccaccctgcccagaaacttccactacccccccgacggctacagcagacactacgaggacggctaccccggcggcagcgacaactacggcagcctgagcagagtgaccagaatcgaggagagatacagacccagcatggagggctacagagcccccagcagacaggacgtgtacggcccccagccccaggtgagagtgggcggcagcagcgtggacctgcacagattccaccccgagccctacggcctggaggacgaccagagaagcatgggctacgacgacctggactacggcatgatgagcgactacggcaccgccagaagaaccggcacccccagcgaccccagaagaagactgagaagctacgaggacatgatcggcgaggaggtgcccagcgaccagtactactgggcccccctggcccagcacgagagaggcagcctggccagcctggacagcctgagaaagggcggcccccccccccccaactggagacagcccgagctgcccgaggtgatcgccatgctgggcttcagactggacgccgtgaagagcaacgccgccgcctacctgcagcacctgtgctacagaaacgacaaggtgaagaccgacgtgagaaagctgaagggcatccccgtgctggtgggcctgctggaccaccccaagaaggaggtgcacctgggcgcctgcggcgccctgaagaacatcagcttcggcagagaccaggacaacaagatcgccatcaagaactgcgacggcgtgcccgccctggtgagactgctgagaaaggccagagacatggacctgaccgaggtgatcaccggcaccctgtggaacctgagcagccacgacagcatcaagatggagatcgtggaccacgccctgcacgccctgaccgacgaggtgatcatcccccacagcggctgggagagagagcccaacgaggactgcaagcccagacacatcgagtgggagagcgtgctgaccaacaccgccggctgcctgagaaacgtgagcagcgagagaagcgaggccagaagaaagctgagagagtgcgacggcctggtggacgccctgatcttcatcgtgcaggccgagatcggccagaaggacagcgacagcaagctggtggagaactgcgtgtgcctgctgagaaacctgagctaccaggtgcacagagagatcccccaggccgagagataccaggaggccgcccccaacgtggccaacaacaccggcccccacgccgccagctgcttcggcgccaagaagggcaaggacgagtggttcagcagaggcaagaagcccatcgaggaccccgccaacgacaccgtggacttccccaagagaaccagccccgccagaggctacgagctgctgttccagcccgaggtggtgagaatctacatcagcctgctgaaggagagcaagacccccgccatcctggaggccagcgccggcgccatccagaacctgtgcgccggcagatggacctacggcagatacatcagaagcgccctgagacaggagaaggccctgagcgccatcgccgacctgctgaccaacgagcacgagagagtggtgaaggccgccagcggcgccctgagaaacctggccgtggacgccagaaacaaggagctgatcggcaagcacgccatccccaacctggtgaagaacctgcccggcggccagcagaacagcagctggaacttcagcgaggacaccgtgatcagcatcctgaacaccatcaacgaggtgatcgccgagaacctggaggccgccaagaagctgagagagacccagggcatcgagaagctggtgctgatcaacaagagcggcaacagaagcgagaaggaggtgagagccgccgccctggtgctgcagaccatctggggctacaaggagctgagaaagcccctggagaaggagggctggaagaagagcgacttccaggtgaacctgaacaacgccagcagaagccagagcagccacagctacgacgacagcaccctgcccctgatcgacagaaaccagaagagcgacaagaagcccgacagagaggagatccagatgagcaacatgggcagcaacaccaagagcctggacaacaactacagcacccccaacgagagaggcgaccacaacagaaccctggacagaagcggcgacctgggcgacatggagcccctgaagggcaccacccccctgatgcaggacgagggccaggagagcctggaggaggagctggacgtgctggtgctggacgacgagggcggccaggtgagctaccccagcatgcagaagatctag

SEQ ID NO: 75676 - DNA, 2604 bp, synthetic construct
  misc_feature 1..2604: note = Description of Artificial Sequence: Synthetic coding sequence
  source 1..2604: mol_type = other DNA
atgcaggagcccggccagatcgtggagacctacaccgaggaggaccccgagggcgccatgagcgtggtgagcgtggagaccagcgacgacggcaccaccagaagaaccgagaccaccgtgaagaaggtggtgaagaccgtgaccaccagaaccgtgcagcccgtggccatgggccccgacggcctgcccgtggacgccagcagcgtgagcaacaactacatccagaccctgggcagagacttcagaaagaacggcaacggcggccccggcccctacgtgggccaggccggcaccgccaccctgcccagaaacttccactacccccccgacggctacagcagacactacgaggacggctaccccggcggcagcgacaactacggcagcctgagcagagtgaccagaatcgaggagagatacagacccagcatggagggctacagagcccccagcagacaggacgtgtacggcccccagccccaggtgagagtgggcggcagcagcgtggacctgcacagattccaccccgagccctacggcctggaggacgaccagagaagcatgggctacgacgacctggactacggcatgatgagcgactacggcaccgccagaagaaccggcacccccagcgaccccagaagaagactgagaagctacgaggacatgatcggcgaggaggtgcccagcgaccagtactactgggcccccctggcccagcacgagagaggcagcctggccagcctggacagcctgagaaagggcggcccccccccccccaactggagacagcccgagctgcccgaggtgatcgccatgctgggcttcagactggacgccgtgaagagcaacgccgccgcctacctgcagcacctgtgctacagaaacgacaaggtgaagaccgacgtgagaaagctgaagggcatccccgtgctggtgggcctgctggaccaccccaagaaggaggtgcacctgggcgcctgcggcgccctgaagaacatcagcttcggcagagaccaggacaacaagatcgccatcaagaactgcgacggcgtgcccgccctggtgagactgctgagaaaggccagagacatggacctgaccgaggtgatcaccggcaccctgtggaacctgagcagccacgacagcatcaagatggagatcgtggaccacgccctgcacgccctgaccgacgaggtgatcatcccccacagcggctgggagagagagcccaacgaggactgcaagcccagacacatcgagtgggagagcgtgctgaccaacaccgccggctgcctgagaaacgtgagcagcgagagaagcgaggccagaagaaagctgagagagtgcgacggcctggtggacgccctgatcttcatcgtgcaggccgagatcggccagaaggacagcgacagcaagctggtggagaactgcgtgtgcctgctgagaaacctgagctaccaggtgcacagagagatcccccaggccgagagataccaggaggccgcccccaacgtggccaacaacaccggcccccacgccgccagctgcttcggcgccaagaagggcaaggacgagtggttcagcagaggcaagaagcccatcgaggaccccgccaacgacaccgtggacttccccaagagaaccagccccgccagaggctacgagctgctgttccagcccgaggtggtgagaatctacatcagcctgctgaaggagagcaagacccccgccatcctggaggccagcgccggcgccatccagaacctgtgcgccggcagatggacctacggcagatacatcagaagcgccctgagacaggagaaggccctgagcgccatcgccgacctgctgaccaacgagcacgagagagtggtgaaggccgccagcggcgccctgagaaacctggccgtggacgccagaaacaaggagctgatcggcaagcacgccatccccaacctggtgaagaacctgcccggcggccagcagaacagcagctggaacttcagcgaggacaccgtgatcagcatcctgaacaccatcaacgaggtgatcgccgagaacctggaggccgccaagaagctgagagagacccagggcatcgagaagctggtgctgatcaacaagagcggcaacagaagcgagaaggaggtgagagccgccgccctggtgctgcagaccatctggggctacaaggagctgagaaagcccctggagaaggagggctggaagaagagcgacttccaggtgaacctgaacaacgccagcagaagccagagcagccacagctacgacgacagcaccctgcccctgatcgacagaaaccagaagagcgacaagaagcccgacagagaggagatccagatgagcaacatgggcagcaacaccaagagcctggacaacaactacagcacccccaacgagagaggcgaccacaacagaaccctggacagaagcggcgacctgggcgacatggagcccctgaagggcaccacccccctgatgcaggacgagggccaggagagcctggaggaggagctggacgtgctggtgctggacgacgagggcggccaggtgagctaccccagcatgcagaagatctag

SEQ ID NO: 75677 - DNA, 2499 bp, synthetic construct
  misc_feature 1..2499: note = Description of Artificial Sequence: Synthetic coding sequence
  source 1..2499: mol_type = other DNA
atgcaggagcccggccagatcgtggagacctacaccgaggaggaccccgagggcgccatgagcgtggtgagcgtggagaccagcgacgacggcaccaccagaagaaccgagaccaccgtgaagaaggtggtgaagaccgtgaccaccagaaccgtgcagcccgtggccatgggccccgacggcctgcccgtggacgccagcagcgtgagcaacaactacatccagaccctgggcagagacttcagaaagaacggcaacggcggccccggcccctacgtgggccaggccggcaccgccaccctgcccagaaacttccactacccccccgacggctacagcagacactacgaggacggctaccccggcggcagcgacaactacggcagcctgagcagagtgaccagaatcgaggagagatacagacccagcatggagggctacagagcccccagcagacaggacgtgtacggcccccagccccaggtgagagtgggcggcagcagcgtggacctgcacagattccaccccgagccctacggcctggaggacgaccagagaagcatgggctacgacgacctggactacggcatgatgagcgactacggcaccgccagaagaaccggcacccccagcgaccccagaagaagactgagaagctacgaggacatgatcggcgaggaggtgcccagcgaccagtactactgggcccccctggcccagcacgagagaggcagcctggccagcctggacagcctgagaaagggcggcccccccccccccaactggagacagcccgagctgcccgaggtgatcgccatgctgggcttcagactggacgccgtgaagagcaacgccgccgcctacctgcagcacctgtgctacagaaacgacaaggtgaagaccgacgtgagaaagctgaagggcatccccgtgctggtgggcctgctggaccaccccaagaaggaggtgcacctgggcgcctgcggcgccctgaagaacatcagcttcggcagagaccaggacaacaagatcgccatcaagaactgcgacggcgtgcccgccctggtgagactgctgagaaaggccagagacatggacctgaccgaggtgatcaccggcaccctgtggaacctgagcagccacgacagcatcaagatggagatcgtggaccacgccctgcacgccctgaccgacgaggtgatcatcccccacagcggctgggagagagagcccaacgaggactgcaagcccagacacatcgagtgggagagcgtgctgaccaacaccgccggctgcctgagaaacgtgagcagcgagagaagcgaggccagaagaaagctgagagagtgcgacggcctggtggacgccctgatcttcatcgtgcaggccgagatcggccagaaggacagcgacagcaagctggtggagaactgcgtgtgcctgctgagaaacctgagctaccaggtgcacagagagatcccccaggccgagagataccaggaggccgcccccaacgtggccaacaacaccggcccccacgccgccagctgcttcggcgccaagaagggcaagggcaagaagcccatcgaggaccccgccaacgacaccgtggacttccccaagagaaccagccccgccagaggctacgagctgctgttccagcccgaggtggtgagaatctacatcagcctgctgaaggagagcaagacccccgccatcctggaggccagcgccggcgccatccagaacctgtgcgccggcagatggacctacggcagatacatcagaagcgccctgagacaggagaaggccctgagcgccatcgccgacctgctgaccaacgagcacgagagagtggtgaaggccgccagcggcgccctgagaaacctggccgtggacgccagaaacaaggagctgatcggcaagcacgccatccccaacctggtgaagaacctgcccggcggccagcagaacagcagctggaacttcagcgaggacaccgtgatcagcatcctgaacaccatcaacgaggtgatcgccgagaacctggaggccgccaagaagctgagagagacccagggcatcgagaagctggtgctgatcaacaagagcggcaacagaagcgagaaggaggtgagagccgccgccctggtgctgcagaccatctggggctacaaggagctgagaaagcccctggagaaggagggctggaagaagagcgacttccaggtgaacctgaacaacgccagcagaagccagagcagccacagctacgacgacagcaccctgcccctgatcgacagaaaccagaagagcgacaagaagcccgacagagaggagatccagatgagcaacatgggcagcaacaccaagagcctggacaacaactacagcacccccaacgagagaggcgaccacaacagaaccctggacagaagcggcgacctgggcgacatggagcccctgaagggcaccacccccctgatgcagaagatctag

SEQ ID NO: 75678 - DNA, 2802 bp, synthetic construct; identical to SEQ ID NO: 75669
  misc_feature 1..2802: note = Description of Artificial Sequence: Synthetic coding sequence
  source 1..2802: mol_type = other DNA

SEQ ID NO: 75679 - DNA, 15 bp, synthetic construct
  misc_feature 1..15: note = Description of Artificial Sequence: Synthetic coding sequence
  source 1..15: mol_type = other DNA
atggacgacagctag

SEQ ID NO: 75680 - DNA, 2802 bp, synthetic construct; identical to SEQ ID NO: 75669
  misc_feature 1..2802: note = Description of Artificial Sequence: Synthetic coding sequence
  source 1..2802: mol_type = other DNA

SEQ ID NO: 75681 - DNA, 1851 bp, synthetic construct
  misc_feature 1..1851: note = Description of Artificial Sequence: Synthetic coding sequence
  source 1..1851: mol_type = other DNA
atgatcggcgaggaggtgcccagcgaccagtactactgggcccccctggcccagcacgagagaggcagcctggccagcctggacagcctgagaaagggcggcccccccccccccaactggagacagcccgagctgcccgaggtgatcgccatgctgggcttcagactggacgccgtgaagagcaacgccgccgcctacctgcagcacctgtgctacagaaacgacaaggtgaagaccgacgtgagaaagctgaagggcatccccgtgctggtgggcctgctggaccaccccaagaaggaggtgcacctgggcgcctgcggcgccctgaagaacatcagcttcggcagagaccaggacaacaagatcgccatcaagaactgcgacggcgtgcccgccctggtgagactgctgagaaaggccagagacatggacctgaccgaggtgatcaccggcaccctgtggaacctgagcagccacgacagcatcaagatggagatcgtggaccacgccctgcacgccctgaccgacgaggtgatcatcccccacagcggctgggagagagagcccaacgaggactgcaagcccagacacatcgagtgggagagcgtgctgaccaacaccgccggctgcctgagaaacgtgagcagcgagagaagcgaggccagaagaaagctgagagagtgcgacggcctggtggacgccctgatcttcatcgtgcaggccgagatcggccagaaggacagcgacagcaagctggtggagaactgcgtgtgcctgctgagaaacctgagctaccaggtgcacagagagatcccccaggccgagagataccaggaggccgcccccaacgtggccaacaacaccggcccccacgccgccagctgcttcggcgccaagaagggcaaggacgagtggttcagcagaggcaagaagcccatcgaggaccccgccaacgacaccgtggacttccccaagagaaccagccccgccagaggctacgagctgctgttccagcccgaggtggtgagaatctacatcagcctgctgaaggagagcaagacccccgccatcctggaggccagcgccggcgccatccagaacctgtgcgccggcagatggacctacggcagatacatcagaagcgccctgagacaggagaaggccctgagcgccatcgccgacctgctgaccaacgagcacgagagagtggtgaaggccgccagcggcgccctgagaaacctggccgtggacgccagaaacaaggagctgatcggcaagcacgccatccccaacctggtgaagaacctgcccggcggccagcagaacagcagctggaacttcagcgaggacaccgtgatcagcatcctgaacaccatcaacgaggtgatcgccgagaacctggaggccgccaagaagctgagagagacccagggcatcgagaagctggtgctgatcaacaagagcggcaacagaagcgagaaggaggtgagagccgccgccctggtgctgcagaccatctggggctacaaggagctgagaaagcccctggagaaggagggctggaagaagagcgacttccaggtgaacctgaacaacgccagcagaagccagagcagccacagctacgacgacagcaccctgcccctgatcgacagaaaccagaagagcgacaagaagcccgacagagaggagatccagatgagcaacatgggcagcaacaccaagagcctggacaacaactacagcacccccaacgagagaggcgaccacaacagaaccctggacagaagcggcgacctgggcgacatggagcccctgaagggcaccacccccctgatgcagaagatctag

SEQ ID NO: 75682 - DNA, 2727 bp, synthetic construct
  misc_feature 1..2727: note = Description of Artificial Sequence: Synthetic coding sequence
  source 1..2727: mol_type = other DNA
atggccaacggcaccctgaccagaagacaccagaacggcagattcgtgggcgacgccgacctggagagacagaagttcagcgacctgaagctgaacggcccccaggaccacagccacctgctgtacagcaccatccccagaatgcaggagcccggccagatcgtggagacctacaccgaggaggaccccgagggcgccatgagcgtggtgagcgtggagaccagcgacgacggcaccaccagaagaaccgagaccaccgtgaagaaggtggtgaagaccgtgaccaccagaaccgtgcagcccgtggccatgggccccgacggcctgcccgtggacgccagcagcgtgagcaacaactacatccagaccctgggcagagacttcagaaagaacggcaacggcggccccggcccctacgtgggccaggccggcaccgccaccctgcccagaaacttccactacccccccgacggctacagcagacactacgaggacggctaccccggcggcagcgacaactacggcagcctgagcagagtgaccagaatcgaggagagatacagacccagcatggagggctacagagcccccagcagacaggacgtgtacggcccccagccccaggtgagagtgggcggcagcagcgtggacctgcacagattccaccccgagccctacggcctggaggacgaccagagaagcatgggctacgacgacctggactacggcatgatgagcgactacggcaccgccagaagaaccggcacccccagcgaccccagaagaagactgagaagctacgaggacatgatcggcgaggaggtgcccagcgaccagtactactgggcccccctggcccagcacgagagaggcagcctggccagcctggacagcctgagaaagggcggcccccccccccccaactggagacagcccgagctgcccgaggtgatcgccatgctgggcttcagactggacgccgtgaagagcaacgccgccgcctacctgcagcacctgtgctacagaaacgacaaggtgaagaccgacgtgagaaagctgaagggcatccccgtgctggtgggcctgctggaccaccccaagaaggaggtgcacctgggcgcctgcggcgccctgaagaacatcagcttcggcagagaccaggacaacaagatcgccatcaagaactgcgacggcgtgcccgccctggtgagactgctgagaaaggccagagacatggacctgaccgaggtgatcaccggcaccctgtggaacctgagcagccacgacagcatcaagatggagatcgtggaccacgccctgcacgccctgaccgacgaggtgatcatcccccacagcggctgggagagagagcccaacgaggactgcaagcccagacacatcgagtgggagagcgtgctgaccaacaccgccggctgcctgagaaacgtgagcagcgagagaagcgaggccagaagaaagctgagagagtgcgacggcctggtggacgccctgatcttcatcgtgcaggccgagatcggccagaaggacagcgacagcaagctggtggagaactgcgtgtgcctgctgagaaacctgagctaccaggtgcacagagagatcccccaggccgagagataccaggaggccgcccccaacgtggccaacaacaccggcccccacgccgccagctgcttcggcgccaagaagggcaagggcaagaagcccatcgaggaccccgccaacgacaccgtggacttccccaagagaaccagccccgccagaggctacgagctgctgttccagcccgaggtggtgagaatctacatcagcctgctgaaggagagcaagacccccgccatcctggaggccagcgccggcgccatccagaacctgtgcgccggcagatggacctacggcagatacatcagaagcgccctgagacaggagaaggccctgagcgccatcgccgacctgctgaccaacgagcacgagagagtggtgaaggccgccagcggcgccctgagaaacctggccgtggacgccagaaacaaggagctgatcggcaagcacgccatccccaacctggtgaagaacctgcccggcggccagcagaacagcagctggaacttcagcgaggacaccgtgatcagcatcctgaacaccatcaacgaggtgatcgccgagaacctggaggccgccaagaagctgagagagacccagggcatcgagaagctggtgctgatcaacaagagcggcaacagaagcgagaaggaggtgagagccgccgccctggtgctgcagaccatctggggctacaaggagctgagaaagcccctggagaaggagggctggaagaagagcgacttccaggtgaacctgaacaacgccagcagaagccagagcagccacagctacgacgacagcaccctgcccctgatcgacagaaaccagaagagcgacaagaagcccgacagagaggagatccagatgagcaacatgggcagcaacaccaagagcctggacaacaactacagcacccccaacgagagaggcgaccacaacagaaccctggacagaagcggcgacctgggcgacatggagcccctgaagggcaccacccccctgatgcaggacgagggccaggagagcctggaggaggagctggacgtgctggtgctggacgacgagggcggccaggtgagctaccccagcatgcagaagatctag

SEQ ID NO: 75683 - DNA, 1833 bp, synthetic construct
  misc_feature 1..1833: note = Description of Artificial Sequence: Synthetic coding sequence
  source 1..1833: mol_type = other DNA
atgatcggcgaggaggtgcccagcgaccagtactactgggcccccctggcccagcacgagagaggcagcctggccagcctggacagcctgagaaagggcggcccccccccccccaactggagacagcccgagctgcccgaggtgatcgccatgctgggcttcagactggacgccgtgaagagcaacgccgccgcctacctgcagcacctgtgctacagaaacgacaaggtgaagaccgacgtgagaaagctgaagggcatccccgtgctggtgggcctgctggaccaccccaagaaggaggtgcacctgggcgcctgcggcgccctgaagaacatcagcttcggcagagaccaggacaacaagatcgccatcaagaactgcgacggcgtgcccgccctggtgagactgctgagaaaggccagagacatggacctgaccgaggtgatcaccggcaccctgtggaacctgagcagccacgacagcatcaagatggagatcgtggaccacgccctgcacgccctgaccgacgaggtgatcatcccccacagcggctgggagagagagcccaacgaggactgcaagcccagacacatcgagtgggagagcgtgctgaccaacaccgccggctgcctgagaaacgtgagcagcgagagaagcgaggccagaagaaagctgagagagtgcgacggcctggtggacgccctgatcttcatcgtgcaggccgagatcggccagaaggacagcgacagcaagctggtggagaactgcgtgtgcctgctgagaaacctgagctaccaggtgcacagagagatcccccaggccgagagataccaggaggccgcccccaacgtggccaacaacaccggcccccacgccgccagctgcttcggcgccaagaagggcaagggcaagaagcccatcgaggaccccgccaacgacaccgtggacttccccaagagaaccagccccgccagaggctacgagctgctgttccagcccgaggtggtgagaatctacatcagcctgctgaaggagagcaagacccccgccatcctggaggccagcgccggcgccatccagaacctgtgcgccggcagatggacctacggcagatacatcagaagcgccctgagacaggagaaggccctgagcgccatcgccgacctgctgaccaacgagcacgagagagtggtgaaggccgccagcggcgccctgagaaacctggccgtggacgccagaaacaaggagctgatcggcaagcacgccatccccaacctggtgaagaacctgcccggcggccagcagaacagcagctggaacttcagcgaggacaccgtgatcagcatcctgaacaccatcaacgaggtgatcgccgagaacctggaggccgccaagaagctgagagagacccagggcatcgagaagctggtgctgatcaacaagagcggcaacagaagcgagaaggaggtgagagccgccgccctggtgctgcagaccatctggggctacaaggagctgagaaagcccctggagaaggagggctggaagaagagcgacttccaggtgaacctgaacaacgccagcagaagccagagcagccacagctacgacgacagcaccctgcccctgatcgacagaaaccagaagagcgacaagaagcccgacagagaggagatccagatgagcaacatgggcagcaacaccaagagcctggacaacaactacagcacccccaacgagagaggcgaccacaacagaaccctggacagaagcggcgacctgggcgacatggagcccctgaagggcaccacccccctgatgcagaagatctag

SEQ ID NO: 75684 - DNA, 1938 bp, synthetic construct
  misc_feature 1..1938: note = Description of Artificial Sequence: Synthetic coding sequence
  source 1..1938: mol_type = other DNA
atgatcggcgaggaggtgcccagcgaccagtactactgggcccccctggcccagcacgagagaggcagcctggccagcctggacagcctgagaaagggcggcccccccccccccaactggagacagcccgagctgcccgaggtgatcgccatgctgggcttcagactggacgccgtgaagagcaacgccgccgcctacctgcagcacctgtgctacagaaacgacaaggtgaagaccgacgtgagaaagctgaagggcatccccgtgctggtgggcctgctggaccaccccaagaaggaggtgcacctgggcgcctgcggcgccctgaagaacatcagcttcggcagagaccaggacaacaagatcgccatcaagaactgcgacggcgtgcccgccctggtgagactgctgagaaaggccagagacatggacctgaccgaggtgatcaccggcaccctgtggaacctgagcagccacgacagcatcaagatggagatcgtggaccacgccctgcacgccctgaccgacgaggtgatcatcccccacagcggctgggagagagagcccaacgaggactgcaagcccagacacatcgagtgggagagcgtgctgaccaacaccgccggctgcctgagaaacgtgagcagcgagagaagcgaggccagaagaaagctgagagagtgcgacggcctggtggacgccctgatcttcatcgtgcaggccgagatcggccagaaggacagcgacagcaagctggtggagaactgcgtgtgcctgctgagaaacctgagctaccaggtgcacagagagatcccccaggccgagagataccaggaggccgcccccaacgtggccaacaacaccggcccccacgccgccagctgcttcggcgccaagaagggcaaggacgagtggttcagcagaggcaagaagcccatcgaggaccccgccaacgacaccgtggacttccccaagagaaccagccccgccagaggctacgagctgctgttccagcccgaggtggtgagaatctacatcagcctgctgaaggagagcaagacccccgccatcctggaggccagcgccggcgccatccagaacctgtgcgccggcagatggacctacggcagatacatcagaagcgccctgagacaggagaaggccctgagcgccatcgccgacctgctgaccaacgagcacgagagagtggtgaaggccgccagcggcgccctgagaaacctggccgtggacgccagaaacaaggagctgatcggcaagcacgccatccccaacctggtgaagaacctgcccggcggccagcagaacagcagctggaacttcagcgaggacaccgtgatcagcatcctgaacaccatcaacgaggtgatcgccgagaacctggaggccgccaagaagctgagagagacccagggcatcgagaagctggtgctgatcaacaagagcggcaacagaagcgagaaggaggtgagagccgccgccctggtgctgcagaccatctggggctacaaggagctgagaaagcccctggagaaggagggctggaagaagagcgacttccaggtgaacctgaacaacgccagcagaagccagagcagccacagctacgacgacagcaccctgcccctgatcgacagaaaccagaagagcgacaagaagcccgacagagaggagatccagatgagcaacatgggcagcaacaccaagagcctggacaacaactacagcacccccaacgagagaggcgaccacaacagaaccctggacagaagcggcgacctgggcgacatggagcccctgaagggcaccacccccctgatgcaggacgagggccaggagagcctggaggaggagctggacgtgctggtgctggacgacgagggcggccaggtgagctaccccagcatgcagaagatctag

SEQ ID NO: 75685 - DNA, 2517 bp, synthetic construct
  misc_feature 1..2517: note = Description of Artificial Sequence: Synthetic coding sequence
  source 1..2517: mol_type = other DNA
atgcaggagcccggccagatcgtggagacctacaccgaggaggaccccgagggcgccatgagcgtggtgagcgtggagaccagcgacgacggcaccaccagaagaaccgagaccaccgtgaagaaggtggtgaagaccgtgaccaccagaaccgtgcagcccgtggccatgggccccgacggcctgcccgtggacgccagcagcgtgagcaacaactacatccagaccctgggcagagacttcagaaagaacggcaacggcggccccggcccctacgtgggccaggccggcaccgccaccctgcccagaaacttccactacccccccgacggctacagcagacactacgaggacggctaccccggcggcagcgacaactacggcagcctgagcagagtgaccagaatcgaggagagatacagacccagcatggagggctacagagcccccagcagacaggacgtgtacggcccccagccccaggtgagagtgggcggcagcagcgtggacctgcacagattccaccccgagccctacggcctggaggacgaccagagaagcatgggctacgacgacctggactacggcatgatgagcgactacggcaccgccagaagaaccggcacccccagcgaccccagaagaagactgagaagctacgaggacatgatcggcgaggaggtgcccagcgaccagtactactgggcccccctggcccagcacgagagaggcagcctggccagcctggacagcctgagaaagggcggcccccccccccccaactggagacagcccgagctgcccgaggtgatcgccatgctgggcttcagactggacgccgtgaagagcaacgccgccgcctacctgcagcacctgtgctacagaaacgacaaggtgaagaccgacgtgagaaagctgaagggcatccccgtgctggtgggcctgctggaccaccccaagaaggaggtgcacctgggcgcctgcggcgccctgaagaacatcagcttcggcagagaccaggacaacaagatcgccatcaagaactgcgacggcgtgcccgccctggtgagactgctgagaaaggccagagacatggacctgaccgaggtgatcaccggcaccctgtggaacctgagcagccacgacagcatcaagatggagatcgtggaccacgccctgcacgccctgaccgacgaggtgatcatcccccacagcggctgggagagagagcccaacgaggactgcaagcccagacacatcgagtgggagagcgtgctgaccaacaccgccggctgcctgagaaacgtgagcagcgagagaagcgaggccagaagaaagctgagagagtgcgacggcctggtggacgccctgatcttcatcgtgcaggccgagatcggccagaaggacagcgacagcaagctggtggagaactgcgtgtgcctgctgagaaacctgagctaccaggtgcacagagagatcccccaggccgagagataccaggaggccgcccccaacgtggccaacaacaccggcccccacgccgccagctgcttcggcgccaagaagggcaaggacgagtggttcagcagaggcaagaagcccatcgaggaccccgccaacgacaccgtggacttccccaagagaaccagccccgccagaggctacgagctgctgttccagcccgaggtggtgagaatctacatcagcctgctgaaggagagcaagacccccgccatcctggaggccagcgccggcgccatccagaacctgtgcgccggcagatggacctacggcagatacatcagaagcgccctgagacaggagaaggccctgagcgccatcgccgacctgctgaccaacgagcacgagagagtggtgaaggccgccagcggcgccctgagaaacctggccgtggacgccagaaacaaggagctgatcggcaagcacgccatccccaacctggtgaagaacctgcccggcggccagcagaacagcagctggaacttcagcgaggacaccgtgatcagcatcctgaacaccatcaacgaggtgatcgccgagaacctggaggccgccaagaagctgagagagacccagggcatcgagaagctggtgctgatcaacaagagcggcaacagaagcgagaaggaggtgagagccgccgccctggtgctgcagaccatctggggctacaaggagctgagaaagcccctggagaaggagggctggaagaagagcgacttccaggtgaacctgaacaacgccagcagaagccagagcagccacagctacgacgacagcaccctgcccctgatcgacagaaaccagaagagcgacaagaagcccgacagagaggagatccagatgagcaacatgggcagcaacaccaagagcctggacaacaactacagcacccccaacgagagaggcgaccacaacagaaccctggacagaagcggcgacctgggcgacatggagcccctgaagggcaccacccccctgatgcagaagatctag

SEQ ID NO: 75686 - DNA, 2640 bp, synthetic construct
  misc_feature 1..2640: note = Description of Artificial Sequence: Synthetic coding sequence
  source 1..2640: mol_type = other DNA
atggccaacggcaccctgaccagaagacaccagaacggcagattcgtgggcgacgccgacctggagagacagaagttcagcgacctgaagctgaacggcccccaggaccacagccacctgctgtacagcaccatccccagaatgcaggagcccggccagatcgtggagacctacaccgaggaggaccccgagggcgccatgagcgtggtgagcgtggagaccagcgacgacggcaccaccagaagaaccgagaccaccgtgaagaaggtggtgaagaccgtgaccaccagaaccgtgcagcccgtggccatgggccccgacggcctgcccgtggacgccagcagcgtgagcaacaactacatccagaccctgggcagagacttcagaaagaacggcaacggcggccccggcccctacgtgggccaggccggcaccgccaccctgcccagaaacttccactacccccccgacggctacagcagacactacgaggacggctaccccggcggcagcgacaactacggcagcctgagcagagtgaccagaatcgaggagagatacagacccagcatggagggctacagagcccccagcagacaggacgtgtacggcccccagccccaggtgagagtgggcggcagcagcgtggacctgcacagattccaccccgagccctacggcctggaggacgaccagagaagcatgggctacgacgacctggactacggcatgatgagcgactacggcaccgccagaagaaccggcacccccagcgaccccagaagaagactgagaagctacgaggacatgatcggcgaggaggtgcccagcgaccagtactactgggcccccctggcccagcacgagagaggcagcctggccagcctggacagcctgagaaagggcggcccccccccccccaactggagacagcccgagctgcccgaggtgatcgccatgctgggcttcagactggacgccgtgaagagcaacgccgccgcctacctgcagcacctgtgctacagaaacgacaaggtgaagaccgacgtgagaaagctgaagggcatccccgtgctggtgggcctgctggaccaccccaagaaggaggtgcacctgggcgcctgcggcgccctgaagaacatcagcttcggcagagaccaggacaacaagatcgccatcaagaactgcgacggcgtgcccgccctggtgagactgctgagaaaggccagagacatggacctgaccgaggtgatcaccggcaccctgtggaacctgagcagccacgacagcatcaagatggagatcgtggaccacgccctgcacgccctgaccgacgaggtgatcatcccccacagcggctgggagagagagcccaacgaggactgcaagcccagacacatcgagtgggagagcgtgctgaccaacaccgccggctgcctgagaaacgtgagcagcgagagaagcgaggccagaagaaagctgagagagtgcgacggcctggtggacgccctgatcttcatcgtgcaggccgagatcggccagaaggacagcgacagcaagctggtggagaactgcgtgtgcctgctgagaaacctgagctaccaggtgcacagagagatcccccaggccgagagataccaggaggccgcccccaacgtggccaacaacaccggcccccacgccgccagctgcttcggcgccaagaagggcaagggcaagaagcccatcgaggaccccgccaacgacaccgtggacttccccaagagaaccagccccgccagaggctacgagctgctgttccagcccgaggtggtgagaatctacatcagcctgctgaaggagagcaagacccccgccatcctggaggccagcgccggcgccatccagaacctgtgcgccggcagatggacctacggcagatacatcagaagcgccctgagacaggagaaggccctgagcgccatcgccgacctgctgaccaacgagcacgagagagtggtgaaggccgccagcggcgccctgagaaacctggccgtggacgccagaaacaaggagctgatcggcaagcacgccatccccaacctggtgaagaacctgcccggcggccagcagaacagcagctggaacttcagcgaggacaccgtgatcagcatcctgaacaccatcaacgaggtgatcgccgagaacctggaggccgccaagaagctgagagagacccagggcatcgagaagctggtgctgatcaacaagagcggcaacagaagcgagaaggaggtgagagccgccgccctggtgctgcagaccatctggggctacaaggagctgagaaagcccctggagaaggagggctggaagaagagcgacttccaggtgaacctgaacaacgccagcagaagccagagcagccacagctacgacgacagcaccctgcccctgatcgacagaaaccagaagagcgacaagaagcccgacagagaggagatccagatgagcaacatgggcagcaacaccaagagcctggacaacaactacagcacccccaacgagagaggcgaccacaacagaaccctggacagaagcggcgacctgggcgacatggagcccctgaagggcaccacccccctgatgcagaagatctag

SEQ ID NO: 75687 - DNA, 2640 bp, synthetic construct; identical to SEQ ID NO: 75686
  misc_feature 1..2640: note = Description of Artificial Sequence: Synthetic coding sequence
  source 1..2640: mol_type = other DNA

SEQ ID NO: 75688 - DNA, 2499 bp, synthetic construct; identical to SEQ ID NO: 75677
  misc_feature 1..2499: note = Description of Artificial Sequence: Synthetic coding sequence
  source 1..2499: mol_type = other DNA

SEQ ID NO: 75689 - DNA, 390 bp, synthetic construct
  misc_feature 1..390: note = Description of Artificial Sequence: Synthetic coding sequence
  source 1..390: mol_type = other DNA
atggccaacggcaccctgaccagaagacaccagaacggcagattcgtgggcgacgccgacctggagagacagaagttcagcgacctgaagctgaacggcccccaggaccacagccacctgctgtacagcaccatccccagaatgcaggagcccggccagatcgtggagacctacaccgaggaggaccccgagggcgccatgagcgtggtgagcgtggagaccagcgacgacggcaccaccagaagaaccgagaccaccgtgaagaaggtggtgaagaccgtgaccaccagaaccgtgcagcccgtggccatgggccccgacggcctgcccgtggacgccagcagcgtgagcaacaactacatccagaccctgggcagagacttcagatag

SEQ ID NO: 75690 - DNA, 2586 bp, synthetic construct
  misc_feature 1..2586: note = Description of Artificial Sequence: Synthetic coding sequence
  source 1..2586: mol_type = other DNA
atgcaggagcccggccagatcgtggagacctacaccgaggaggaccccgagggcgccatgagcgtggtgagcgtggagaccagcgacgacggcaccaccagaagaaccgagaccaccgtgaagaaggtggtgaagaccgtgaccaccagaaccgtgcagcccgtggccatgggccccgacggcctgcccgtggacgccagcagcgtgagcaacaactacatccagaccctgggcagagacttcagaaagaacggcaacggcggccccggcccctacgtgggccaggccggcaccgccaccctgcccagaaacttccactacccccccgacggctacagcagacactacgaggacggctaccccggcggcagcgacaactacggcagcctgagcagagtgaccagaatcgaggagagatacagacccagcatggagggctacagagcccccagcagacaggacgtgtacggcccccagccccaggtgagagtgggcggcagcagcgtggacctgcacagattccaccccgagccctacggcctggaggacgaccagagaagcatgggctacgacgacctggactacggcatgatgagcgactacggcaccgccagaagaaccggcacccccagcgaccccagaagaagactgagaagctacgaggacatgatcggcgaggaggtgcccagcgaccagtactactgggcccccctggcccagcacgagagaggcagcctggccagcctggacagcctgagaaagggcggcccccccccccccaactggagacagcccgagctgcccgaggtgatcgccatgctgggcttcagactggacgccgtgaagagcaacgccgccgcctacctgcagcacctgtgctacagaaacgacaaggtgaagaccgacgtgagaaagctgaagggcatccccgtgctggtgggcctgctggaccaccccaagaaggaggtgcacctgggcgcctgcggcgccctgaagaacatcagcttcggcagagaccaggacaacaagatcgccatcaagaactgcgacggcgtgcccgccctggtgagactgctgagaaaggccagagacatggacctgaccgaggtgatcaccggcaccctgtggaacctgagcagccacgacagcatcaagatggagatcgtggaccacgccctgcacgccctgaccgacgaggtgatcatcccccacagcggctgggagagagagcccaacgaggactgcaagcccagacacatcgagtgggagagcgtgctgaccaacaccgccggctgcctgagaaacgtgagcagcgagagaagcgaggccagaagaaagctgagagagtgcgacggcctggtggacgccctgatcttcatcgtgcaggccgagatcggccagaaggacagcgacagcaagctggtggagaactgcgtgtgcctgctgagaaacctgagctaccaggtgcacagagagatcccccaggccgagagataccaggaggccgcccccaacgtggccaacaacaccggcccccacgccgccagctgcttcggcgccaagaagggcaagggcaagaagcccatcgaggaccccgccaacgacaccgtggacttccccaagagaaccagccccgccagaggctacgagctgctgttccagcccgaggtggtgagaatctacatcagcctgctgaaggagagcaagacccccgccatcctggaggccagcgccggcgccatccagaacctgtgcgccggcagatggacctacggcagatacatcagaagcgccctgagacaggagaaggccctgagcgccatcgccgacctgctgaccaacgagcacgagagagtggtgaaggccgccagcggcgccctgagaaacctggccgtggacgccagaaacaaggagctgatcggcaagcacgccatccccaacctggtgaagaacctgcccggcggccagcagaacagcagctggaacttcagcgaggacaccgtgatcagcatcctgaacaccatcaacgaggtgatcgccgagaacctggaggccgccaagaagctgagagagacccagggcatcgagaagctggtgctgatcaacaagagcggcaacagaagcgagaaggaggtgagagccgccgccctggtgctgcagaccatctggggctacaaggagctgagaaagcccctggagaaggagggctggaagaagagcgacttccaggtgaacctgaacaacgccagcagaagccagagcagccacagctacgacgacagcaccctgcccctgatcgacagaaaccagaagagcgacaagaagcccgacagagaggagatccagatgagcaacatgggcagcaacaccaagagcctggacaacaactacagcacccccaacgagagaggcgaccacaacagaaccctggacagaagcggcgacctgggcgacatggagcccctgaagggcaccacccccctgatgcaggacgagggccaggagagcctggaggaggagctggacgtgctggtgctggacgacgagggcggccaggtgagctaccccagcatgcagaagatctag

SEQ ID NO: 75691 - DNA, 2658 bp, synthetic construct
  misc_feature 1..2658: note = Description of Artificial Sequence: Synthetic coding sequence
  source 1..2658: mol_type = other DNA
atggccaacggcaccctgaccagaagacaccagaacggcagattcgtgggcgacgccgacctggagagacagaagttcagcgacctgaagctgaacggcccccaggaccacagccacctgctgtacagcaccatccccagaatgcaggagcccggccagatcgtggagacctacaccgaggaggaccccgagggcgccatgagcgtggtgagcgtggagaccagcgacgacggcaccaccagaagaaccgagaccaccgtgaagaaggtggtgaagaccgtgaccaccagaaccgtgcagcccgtggccatgggccccgacggcctgcccgtggacgccagcagcgtgagcaacaactacatccagaccctgggcagagacttcagaaagaacggcaacggcggccccggcccctacgtgggccaggccggcaccgccaccctgcccagaaacttccactacccccccgacggctacagcagacactacgaggacggctaccccggcggcagcgacaactacggcagcctgagcagagtgaccagaatcgaggagagatacagacccagcatggagggctacagagcccccagcagacaggacgtgtacggcccccagccccaggtgagagtgggcggcagcagcgtggacctgcacagattccaccccgagccctacggcctggaggacgaccagagaagcatgggctacgacgacctggactacggcatgatgagcgactacggcaccgccagaagaaccggcacccccagcgaccccagaagaagactgagaagctacgaggacatgatcggcgaggaggtgcccagcgaccagtactactgggcccccctggcccagcacgagagaggcagcctggccagcctggacagcctgagaaagggcggcccccccccccccaactggagacagcccgagctgcccgaggtgatcgccatgctgggcttcagactggacgccgtgaagagcaacgccgccgcctacctgcagcacctgtgctacagaaacgacaaggtgaagaccgacgtgagaaagctgaagggcatccccgtgctggtgggcctgctggaccaccccaagaaggaggtgcacctgggcgcctgcggcgccctgaagaacatcagcttcggcagagaccaggacaacaagatcgccatcaagaactgcgacggcgtgcccgccctggtgagactgctgagaaaggccagagacatggacctgaccgaggtgatcaccggcaccctgtggaacctgagcagccacgacagcatcaagatggagatcgtggaccacgccctgcacgccctgaccgacgaggtgatcatcccccacagcggctgggagagagagcccaacgaggactgcaagcccagacacatcgagtgggagagcgtgctgaccaacaccgccggctgcctgagaaacgtgagcagcgagagaagcgaggccagaagaaagctgagagagtgcgacggcctggtggacgccctgatcttcatcgtgcaggccgagatcggccagaaggacagcgacagcaagctggtggagaactgcgtgtgcctgctgagaaacctgagctaccaggtgcacagagagatcccccaggccgagagataccaggaggccgcccccaacgtggccaacaacaccggcccccacgccgccagctgcttcggcgccaagaagggcaaggacgagtggttcagcagaggcaagaagcccatcgaggaccccgccaacgacaccgtggacttccccaagagaaccagccccgccagaggctacgagctgctgttccagcccgaggtggtgagaatctacatcagcctgctgaaggagagcaagacccccgccatcctggaggccagcgccggcgccatccagaacctgtgcgccggcagatggacctacggcagatacatcagaagcgccctgagacaggagaaggccctgagcgccatcgccgacctgctgaccaacgagcacgagagagtggtgaaggccgccagcggcgccctgagaaacctggccgtggacgccagaaacaaggagctgatcggcaagcacgccatccccaacctggtgaagaacctgcccggcggccagcagaacagcagctggaacttcagcgaggacaccgtgatcagcatcctgaacaccatcaacgaggtgatcgccgagaacctggaggccgccaagaagctgagagagacccagggcatcgagaagctggtgctgatcaacaagagcggcaacagaagcgagaaggaggtgagagccgccgccctggtgctgcagaccatctggggctacaaggagctgagaaagcccctggagaaggagggctggaagaagagcgacttccaggtgaacctgaacaacgccagcagaagccagagcagccacagctacgacgacagcaccctgcccctgatcgacagaaaccagaagagcgacaagaagcccgacagagaggagatccagatgagcaacatgggcagcaacaccaagagcctggacaacaactacagcacccccaacgagagaggcgaccacaacagaaccctggacagaagcggcgacctgggcgacatggagcccctgaagggcaccacccccctgatgcagaagatctag

SEQ ID NO: 75692 - DNA, 1920 bp, synthetic construct
  misc_feature 1..1920: note = Description of Artificial Sequence: Synthetic coding sequence
  source 1..1920: mol_type = other DNA
atgatcggcgaggaggtgcccagcgaccagtactactgggcccccctggcccagcacgagagaggcagcctggccagcctggacagcctgagaaagggcggcccccccccccccaactggagacagcccgagctgcccgaggtgatcgccatgctgggcttcagactggacgccgtgaagagcaacgccgccgcctacctgcagcacctgtgctacagaaacgacaaggtgaagaccgacgtgagaaagctgaagggcatccccgtgctggtgggcctgctggaccaccccaagaaggaggtgcacctgggcgcctgcggcgccctgaagaacatcagcttcggcagagaccaggacaacaagatcgccatcaagaactgcgacggcgtgcccgccctggtgagactgctgagaaaggccagagacatggacctgaccgaggtgatcaccggcaccctgtggaacctgagcagccacgacagcatcaagatggagatcgtggaccacgccctgcacgccctgaccgacgaggtgatcatcccccacagcggctgggagagagagcccaacgaggactgcaagcccagacacatcgagtgggagagcgtgctgaccaacaccgccggctgcctgagaaacgtgagcagcgagagaagcgaggccagaagaaagctgagagagtgcgacggcctggtggacgccctgatcttcatcgtgcaggccgagatcggccagaaggacagcgacagcaagctggtggagaactgcgtgtgcctgctgagaaacctgagctaccaggtgcacagagagatcccccaggccgagagataccaggaggccgcccccaacgtggccaacaacaccggcccccacgccgccagctgcttcggcgccaagaagggcaagggcaagaagcccatcgaggaccccgccaacgacaccgtggacttccccaagagaaccagccccgccagaggctacgagctgctgttccagcccgaggtggtgagaatctacatcagcctgctgaaggagagcaagacccccgccatcctggaggccagcgccggcgccatccagaacctgtgcgccggcagatggacctacggcagatacatcagaagcgccctgagacaggagaaggccctgagcgccatcgccgacctgctgaccaacgagcacgagagagtggtgaaggccgccagcggcgccctgagaaacctggccgtggacgccagaaacaaggagctgatcggcaagcacgccatccccaacctggtgaagaacctgcccggcggccagcagaacagcagctggaacttcagcgaggacaccgtgatcagcatcctgaacaccatcaacgaggtgatcgccgagaacctggaggccgccaagaagctgagagagacccagggcatcgagaagctggtgctgatcaacaagagcggcaacagaagcgagaaggaggtgagagccgccgccctggtgctgcagaccatctggggctacaaggagctgagaaagcccctggagaaggagggctggaagaagagcgacttccaggtgaacctgaacaacgccagcagaagccagagcagccacagctacgacgacagcaccctgcccctgatcgacagaaaccagaagagcgacaagaagcccgacagagaggagatccagatgagcaacatgggcagcaacaccaagagcctggacaacaactacagcacccccaacgagagaggcgaccacaacagaaccctggacagaagcggcgacctgggcgacatggagcccctgaagggcaccacccccctgatgcaggacgagggccaggagagcctggaggaggagctggacgtgctggtgctggacgacgagggcggccaggtgagctaccccagcatgcagaagatctag

SEQ ID NO: 75693 - DNA, 2499 bp, synthetic construct; identical to SEQ ID NO: 75677
  misc_feature 1..2499: note = Description of Artificial Sequence: Synthetic coding sequence
  source 1..2499: mol_type = other DNA

SEQ ID NO: 75694 - DNA, 2499 bp, synthetic construct; identical to SEQ ID NO: 75677
  misc_feature 1..2499: note = Description of Artificial Sequence: Synthetic coding sequence
  source 1..2499: mol_type = other DNA

SEQ ID NO: 75695 - DNA, 2640 bp, synthetic construct; identical to SEQ ID NO: 75686
  misc_feature 1..2640: note = Description of Artificial Sequence: Synthetic coding sequence
  source 1..2640: mol_type = other DNA

SEQ ID NO: 75696 - DNA, 2523 bp, synthetic construct
  misc_feature 1..2523: note = Description of Artificial Sequence: Synthetic coding sequence
  source 1..2523: mol_type = other DNA
atgcaggagcccggccagatcgtggagacctacaccgaggaggaccccgagggcgccatgagcgtggtgagcgtggagaccagcgacgacggcaccaccagaagaaccgagaccaccgtgaagaaggtggtgaagaccgtgaccaccagaaccgtgcagcccgtggccatgggccccgacggcctgcccgtggacgccagcagcgtgagcaacaactacatccagaccctgggcagagacttcagaaagaacggcaacggcggccccggcccctacgtgggccaggccggcaccgccaccctgcccagaaacttccactacccccccgacggctacagcagacactacgaggacggctaccccggcggcagcgacaactacggcagcctgagcagagtgaccagaatcgaggagagatacagacccagcatggagggctacagagcccccagcagacaggacgtgtacggcccccagccccaggtgagagtgggcggcagcagcgtggacctgcacagattccaccccgagccctacggcctggaggacgaccagagaagcatgggctacgacgacctggactacggcatgatgagcgactacggcaccgccagaagaaccggcacccccagcgaccccagaagaagactgagaagctacgaggacatgatcggcgaggaggtgcccagcgaccagtactactgggcccccctggcccagcacgagagaggcagcctggccagcctggacagcctgagaaagggcggcccccccccccccaactggagacagcccgagctgcccgaggtgatcgccatgctgggcttcagactggacgccgtgaagagcaacgccgccgcctacctgcagcacctgtgctacagaaacgacaaggtgaagaccgacgtgagaaagctgaagggcatccccgtgctggtgggcctgctggaccaccccaagaaggaggtgcacctgggcgcctgcggcgccctgaagaacatcagcttcggcagagaccaggacaacaagatcgccatcaagaactgcgacggcgtgcccgccctggtgagactgctgagaaaggccagagacatggacctgaccgaggtgatcaccggcaccctgtggaacctgagcagccacgacagcatcaagatggagatcgtggaccacgccctgcacgccctgaccgacgaggtgatcatcccccacagcggctgggagagagagcccaacgaggactgcaagcccagacacatcgagtgggagagcgtgctgaccaacaccgccggctgcctgagaaacgtgagcagcgagagaagcgaggccagaagaaagctgagagagtgcgacggcctggtggacgccctgatcttcatcgtgcaggccgagatcggccagaaggacagcgacagcaagctggtggagaactgcgtgtgcctgctgagaaacctgagctaccaggtgcacagagagatcccccaggccgagagataccaggaggccgcccccaacgtggccaacaacaccggcccccacgccgccagctgcttcggcgccaagaagggcaagggcaagaagcccatcgaggaccccgccaacgacaccgtggacttccccaagagaaccagccccgccagaggctacgagctgctgttccagcccgaggtggtgagaatctacatcagcctgctgaaggagagcaagacccccgccatcctggaggccagcgccggcgccatccagaacctgtgcgccggcagatggacctacggcagatacatcagaagcgccctgagacaggagaaggccctgagcgccatcgccgacctgctgaccaacgagcacgagagagtggtgaaggccgccagcggcgccctgagaaacctggccgtggacgccagaaacaaggagctgatcggcaagcacgccatccccaacctggtgaagaacctgcccggcggccagcagaacagcagctggaacttcagcgaggacaccgtgatcagcatcctgaacaccatcaacgaggtgatcgccgagaacctggaggccgccaagaagctgagagagacccagggcatcgagaagctggtgctgatcaacaagagcggcaacagaagcgagaaggaggtgagagccgccgccctggtgctgcagaccatctggggctacaaggagctgagaaagcccctggagaaggagggctggaagaagagcgacttccaggtgaacctgaacaacgccagcagaagccagagcagccacagctacgacgacagcaccctgcccctgatcgacagaaaccagaagagcgacaacaactacagcacccccaacgagagaggcgaccacaacagaaccctggacagaagcggcgacctgggcgacatggagcccctgaagggcaccacccccctgatgcaggacgagggccaggagagcctggaggaggagctggacgtgctggtgctggacgacgagggcggccaggtgagctaccccagcatgcagaagatctag

SEQ ID NO: 75697 - DNA, 2745 bp, synthetic construct
  misc_feature 1..2745: note = Description of Artificial Sequence: Synthetic coding sequence
  source 1..2745: mol_type = other DNA
atggccaacggcaccctgaccagaagacaccagaacggcagattcgtgggcgacgccgacctggagagacagaagttcagcgacctgaagctgaacggcccccaggaccacagccacctgctgtacagcaccatccccagaatgcaggagcccggccagatcgtggagacctacaccgaggaggaccccgagggcgccatgagcgtggtgagcgtggagaccagcgacgacggcaccaccagaagaaccgagaccaccgtgaagaaggtggtgaagaccgtgaccaccagaaccgtgcagcccgtggccatgggccccgacggcctgcccgtggacgccagcagcgtgagcaacaactacatccagaccctgggcagagacttcagaaagaacggcaacggcggccccggcccctacgtgggccaggccggcaccgccaccctgcccagaaacttccactacccccccgacggctacagcagacactacgaggacggctaccccggcggcagcgacaactacggcagcctgagcagagtgaccagaatcgaggagagatacagacccagcatggagggctacagagcccccagcagacaggacgtgtacggcccccagccccaggtgagagtgggcggcagcagcgtggacctgcacagattccaccccgagccctacggcctggaggacgaccagagaagcatgggctacgacgacctggactacggcatgatgagcgactacggcaccgccagaagaaccggcacccccagcgaccccagaagaagactgagaagctacgaggacatgatcggcgaggaggtgcccagcgaccagtactactgggcccccctggcccagcacgagagaggcagcctggccagcctggacagcctgagaaagggcggcccccccccccccaactggagacagcccgagctgcccgaggtgatcgccatgctgggcttcagactggacgccgtgaagagcaacgccgccgcctacctgcagcacctgtgctacagaaacgacaaggtgaagaccgacgtgagaaagctgaagggcatccccgtgctggtgggcctgctggaccaccccaagaaggaggtgcacctgggcgcctgcggcgccctgaagaacatcagcttcggcagagaccaggacaacaagatcgccatcaagaactgcgacggcgtgcccgccctggtgagactgctgagaaaggccagagacatggacctgaccgaggtgatcaccggcaccctgtggaacctgagcagccacgacagcatcaagatggagatcgtggaccacgccctgcacgccctgaccgacgaggtgatcatcccccacagcggctgggagagagagcccaacgaggactgcaagcccagacacatcgagtgggagagcgtgctgaccaacaccgccggctgcctgagaaacgtgagcagcgagagaagcgaggccagaagaaagctgagagagtgcgacggcctggtggacgccctgatcttcatcgtgcaggccgagatcggccagaaggacagcgacagcaagctggtggagaactgcgtgtgcctgctgagaaacctgagctaccaggtgcacagagagatcccccaggccgagagataccaggaggccgcccccaacgtggccaacaacaccggcccccacgccgccagctgcttcggcgccaagaagggcaaggacgagtggttcagcagaggcaagaagcccatcgaggaccccgccaacgacaccgtggacttccccaagagaaccagccccgccagaggctacgagctgctgttccagcccgaggtggtgagaatctacatcagcctgctgaaggagagcaagacccccgccatcctggaggccagcgccggcgccatccagaacctgtgcgccggcagatggacctacggcagatacatcagaagcgccctgagacaggagaaggccctgagcgccatcgccgacctgctgaccaacgagcacgagagagtggtgaaggccgccagcggcgccctgagaaacctggccgtggacgccagaaacaaggagctgatcggcaagcacgccatccccaacctggtgaagaacctgcccggcggccagcagaacagcagctggaacttcagcgaggacaccgtgatcagcatcctgaacaccatcaacgaggtgatcgccgagaacctggaggccgccaagaagctgagagagacccagggcatcgagaagctggtgctgatcaacaagagcggcaacagaagcgagaaggaggtgagagccgccgccctggtgctgcagaccatctggggctacaaggagctgagaaagcccctggagaaggagggctggaagaagagcgacttccaggtgaacctgaacaacgccagcagaagccagagcagccacagctacgacgacagcaccctgcccctgatcgacagaaaccagaagagcgacaagaagcccgacagagaggagatccagatgagcaacatgggcagcaacaccaagagcctggacaacaactacagcacccccaacgagagaggcgaccacaacagaaccctggacagaagcggcgacctgggcgacatggagcccctgaagggcaccacccccctgatgcaggacgagggccaggagagcctggaggaggagctggacgtgctggtgctggacgacgagggcggccaggtgagctaccccagcatgcagaagatctag

SEQ ID NO: 75698 - DNA, 381 bp, synthetic construct
  misc_feature 1..381: note = Description of Artificial Sequence: Synthetic coding sequence
  source 1..381: mol_type = other DNA
atgatcggcgaggaggtgcccagcgaccagtactactgggcccccctggcccagcacgagagaggcagcctggccagcctggacagcctgagaaagggcggcccccccccccccaactggagacagcccgagctgcccgaggtgatcgccatgctgggcttcagactggacgccgtgaagagcaacgccgccgcctacctgcagcacctgtgctacagaaacgacaaggtgaagaccgacgtgagaaagctgaagggcatccccgtgctggtgggcctgctggaccaccccaagaaggaggtgcacctgggcgcctgcggcgccctgaagaacatcagcttcggcagagaccaggacaacaagatcgccatcaagaactag

SEQ ID NO: 75699 - DNA, 2640 bp, synthetic construct; identical to SEQ ID NO: 75686
  misc_feature 1..2640: note = Description of Artificial Sequence: Synthetic coding sequence
  source 1..2640: mol_type = other DNA

SEQ ID NO: 75700 - DNA, 3678 bp, synthetic construct
  misc_feature 1..3678: note = Description of Artificial Sequence: Synthetic coding sequence
  source 1..3678: mol_type = other DNA
atgttcgccagaaagccccccggcgccgcccccctgggcgccatgcccgtgcccgaccagcccagcagcgccagcgagaagaccagcagcctgagccccggcctgaacaccagcaacggcgacggcagcgagaccgagaccaccagcgccatcctggccagcgtgaaggagcaggagctgcagttcgagagactgaccagagagctggaggccgagagacagatcgtggccagccagctggagagatgcaagctgggcagcgagaccggcagcatgagcagcatgagcagcgccgaggagcagttccagtggcagagccaggacggccagaaggacatcgaggacgagctgaccaccggcctggagctggtggacagctgcatcagaagcctgcaggagagcggcatcctggacccccaggactacagcaccggcgagagacccagcctgctgagccagagcgccctgcagctgaacagcaagcccgagggcagcttccagtaccccgccagctaccacagcaaccagaccctggccctgggcgagaccacccccagccagctgcccgccagaggcacccaggccagagccaccggccagagcttcagccagggcaccaccagcagagccggccacctggccggccccgagcccgcccccccccccccccccccccccagagagcccttcgcccccagcctgggcagcgccttccacctgcccgacgccccccccgccgccgccgccgccgccctgtactacagcagcagcaccctgcccgccccccccagaggcggcagccccctggccgccccccagggcggcagccccaccaagctgcagagaggcggcagcgcccccgagggcgccacctacgccgcccccagaggcagcagccccaagcagagccccagcagactggccaagagctacagcaccagcagccccatcaacatcgtggtgagcagcgccggcctgagccccatcagagtgaccagcccccccaccgtgcagagcaccatcagcagcagccccatccaccagctgagcagcaccatcggcacctacgccaccctgagccccaccaagagactggtgcacgccagcgagcagtacagcaagcacagccaggagctgtacgccaccgccaccctgcagagacccggcagcctggccgccggcagcagagccagctacagcagccagcacggccacctgggccccgagctgagagccctgcagagccccgagcaccacatcgaccccatctacgaggacagagtgtaccagaagccccccatgagaagcctgagccagagccagggcgaccccctgccccccgcccacaccggcacctacagaaccagcaccgcccccagcagccccggcgtggacagcgtgcccctgcagagaaccggcagccagcacggcccccagaacgccgccgccgccaccttccagagagccagctacgccgccggccccgccagcaactacgccgacccctacagacagctgcagtactgccccagcgtggagagcccctacagcaagagcggccccgccctgccccccgagggcaccctggccagaagccccagcatcgacagcatccagaaggaccccagagagttcggctggagagaccccgagctgcccgaggtgatccagatgctgcagcaccagttccccagcgtgcagagcaacgccgccgcctacctgcagcacctgtgcttcggcgacaacaagatcaaggccgagatcagaagacagggcggcatccagctgctggtggacctgctggaccacagaatgaccgaggtgcacagaagcgcctgcggcgccctgagaaacctggtgtacggcaaggccaacgacgacaacaagatcgccctgaagaactgcggcggcatccccgccctggtgagactgctgagaaagaccaccgacctggagatcagagagctggtgaccggcgtgctgtggaacctgagcagctgcgacgccctgaagatgcccatcatccaggacgccctggccgtgctgaccaacgccgtgatcatcccccacagcggctgggagaacagccccctgcaggacgacagaaagatccagctgcacagcagccaggtgctgagaaacgccaccggctgcctgagaaacgtgagcagcgccggcgaggaggccagaagaagaatgagagagtgcgacggcctgaccgacgccctgctgtacgtgatccagagcgccctgggcagcagcgagatcgacagcaagaccgtggagaactgcgtgtgcatcctgagaaacctgagctacagactggccgccgagaccagccagggccagcacatgggcaccgacgagctggacggcctgctgtgcggcgaggccaacggcaaggacgccgagagcagcggctgctggggcaagaagaagaagaagaagaagagccaggaccagtgggacggcgtgggccccctgcccgactgcgccgagccccccaagggcatccagatgctgtggcaccccagcatcgtgaagccctacctgaccctgctgagcgagtgcagcaaccccgacaccctggagggcgccgccggcgccctgcagaacctggccgccggcagctggaagtggagcgtgtacatcagagccgccgtgagaaaggagaagggcctgcccatcctggtggagctgctgagaatcgacaacgacagagtggtgtgcgccgtggccaccgccctgagaaacatggccctggacgtgagaaacaaggagctgatcggcaagtacgccatgagagacctggtgcacagactgcccggcggcaacaacagcaacaacaccgccagcaaggccatgagcgacgacaccgtgaccgccgtgtgctgcaccctgcacgaggtgatcaccaagaacatggagaacgccaaggccctgagagacgccggcggcatcgagaagctggtgggcatcagcaagagcaagggcgacaagcacagccccaaggtggtgaaggccgccagccaggtgctgaacagcatgtggcagtacagagacctgagaagcctgtacaagaaggacggctggagccagtaccacttcgtggccagcagcagcaccatcgagagagacagacagagaccctacagcagcagcagaacccccagcatcagccccgtgagagtgagccccaacaacagaagcgccagcgcccccgccagccccagagagatgatcagcctgaaggagagaaagaccgactacgagtgcaccggcagcaacgccacctaccacggcgccaagggcgagcacaccagcagaaaggacgccatgaccgcccagaacaccggcatcagcaccctgtacagaaacagctacggcgcccccgccgaggacatcaagcacaaccaggtgagcgcccagcccgtgccccaggagcccagcagaaaggactacgagacctaccagcccttccagaacagcaccagaaactacgacgagagcttcttcgaggaccaggtgcaccacagaccccccgccagcgagtacaccatgcacctgggcctgaagagcaccggcaactacgtggacttctacagcgccgccagaccctacagcgagctgaactacgagaccagccactaccccgccagccccgacagctgggtgtag

SEQ ID NO: 75701 - DNA, 3504 bp, synthetic construct
  misc_feature 1..3504: note = Description of Artificial Sequence: Synthetic coding sequence
  source 1..3504: mol_type = other DNA
atgttcgccagaaagccccccggcgccgcccccctgggcgccatgcccgtgcccgaccagcccagcagcgccagcgagaagaccagcagcctgagccccggcctgaacaccagcaacggcgacggcagcgagaccgagaccaccagcgccatcctggccagcgtgaaggagcaggagctgcagttcgagagactgaccagagagctggaggccgagagacagatcgtggccagccagctggagagatgcaagctgggcagcgagaccggcagcatgagcagcatgagcagcgccgaggagcagttccagtggcagagccaggacggccagaaggacatcgaggacgagctgaccaccggcctggagctggtggacagctgcatcagaagcctgcaggagagcggcatcctggacccccaggactacagcaccggcgagagacccagcctgctgagccagagcgccctgcagctgaacagcaagcccgagggcagcttccagtaccccgccagctaccacagcaaccagaccctggccctgggcgagaccacccccagccagctgcccgccagaggcacccaggccagagccaccggccagagcttcagccagggcaccaccagcagagccggccacctggccggccccgagcccgcccccccccccccccccccccccagagagcccttcgcccccagcctgggcagcgccttccacctgcccgacgccccccccgccgccgccgccgccgccctgtactacagcagcagcaccctgcccgccccccccagaggcggcagccccctggccgccccccagggcggcagccccaccaagctgcagagaggcggcagcgcccccgagggcgccacctacgccgcccccagaggcagcagccccaagcagagccccagcagactggccaagagctacagcaccagcagccccatcaacatcgtggtgagcagcgccggcctgagccccatcagagtgaccagcccccccaccgtgcagagcaccatcagcagcagccccatccaccagctgagcagcaccatcggcacctacgccaccctgagccccaccaagagactggtgcacgccagcgagcagtacagcaagcacagccaggagctgtacgccaccgccaccctgcagagacccggcagcctggccgccggcagcagagccagctacagcagccagcacggccacctgggccccgagctgagagccctgcagagccccgagcaccacatcgaccccatctacgaggacagagtgtaccagaagccccccatgagaagcctgagccagagccagggcgaccccctgccccccgcccacaccggcacctacagaaccagcaccgcccccagcagccccggcgtggacagcgtgcccctgcagagaaccggcagccagcacggcccccagaacgccgccgccgccaccttccagagagccagctacgccgccggccccgccagcaactacgccgacccctacagacagctgcagtactgccccagcgtggagagcccctacagcaagagcggccccgccctgccccccgagggcaccctggccagaagccccagcatcgacagcatccagaaggaccccagagagttcggctggagagaccccgagctgcccgaggtgatccagatgctgcagcaccagttccccagcgtgcagagcaacgccgccgcctacctgcagcacctgtgcttcggcgacaacaagatcaaggccgagatcagaagacagggcggcatccagctgctggtggacctgctggaccacagaatgaccgaggtgcacagaagcgcctgcggcgccctgagaaacctggtgtacggcaaggccaacgacgacaacaagatcgccctgaagaactgcggcggcatccccgccctggtgagactgctgagaaagaccaccgacctggagatcagagagctggtgaccggcgtgctgtggaacctgagcagctgcgacgccctgaagatgcccatcatccaggacgccctggccgtgctgaccaacgccgtgatcatcccccacagcggctgggagaacagccccctgcaggacgacagaaagatccagctgcacagcagccaggtgctgagaaacgccaccggctgcctgagaaacgtgagcagcgccggcgaggaggccagaagaagaatgagagagtgcgacggcctgaccgacgccctgctgtacgtgatccagagcgccctgggcagcagcgagatcgacagcaagaccgtggagaactgcgtgtgcatcctgagaaacctgagctacagactggccgccgagaccagccagggccagcacatgggcaccgacgagctggacggcctgctgtgcggcgaggccaacggcaaggacgccgagagcagcggctgctggggcaagaagaagaagaagaagaagagccaggaccagtggagcgtgtacatcagagccgccgtgagaaaggagaagggcctgcccatcctggtggagctgctgagaatcgacaacgacagagtggtgtgcgccgtggccaccgccctgagaaacatggccctggacgtgagaaacaaggagctgatcggcaagtacgccatgagagacctggtgcacagactgcccggcggcaacaacagcaacaacaccgccagcaaggccatgagcgacgacaccgtgaccgccgtgtgctgcaccctgcacgaggtgatcaccaagaacatggagaacgccaaggccctgagagacgccggcggcatcgagaagctggtgggcatcagcaagagcaagggcgacaagcacagccccaaggtggtgaaggccgccagccaggtgctgaacagcatgtggcagtacagagacctgagaagcctgtacaagaaggacggctggagccagtaccacttcgtggccagcagcagcaccatcgagagagacagacagagaccctacagcagcagcagaacccccagcatcagccccgtgagagtgagccccaacaacagaagcgccagcgcccccgccagccccagagagatgatcagcctgaaggagagaaagaccgactacgagtgcaccggcagcaacgccacctaccacggcgccaagggcgagcacaccagcagaaaggacgccatgaccgcccagaacaccggcatcagcaccctgtacagaaacagctacggcgcccccgccgaggacatcaagcacaaccaggtgagcgcccagcccgtgccccaggagcccagcagaaaggactacgagacctaccagcccttccagaacagcaccagaaactacgacgagagcttcttcgaggaccaggtgcaccacagaccccccgccagcgagtacaccatgcacctgggcctgaagagcaccggcaactacgtggacttctacagcgccgccagaccctacagcgagctgaactacgagaccagccactaccccgccagccccgacagctgggtgtag

SEQ ID NO: 75702 - DNA, 2379 bp, synthetic construct
  misc_feature 1..2379: note = Description of Artificial Sequence: Synthetic coding sequence
  source 1..2379: mol_type = other DNA
atgagaagcctgagccagagccagggcgaccccctgccccccgcccacaccggcacctacagaaccagcaccgcccccagcagccccggcgtggacagcgtgcccctgcagagaaccggcagccagcacggcccccagaacgccgccgccgccaccttccagagagccagctacgccgccggccccgccagcaactacgccgacccctacagacagctgcagtactgccccagcgtggagagcccctacagcaagagcggccccgccctgccccccgagggcaccctggccagaagccccagcatcgacagcatccagaaggaccccagagagttcggctggagagaccccgagctgcccgaggtgatccagatgctgcagcaccagttccccagcgtgcagagcaacgccgccgcctacctgcagcacctgtgcttcggcgacaacaagatcaaggccgagatcagaagacagggcggcatccagctgctggtggacctgctggaccacagaatgaccgaggtgcacagaagcgcctgcggcgccctgagaaacctggtgtacggcaaggccaacgacgacaacaagatcgccctgaagaactgcggcggcatccccgccctggtgagactgctgagaaagaccaccgacctggagatcagagagctggtgaccggcgtgctgtggaacctgagcagctgcgacgccctgaagatgcccatcatccaggacgccctggccgtgctgaccaacgccgtgatcatcccccacagcggctgggagaacagccccctgcaggacgacagaaagatccagctgcacagcagccaggtgctgagaaacgccaccggctgcctgagaaacgtgagcagcgccggcgaggaggccagaagaagaatgagagagtgcgacggcctgaccgacgccctgctgtacgtgatccagagcgccctgggcagcagcgagatcgacagcaagaccgtggagaactgcgtgtgcatcctgagaaacctgagctacagactggccgccgagaccagccagggccagcacatgggcaccgacgagctggacggcctgctgtgcggcgaggccaacggcaaggacgccgagagcagcggctgctggggcaagaagaagaagaagaagaagagccaggaccagtgggacggcgtgggccccctgcccgactgcgccgagccccccaagggcatccagatgctgtggcaccccagcatcgtgaagccctacctgaccctgctgagcgagtgcagcaaccccgacaccctggagggcgccgccggcgccctgcagaacctggccgccggcagctggaagtggagcgtgtacatcagagccgccgtgagaaaggagaagggcctgcccatcctggtggagctgctgagaatcgacaacgacagagtggtgtgcgccgtggccaccgccctgagaaacatggccctggacgtgagaaacaaggagctgatcggcaagtacgccatgagagacctggtgcacagactgcccggcggcaacaacagcaacaacaccgccagcaaggccatgagcgacgacaccgtgaccgccgtgtgctgcaccctgcacgaggtgatcaccaagaacatggagaacgccaaggccctgagagacgccggcggcatcgagaagctggtgggcatcagcaagagcaagggcgacaagcacagccccaaggtggtgaaggccgccagccaggtgctgaacagcatgtggcagtacagagacctgagaagcctgtacaagaaggacggctggagccagtaccacttcgtggccagcagcagcaccatcgagagagacagacagagaccctacagcagcagcagaacccccagcatcagccccgtgagagtgagccccaacaacagaagcgccagcgcccccgccagccccagagagatgatcagcctgaaggagagaaagaccgactacgagtgcaccggcagcaacgccacctaccacggcgccaagggcgagcacaccagcagaaaggacgccatgaccgcccagaacaccggcatcagcaccctgtacagaaacagctacggcgcccccgccgaggacatcaagcacaaccaggtgagcgcccagcccgtgccccaggagcccagcagaaaggactacgagacctaccagcccttccagaacagcaccagaaactacgacgagagcttcttcgaggaccaggtgcaccacagaccccccgccagcgagtacaccatgcacctgggcctgaagagcaccggcaactacgtggacttctacagcgccgccagaccctacagcgagctgaactacgagaccagccactaccccgccagccccgacagctgggtgtag

SEQ ID NO: 75703 - DNA, 2667 bp, synthetic construct
  misc_feature 1..2667: note = Description of Artificial Sequence: Synthetic coding sequence
  source 1..2667: mol_type = other DNA
atgagcagcatgagcagcgccgaggagcagttccagtggcagagccaggacggccagaaggacatcgaggacgagctgaccaccggcctggagctggtggacagctgcatcagaagcctgcaggagagcggcatcctggacccccaggactacagcaccggcgagaccggcagcagagccagctacagcagccagcacggccacctgggccccgagctgagagccctgcagagccccgagcaccacatcgaccccatctacgaggacagagtgtaccagaagccccccatgagaagcctgagccagagccagggcgaccccctgccccccgcccacaccggcacctacagaaccagcaccgcccccagcagccccggcgtggacagcgtgcccctgcagagaaccggcagccagcacggcccccagaacgccgccgccgccaccttccagagagccagctacgccgccggccccgccagcaactacgccgacccctacagacagctgcagtactgccccagcgtggagagcccctacagcaagagcggccccgccctgccccccgagggcaccctggccagaagccccagcatcgacagcatccagaaggaccccagagagttcggctggagagaccccgagctgcccgaggtgatccagatgctgcagcaccagttccccagcgtgcagagcaacgccgccgcctacctgcagcacctgtgcttcggcgacaacaagatcaaggccgagatcagaagacagggcggcatccagctgctggtggacctgctggaccacagaatgaccgaggtgcacagaagcgcctgcggcgccctgagaaacctggtgtacggcaaggccaacgacgacaacaagatcgccctgaagaactgcggcggcatccccgccctggtgagactgctgagaaagaccaccgacctggagatcagagagctggtgaccggcgtgctgtggaacctgagcagctgcgacgccctgaagatgcccatcatccaggacgccctggccgtgctgaccaacgccgtgatcatcccccacagcggctgggagaacagccccctgcaggacgacagaaagatccagctgcacagcagccaggtgctgagaaacgccaccggctgcctgagaaacgtgagcagcgccggcgaggaggccagaagaagaatgagagagtgcgacggcctgaccgacgccctgctgtacgtgatccagagcgccctgggcagcagcgagatcgacagcaagaccgtggagaactgcgtgtgcatcctgagaaacctgagctacagactggccgccgagaccagccagggccagcacatgggcaccgacgagctggacggcctgctgtgcggcgaggccaacggcaaggacgccgagagcagcggctgctggggcaagaagaagaagaagaagaagagccaggaccagtgggacggcgtgggccccctgcccgactgcgccgagccccccaagggcatccagatgctgtggcaccccagcatcgtgaagccctacctgaccctgctgagcgagtgcagcaaccccgacaccctggagggcgccgccggcgccctgcagaacctggccgccggcagctggaagtggagcgtgtacatcagagccgccgtgagaaaggagaagggcctgcccatcctggtggagctgctgagaatcgacaacgacagagtggtgtgcgccgtggccaccgccctgagaaacatggccctggacgtgagaaacaaggagctgatcggcaagtacgccatgagagacctggtgcacagactgcccggcggcaacaacagcaacaacaccgccagcaaggccatgagcgacgacaccgtgaccgccgtgtgctgcaccctgcacgaggtgatcaccaagaacatggagaacgccaaggccctgagagacgccggcggcatcgagaagctggtgggcatcagcaagagcaagggcgacaagcacagccccaaggtggtgaaggccgccagccaggtgctgaacagcatgtggcagtacagagacctgagaagcctgtacaagaaggacggctggagccagtaccacttcgtggccagcagcagcaccatcgagagagacagacagagaccctacagcagcagcagaacccccagcatcagccccgtgagagtgagccccaacaacagaagcgccagcgcccccgccagccccagagagatgatcagcctgaaggagagaaagaccgactacgagtgcaccggcagcaacgccacctaccacggcgccaagggcgagcacaccagcagaaaggacgccatgaccgcccagaacaccggcatcagcaccctgtacagaaacagctacggcgcccccgccgaggacatcaagcacaaccaggtgagcgcccagcccgtgccccaggagcccagcagaaaggactacgagacctaccagcccttccagaacagcaccagaaactacgacgagagcttcttcgaggaccaggtgcaccacagaccccccgccagcgagtacaccatgcacctgggcctgaagagcaccggcaactacgtggacttctacagcgccgccagaccctacagcgagctgaactacgagaccagccactaccccgccagccccgacagctgggtgtag

SEQ ID NO: 75704 - DNA, 546 bp, synthetic construct
  misc_feature 1..546: note = Description of Artificial Sequence: Synthetic coding sequence
  source 1..546: mol_type = other DNA
atgagcagcatgagcagcgccgaggagcagttccagtggcagagccaggacggccagaaggacatcgaggacgagctgaccaccggcctggagctggtggacagctgcatcagaagcctgcaggagagcggcatcctggacccccaggactacagcaccggcgagagacccagcctgctgagccagagcgccctgcagctgaacagcaagcccgagggcagcttccagtaccccgccagctaccacagcaaccagaccctggccctgggcgagaccacccccagccagctgcccgccagaggcacccaggccagagccaccggccagagcttcagccagggcaccaccagcagagccggccacctggccggccccgagcccgcccccccccccccccccccccccagagagcccttcgcccccagcctgggcagcgccttccacctgcccgacgccccccccgccgccgccgccgccgccctgtactacagcagcagcaccctgcccgccccccccagaggcggcagccccctggccgccccctag

SEQ ID NO: 75705 - DNA, 963 bp, synthetic construct
  misc_feature 1..963: note = Description of Artificial Sequence: Synthetic coding sequence
  source 1..963: mol_type = other DNA
atgaccgtgtggtgcgccgtggccaccgccctgagaaacatggccctggacgtgagaaacaaggagctgatcggcaagtacgccatgagagacctggtgcacagactgcccggcggcaacaacagcaacaacaccgccagcaaggccatgagcgacgacaccgtgaccgccgtgtgctgcaccctgcacgaggtgatcaccaagaacatggagaacgccaaggccctgagagacgccggcggcatcgagaagctggtgggcatcagcaagagcaagggcgacaagcacagccccaaggtggtgaaggccgccagccaggtgctgaacagcatgtggcagtacagagacctgagaagcctgtacaagaaggacggctggagccagtaccacttcgtggccagcagcagcaccatcgagagagacagacagagaccctacagcagcagcagaacccccagcatcagccccgtgagagtgagccccaacaacagaagcgccagcgcccccgccagccccagagagatgatcagcctgaaggagagaaagaccgactacgagtgcaccggcagcaacgccacctaccacggcgccaagggcgagcacaccagcagaaaggacgccatgaccgcccagaacaccggcatcagcaccctgtacagaaacagctacggcgcccccgccgaggacatcaagcacaaccaggtgagcgcccagcccgtgccccaggagcccagcagaaaggactacgagacctaccagcccttccagaacagcaccagaaactacgacgagagcttcttcgaggaccaggtgcaccacagaccccccgccagcgagtacaccatgcacctgggcctgaagagcaccggcaactacgtggacttctacagcgccgccagaccctacagcgagctgaactacgagaccagccactaccccgccagccccgacagctgggtgtag

SEQ ID NO: 75706 - DNA, 246 bp, synthetic construct
  misc_feature 1..246: note = Description of Artificial Sequence: Synthetic coding sequence
  source 1..246: mol_type = other DNA
atgaacagagagggcgcccccggcaagagccccgaggagatgtacatccagcagaaggtgagagtgctgctgatgctgagaaagatgggcagcaacctgaccgccagcgaggaggagttcctgagaacctacgccggcgtggtgaacagccagctgagccagctgcccccccacagcatcgaccagggcgccgaggacgtggtgatggccttcagcagaagcgagaccgaggacagaagacagtag

SEQ ID NO: 75707 - DNA, 246 bp, synthetic construct; identical to SEQ ID NO: 75706
  misc_feature 1..246: note = Description of Artificial Sequence: Synthetic coding sequence
  source 1..246: mol_type = other DNA

SEQ ID NO: 75708 - DNA, 246 bp, synthetic construct; identical to SEQ ID NO: 75706
  misc_feature 1..246: note = Description of Artificial Sequence: Synthetic coding sequence
  source 1..246: mol_type = other DNA

SEQ ID NO: 75709 - DNA, 246 bp, synthetic construct; identical to SEQ ID NO: 75706
  misc_feature 1..246: note = Description of Artificial Sequence: Synthetic coding sequence
  source 1..246: mol_type = other DNA

SEQ ID NO: 75710 - DNA, 246 bp, synthetic construct; identical to SEQ ID NO: 75706
  misc_feature 1..246: note = Description of Artificial Sequence: Synthetic coding sequence
  source 1..246: mol_type = other DNA

SEQ ID NO: 75711 - DNA, 1692 bp, synthetic construct
  misc_feature 1..1692: note = Description of Artificial Sequence: Synthetic coding sequence
  source 1..1692: mol_type = other DNA
atggacgtgggcgagctgctgagctaccagcccaacagaggcaccaagagacccagagacgacgaggaggaggagcagaagatgagaagaaagcagaccggcaccagagagagaggcagatacagagaggaggagatgaccgtggtggaggaggccgacgacgacaagaagagactgctgcagatcatcgacagagacggcgaggaggaggaggaggaggaggagcccctggacgagagcagcgtgaagaagatgatcctgaccttcgagaagagaagctacaagaaccaggagctgagaatcaagttccccgacaaccccgagaagttcatggagagcgagctggacctgaacgacatcatccaggagatgcacgtggtggccaccatgcccgacctgtaccacctgctggtggagctgaacgccgtgcagagcctgctgggcctgctgggccacgacaacaccgacgtgagcatcgccgtggtggacctgctgcaggagctgaccgacatcgacaccctgcacgagagcgaggagggcgccgaggtgctgatcgacgccctggtggacggccaggtggtggccctgctggtgcagaacctggagagactggacgagagcgtgaaggaggaggccgacggcgtgcacaacaccctggccatcgtggagaacatggccgagttcagacccgagatgtgcaccgagggcgcccagcagggcctgctgcagtggctgctgaagagactgaaggccaagatgcccttcgacgccaacaagctgtactgcagcgaggtgctggccatcctgctgcaggacaacgacgagaacagagagctgctgggcgagctggacggcatcgacgtgctgctgcagcagctgagcgtgttcaagagacacaaccccagcaccgccgaggagcaggagatgatggagaacctgttcgacagcctgtgcagctgcctgatgctgagcagcaacagagagagattcctgaagggcgagggcctgcagctgatgaacctgatgctgagagagaagaagatcagcagaagcagcgccctgaaggtgctggaccacgccatgatcggccccgagggcaccgacaactgccacaagttcgtggacatcctgggcctgagaaccatcttccccctgttcatgaagagccccagaaagatcaagaaggtgggcaccaccgagaaggagcacgaggagcacgtgtgcagcatcctggccagcctgctgagaaacctgagaggccagcagagaaccagactgctgaacaagttcaccgagaacgacagcgagaaggtggacagactgatggagctgcacttcaagtacctgggcgccatgcaggtggccgacaagaagatcgagggcgagaagcacgacatggtgagaagaggcgagatcatcgacaacgacaccgaggaggagttctacctgagaagactggacgccggcctgttcgtgctgcagcacatctgctacatcatggccgagatctgcaacgccaacgtgccccagatcagacagagagtgcaccagatcctgaacatgagaggcagcagcatcaagatcgtgagacacatcatcaaggagtacgccgagaacatcggcgacggcagaagccccgagttcagagagaacgagcagaagagaatcctgggcctgctggagaacttctag

SEQ ID NO: 75712 - DNA, 1611 bp, synthetic construct
  misc_feature 1..1611: note = Description of Artificial Sequence: Synthetic coding sequence
  source 1..1611: mol_type = other DNA
atgagaagaaagcagaccggcaccagagagagaggcagatacagagaggaggagatgaccgtggtggaggaggccgacgacgacaagaagagactgctgcagatcatcgacagagacggcgaggaggaggaggaggaggaggagcccctggacgagagcagcgtgaagaagatgatcctgaccttcgagaagagaagctacaagaaccaggagctgagaatcaagttccccgacaaccccgagaagttcatggagagcgagctggacctgaacgacatcatccaggagatgcacgtggtggccaccatgcccgacctgtaccacctgctggtggagctgaacgccgtgcagagcctgctgggcctgctgggccacgacaacaccgacgtgagcatcgccgtggtggacctgctgcaggagctgaccgacatcgacaccctgcacgagagcgaggagggcgccgaggtgctgatcgacgccctggtggacggccaggtggtggccctgctggtgcagaacctggagagactggacgagagcgtgaaggaggaggccgacggcgtgcacaacaccctggccatcgtggagaacatggccgagttcagacccgagatgtgcaccgagggcgcccagcagggcctgctgcagtggctgctgaagagactgaaggccaagatgcccttcgacgccaacaagctgtactgcagcgaggtgctggccatcctgctgcaggacaacgacgagaacagagagctgctgggcgagctggacggcatcgacgtgctgctgcagcagctgagcgtgttcaagagacacaaccccagcaccgccgaggagcaggagatgatggagaacctgttcgacagcctgtgcagctgcctgatgctgagcagcaacagagagagattcctgaagggcgagggcctgcagctgatgaacctgatgctgagagagaagaagatcagcagaagcagcgccctgaaggtgctggaccacgccatgatcggccccgagggcaccgacaactgccacaagttcgtggacatcctgggcctgagaaccatcttccccctgttcatgaagagccccagaaagatcaagaaggtgggcaccaccgagaaggagcacgaggagcacgtgtgcagcatcctggccagcctgctgagaaacctgagaggccagcagagaaccagactgctgaacaagttcaccgagaacgacagcgagaaggtggacagactgatggagctgcacttcaagtacctgggcgccatgcaggtggccgacaagaagatcgagggcgagaagcacgacatggtgagaagaggcgagatcatcgacaacgacaccgaggaggagttctacctgagaagactggacgccggcctgttcgtgctgcagcacatctgctacatcatggccgagatctgcaacgccaacgtgccccagatcagacagagagtgcaccagatcctgaacatgagaggcagcagcatcaagatcgtgagacacatcatcaaggagtacgccgagaacatcggcgacggcagaagccccgagttcagagagaacgagcagaagagaatcctgggcctgctggagaacttctag

SEQ ID NO: 75713 - DNA, 501 bp, synthetic construct
  misc_feature 1..501: note = Description of Artificial Sequence: Synthetic coding sequence
  source 1..501: mol_type = other DNA
atgagaagaaagcagaccggcaccagagagagaggcagatacagagaggaggagatgaccgtggtggaggaggccgacgacgacaagaagagactgctgcagatcatcgacagagacggcgaggaggaggaggaggaggaggagcccctggacgagagcagcgtgaagaagatgatcctgaccttcgagaagagaagctacaagaaccaggagctgagaatcaagttccccgacaaccccgagaagttcatggagagcgagctggacctgaacgacatcatccaggagatgcacgtggtggccaccatgcccgacctgtaccacctgctggtggagctgaacgccgtgcagagcctgctgggcctgctgggccacgacaacaccgacgtgagcatcgccgtggtggacctgctgcaggagctgaccgacatcgacaccctgcacgagagcgaggagggcgccgaggtgctgatcgacgccctggtggacggccaggtgtag

SEQ ID NO: 75714 - DNA, 1443 bp, synthetic construct
  misc_feature 1..1443: note = Description of Artificial Sequence: Synthetic coding sequence
  source 1..1443: mol_type = other DNA
atgatcagagccgcccccccccccctgttcctgctgctgctgctgctgctgctgctggtgagctgggccagcagaggcgaggccgcccccgaccaggacgagatccagagactgcccggcctggccaagcagcccagcttcagacagtacagcggctacctgaagggcagcggcagcaagcacctgcactactggttcgtggagagccagaaggaccccgagaacagccccgtggtgctgtggctgaacggcggccccggctgcagcagcctggacggcctgctgaccgagcacggccccttcctggtgcagcccgacggcgtgaccctggagtacaacccctacagctggaacctgatcgccaacgtgctgtacctggagagccccgccggcgtgggcttcagctacagcgacgacaagttctacgccaccaacgacaccgaggtggcccagagcaacttcgaggccctgcaggacttcttcagactgttccccgagtacaagaacaacaagctgttcctgaccggcgagagctacgccggcatctacatccccaccctggccgtgctggtgatgcaggaccccagcatgaacctgcagggcctggccgtgggcaacggcctgagcagctacgagcagaacgacaacagcctggtgtacttcgcctactaccacggcctgctgggcaacagactgtggagcagcctgcagacccactgctgcagccagaacaagtgcaacttctacgacaacaaggacctggagtgcgtgaccaacctgcaggaggtggccagaatcgtgggcaacagcggcctgaacatctacaacctgtacgccccctgcgccggcggcgtgcccagccacttcagatacgagaaggacaccgtggtggtgcaggacctgggcaacatcttcaccagactgcccctgaagagaatgtggcaccaggccctgctgagaagcggcgacaaggtgagaatggaccccccctgcaccaacaccaccgccgccagcacctacctgaacaacccctacgtgagaaaggccctgaacatccccgagcagctgccccagtgggacatgtgcaacttcctggtgaacctgcagtacagaagactgtacagaagcatgaacagccagtacctgaagctgctgagcagccagaagtaccagatcctgctgtacaacggcgacgtggacatggcctgcaacttcatgggcgacgagtggttcgtggacagcctgaaccagaagatggaggtgcagagaagaccctggctggtgaagtacggcgacagcggcgagcagatcgccggcttcgtgaaggagttcagccacatcgccttcctgaccatcaagggcgccggccacatggtgcccaccgacaagcccctggccgccttcaccatgttcagcagattcctgaacaagcagccctactag

SEQ ID NO: 75715 - DNA, 1446 bp, synthetic construct
  misc_feature 1..1446: note = Description of Artificial Sequence: Synthetic coding sequence
  source 1..1446: mol_type = other DNA
atgaccagcagccccagagccccccccggcgagcagggcagaggcggcgccgagatgatcagagccgcccccccccccctgttcctgctgctgctgctgctgctgctgctggtgagctgggccagcagaggcgaggccgcccccgaccaggacgagatccagagactgcccggcctggccaagcagcccagcttcagacagtacagcggctacctgaagggcagcggcagcaagcacctgcactactggttcgtggagagccagaaggaccccgagaacagccccgtggtgctgtggctgaacggcggccccggctgcagcagcctggacggcctgctgaccgagcacggccccttcctgatcgccaacgtgctgtacctggagagccccgccggcgtgggcttcagctacagcgacgacaagttctacgccaccaacgacaccgaggtggcccagagcaacttcgaggccctgcaggacttcttcagactgttccccgagtacaagaacaacaagctgttcctgaccggcgagagctacgccggcatctacatccccaccctggccgtgctggtgatgcaggaccccagcatgaacctgcagggcctggccgtgggcaacggcctgagcagctacgagcagaacgacaacagcctggtgtacttcgcctactaccacggcctgctgggcaacagactgtggagcagcctgcagacccactgctgcagccagaacaagtgcaacttctacgacaacaaggacctggagtgcgtgaccaacctgcaggaggtggccagaatcgtgggcaacagcggcctgaacatctacaacctgtacgccccctgcgccggcggcgtgcccagccacttcagatacgagaaggacaccgtggtggtgcaggacctgggcaacatcttcaccagactgcccctgaagagaatgtggcaccaggccctgctgagaagcggcgacaaggtgagaatggaccccccctgcaccaacaccaccgccgccagcacctacctgaacaacccctacgtgagaaaggccctgaacatccccgagcagctgccccagtgggacatgtgcaacttcctggtgaacctgcagtacagaagactgtacagaagcatgaacagccagtacctgaagctgctgagcagccagaagtaccagatcctgctgtacaacggcgacgtggacatggcctgcaacttcatgggcgacgagtggttcgtggacagcctgaaccagaagatggaggtgcagagaagaccctggctggtgaagtacggcgacagcggcgagcagatcgccggcttcgtgaaggagttcagccacatcgccttcctgaccatcaagggcgccggccacatggtgcccaccgacaagcccctggccgccttcaccatgttcagcagattcctgaacaagcagccctactag

SEQ ID NO: 75716 - DNA, 870 bp, synthetic construct
  misc_feature 1..870: note = Description of Artificial Sequence: Synthetic coding sequence
  source 1..870: mol_type = other DNA
atgatcagagccgcccccccccccctgttcctgctgctgctgctgctgctgctgctggtgagctgggccagcagaggcgaggccgcccccgaccaggacgagatccagagactgcccggcctggccaagcagcccagcttcagacagtacagcggctacctgaagggcagcggcagcaagcacctgcactactggttcgtggagagccagaaggaccccgagaacagccccgtggtgctgtggctgaacggcggccccggctgcagcagcctggacggcctgctgaccgagcacggccccttcctggtgcagcccgacggcgtgaccctggagtacaacccctacagctggaacctgatcgccaacgtgctgtacctggagagccccgccggcgtgggcttcagctacagcgacgacaagttctacgccaccaacgacaccgaggtggcccagagcaacttcgaggccctgcaggacttcttcagactgttccccgagtacaagaacaacaagctgttcctgaccggcgagagctacgccggcatctacatccccaccctggccgtgctggtgatgcaggaccccagcatgaacctgcagggcctggccgtgggcaacggcctgagcagctacgagcagaacgacaacagcctggtgtacttcgcctactaccacggcctgctgggcaacagactgtggagcagcctgcagacccactgctgcagccagaacaagtgcaacttctacgacaacaaggacctggagtgcgtgaccaacctgcaggaggtggccagaatcgtgggcaacagcggcctgaacatctacaacctgtacgccccctgcgccggcggcgtgcccagccacttctag

SEQ ID NO: 75717 - DNA, 1497 bp, synthetic construct
  misc_feature 1..1497: note = Description of Artificial Sequence: Synthetic coding sequence
  source 1..1497: mol_type = other DNA
atgaccagcagccccagagccccccccggcgagcagggcagaggcggcgccgagatgatcagagccgcccccccccccctgttcctgctgctgctgctgctgctgctgctggtgagctgggccagcagaggcgaggccgcccccgaccaggacgagatccagagactgcccggcctggccaagcagcccagcttcagacagtacagcggctacctgaagggcagcggcagcaagcacctgcactactggttcgtggagagccagaaggaccccgagaacagccccgtggtgctgtggctgaacggcggccccggctgcagcagcctggacggcctgctgaccgagcacggccccttcctggtgcagcccgacggcgtgaccctggagtacaacccctacagctggaacctgatcgccaacgtgctgtacctggagagccccgccggcgtgggcttcagctacagcgacgacaagttctacgccaccaacgacaccgaggtggcccagagcaacttcgaggccctgcaggacttcttcagactgttccccgagtacaagaacaacaagctgttcctgaccggcgagagctacgccggcatctacatccccaccctggccgtgctggtgatgcaggaccccagcatgaacctgcagggcctggccgtgggcaacggcctgagcagctacgagcagaacgacaacagcctggtgtacttcgcctactaccacggcctgctgggcaacagactgtggagcagcctgcagacccactgctgcagccagaacaagtgcaacttctacgacaacaaggacctggagtgcgtgaccaacctgcaggaggtggccagaatcgtgggcaacagcggcctgaacatctacaacctgtacgccccctgcgccggcggcgtgcccagccacttcagatacgagaaggacaccgtggtggtgcaggacctgggcaacatcttcaccagactgcccctgaagagaatgtggcaccaggccctgctgagaagcggcgacaaggtgagaatggaccccccctgcaccaacaccaccgccgccagcacctacctgaacaacccctacgtgagaaaggccctgaacatccccgagcagctgccccagtgggacatgtgcaacttcctggtgaacctgcagtacagaagactgtacagaagcatgaacagccagtacctgaagctgctgagcagccagaagtaccagatcctgctgtacaacggcgacgtggacatggcctgcaacttcatgggcgacgagtggttcgtggacagcctgaaccagaagatggaggtgcagagaagaccctggctggtgaagtacggcgacagcggcgagcagatcgccggcttcgtgaaggagttcagccacatcgccttcctgaccatcaagggcgccggccacatggtgcccaccgacaagcccctggccgccttcaccatgttcagcagattcctgaacaagcagccctactag

SEQ ID NO: 75718 - DNA, 1038 bp, synthetic construct
  misc_feature 1..1038: note = Description of Artificial Sequence: Synthetic coding sequence
  source 1..1038: mol_type = other DNA
atgatcagagccgcccccccccccctgttcctgctgctgctgctgctgctgctgctggtgagctgggccagcagaggcgaggccgcccccgaccaggacgagatccagagactgcccggcctggccaagcagcccagcttcagacagtacagcggctacctgaagggcagcggcagcaagcacctgcactactggttcgtggagagccagaaggaccccgagaacagccccgtggtgctgtggctgaacggcggccccggctgcagcagcctggacggcctgctgaccgagcacggccccttcctgatcgccaacgtgctgtacctggagagccccgccggcgtgggcttcagctacagcgacgacaagttctacgccaccaacgacaccgaggtggcccagagcaacttcgaggccctgcaggacttcttcagactgttccccgagtacaagaacaacaagctgttcctgaccggcgagagctacgccggcatctacatccccaccctggccgtgctggtgatgcaggaccccagcatgaacctgcagggcctggccgtgggcaacggcctgagcagctacgagcagaacgacaacagcctggtgtacttcgcctactaccacggcctgctgggcaacagactgtggagcagcctgcagacccactgctgcagccagaacaagtgcaacttctacgacaacaaggacctggagtgcgtgaccaacctgcaggaggtggccagaatcgtgggcaacagcggcctgaacatctacaacctgtacgccccctgcgccggcggcgtgcccagccacttcagatacgagaaggacaccgtggtggtgcaggacctgggcaacatcttcaccagactgcccctgaagagaatgtggcaccaggccctgctgagaagcggcgacaaggtgagaatggaccccccctgcaccaacaccaccgccgccagcacctacctgaacaacccctacgtgagaaaggccctgaacatccccgagcagctgccccagtgggacatgtgctag

SEQ ID NO: 75719 - DNA, 1149 bp, synthetic construct
  misc_feature 1..1149: note = Description of Artificial Sequence: Synthetic coding sequence
  source 1..1149: mol_type = other DNA
atgatgttccccggcctgctggccccccccgccggctaccccagcctgctgagacccacccccaccctgaccctgccccagagcctgcagagcgccttcagcggccacagcagcttcctggtggaggacctgatcagaatcagcagaccccccgcctacctgcccagaagcgtgcccaccgccagcatgagcccccccagacagggcgcccccaccgccctgaccgacaccggcgccagcgacctgggcagccccggccccggcagcagaagaggcggcagcccccccaccgccttcagccccgccagcgagaccaccttcctgaagttcggcgtgaacgccatcctgagcagcggccccagaaccgagaccagccccgccctgctgcagagcgtgccccccaagaccttcgccttcccctacttcgagggcagcttccagcccttcatcagaagcagctacttccccgccagcagcagcgtggtgcccatccccggcaccttcagctggcccctggccgccagaggcaagcccagaagaggcatgctgagaagagccgtgttcagcgacgtgcagagaaaggccctggagaagatgttccagaagcagaagtacatcagcaagcccgacagaaagaagctggccgccaagctgggcctgaaggacagccaggacaccgccagaagaaccgagcccgcccccgacagcacccccagacccagagccagccccggcgcccccgacctgaccagcgccagccccttcttcagccccgccggcaccttccaggtgaagatctggttccagaacagaagaatgaagtggagaaacagcaaggagagagagctgctgagcagcggcggctgcagagagcagaccctgcccaccaagctgaacccccaccccgacctgagcgacgtgggccagaagggccccggcaacgaggaggaggaggagggccccggcagccccagccacagactggcctaccacgccagcagcgacccccagcacctgagagaccccagactgcccggccccctgccccccagccccgcccacagcagcagccccggcaagcccagcgacttcagcgacagcgaggaggaggaggagggcgaggagcaggaggagatcaccgtgagctag

SEQ ID NO: 75720 - DNA, 1341 bp, synthetic construct
  misc_feature 1..1341: note = Description of Artificial Sequence: Synthetic coding sequence
  source 1..1341: mol_type = other DNA
atgggcgccggccccagctgcgacacccccgccaactgcacctacctggacctgctgggcacctgggtgttccaggtgggcagcagcggcagccagagagacgtgaactgcagcgtgatgggcccccaggagaagaaggtggtggtgtacctgcagaagctggacaccgcctacgacgacctgggcaacagcggccacttcaccatcatctacaaccagggcttcgagatcgtgctgaacgactacaagtggttcgccttcttcaagtacaaggaggagggcagcaaggtgaccacctactgcaacgagaccatgaccggctgggtgcacgacgtgctgggcagaaactgggcctgcttcaccggcaagaaggtgggcaccgccagcgagaacgtgtacgtgaacatcgcccacctgaagaacagccaggagaagtacagcaacagactgtacaagtacgaccacaacttcgtgaaggccatcaacgccatccagaagagctggaccgccaccacctacatggagtacgagaccctgaccctgggcgacatgatcagaagaagcggcggccacagcagaaagatccccagacccaagcccgcccccctgaccgccgagatccagcagaagatcctgcacctgcccaccagctgggactggagaaacgtgcacggcatcaacttcgtgagccccgtgagaaaccaggccagctgcggcagctgctacagcttcgccagcatgggcatgctggaggccagaatcagaatcctgaccaacaacagccagacccccatcctgagcccccaggaggtggtgagctgcagccagtacgcccagggctgcgagggcggcttcccctacctgatcgccggcaagtacgcccaggacttcggcctggtggaggaggcctgcttcccctacaccggcaccgacagcccctgcaagatgaaggaggactgcttcagatactacagcagcgagtaccactacgtgggcggcttctacggcggctgcaacgaggccctgatgaagctggagctggtgcaccacggccccatggccgtggccttcgaggtgtacgacgacttcctgcactacaagaagggcatctaccaccacaccggcctgagagaccccttcaaccccttcgagctgaccaaccacgccgtgctgctggtgggctacggcaccgacagcgccagcggcatggactactggatcgtgaagaacagctggggcaccggctggggcgagaacggctacttcagaatcagaagaggcaccgacgagtgcgccatcgagagcatcgccgtggccgccacccccatccccaagctgtag

SEQ ID NO: 75721 - DNA, 414 bp, synthetic construct
  misc_feature 1..414: note = Description of Artificial Sequence: Synthetic coding sequence
  source 1..414: mol_type = other DNA
atgggcgccggccccagcctgctgctggccgccctgctgctgctgctgagcggcgacggcgccgtgagatgcgacacccccgccaactgcacctacctggacctgctgggcacctgggtgttccaggtgggcagcagcggcagccagagagacgtgaactgcagcgtgatgggcccccaggagaagaaggtggtggtgtacctgcagaagctggacaccgcctacgacgacctgggcaacagcggccacttcaccatcatctacaaccagggcttcgagatcgtgctgaacgactacaagtggttcgccttcttcaaggacgtgaccgacttcatcagccacctgttcatgcagctgggcaccgtgggcatctacgacctgccccacctgagaaacaagctggtgatcaagtag

SEQ ID NO: 75722 - DNA, 426 bp, synthetic construct
  misc_feature 1..426: note = Description of Artificial Sequence: Synthetic coding sequence
  source 1..426: mol_type = other DNA
atgggcgccggccccagcctgctgctggccgccctgctgctgctgctgagcggcgacggcgccgtgagatgcgacacccccgccaactgcacctacctggacctgctgggcacctgggtgttccaggtgggcagcagcggcagccagagagacgtgaactgcagcgtgatgggcccccaggagaagaaggtggtggtgtacctgcagaagctggacaccgcctacgacgacctgggcaacagcggccacttcaccatcatctacaaccagggcttcgagatcgtgctgaacgactacaagtggttcgccttcttcaaggacgtgaccgacttcatcagccacctgttcatgcagctgggcaccgtgggcatctacgacctgccccacctgagaaacaagctggccatgaacagaagatggggctag

SEQ ID NO: 75723 - DNA, 1191 bp, synthetic construct
  misc_feature 1..1191: note = Description of Artificial Sequence: Synthetic coding sequence
  source 1..1191: mol_type = other DNA
atgaagaccctgctgctgctgctgctggtgctgctggagctgggcgaggcccagggcagcctgcacagagtgcccctgagaagacaccccagcctgaagaagaagctgagagccagaagccagctgagcgagttctggaagagccacaacctggacatgatccagttcaccgagagctgcagcatggaccagagcgccaaggagcccctgatcaactacctggacatggagtacttcggcaccatcagcatcggcagccccccccagaacttcaccgtgatcttcgacaccggcagcagcaacctgtgggtgcccagcgtgtactgcaccagccccgcctgcaagacccacagcagattccagcccagccagagcagcacctacagccagcccggccagagcttcagcatccagtacggcaccggcagcctgagcggcatcatcggcgccgaccaggtgagcgtggagggcctgaccgtggtgggccagcagttcggcgagagcgtgaccgagcccggccagaccttcgtggacgccgagttcgacggcatcctgggcctgggctaccccagcctggccgtgggcggcgtgacccccgtgttcgacaacatgatggcccagaacctggtggacctgcccatgttcagcgtgtacatgagcagcaaccccgagggcggcgccggcagcgagctgatcttcggcggctacgaccacagccacttcagcggcagcctgaactgggtgcccgtgaccaagcaggcctactggcagatcgccctggacaacatccaggtgggcggcaccgtgatgttctgcagcgagggctgccaggccatcgtggacaccggcaccagcctgatcaccggccccagcgacaagatcaagcagctgcagaacgccatcggcgccgcccccgtggacggcgagtacgccgtggagtgcgccaacctgaacgtgatgcccgacgtgaccttcaccatcaacggcgtgccctacaccctgagccccaccgcctacaccctgctggacttcgtggacggcatgcagttctgcagcagcggcttccagggcctggacatccacccccccgccggccccctgtggatcctgggcgacgtgttcatcagacagttctacagcgtgttcgacagaggcaacaacagagtgggcctggcccccgccgtgccctag

SEQ ID NO: 75724 - DNA, 1092 bp, synthetic construct
  misc_feature 1..1092: note = Description of Artificial Sequence: Synthetic coding sequence
  source 1..1092: mol_type = other DNA
atgaagaccctgctgctgctgctgctggtgctgctggagctgggcgaggcccagggcagcctgcacagagtgcccctgagaagacaccccagcctgaagaagaagctgagagccagaagccagctgagcgagttctggaagagccacaacctggacatgatccagttcaccgagagctgcagcatggaccagagcgccaaggagcccctgatcaactacctggacatggagtacttcggcaccatcagcatcggcagccccccccagaacttcaccgtgatcttcgacaccggcagcagcaacctgtgggtgcccagcgtgtactgcaccagccccgcctgcaagacccacagcagattccagcccagccagagcagcacctacagccagcccggccagagcttcagcatccagtacggcaccggcagcctgagcggcatcatcggcgccgaccaggtgagcgtggagggcctgaccgtggtgggccagcagttcggcgagagcgtgaccgagcccggccagaccttcgtggacgccgagttcgacggcatcctgggcctgggctaccccagcctggccgtgggcggcgtgacccccgtgttcgacaacatgatggcccagaacctggtggacctgcccatgttcagcgtgtacatgagcagcaaccccgagggcggcgccggcagcgagctgatcttcggcggctacgaccacagccacttcagcggcagcctgaactgggtgcccgtgaccaagcaggcctactggcagatcgccctggacaacatgctgtggagcgtgcccaccctgaccagctgcagaatgagccccagccccctgaccgagagccccatccccagcgcccagctgcccaccccctactggaccagctggatggagtgcagcagcgccgccgtggccttcaaggacctgaccagcaccctgcagctgggccccagcggcagctggggcatgagcagcttcgacagcttcacccagagcctgaccgtgggcatcaccgtgtgggactggccccagcagagccccaaggagggcccctgcgtgtgcgcctgcctgagcgacagaccctag

SEQ ID NO: 75725 - DNA, 1206 bp, synthetic construct
  misc_feature 1..1206: note = Description of Artificial Sequence: Synthetic coding sequence
  source 1..1206: mol_type = other DNA
atgaagaccctgctgctgctgctgctggtgctgctggagctgggcgaggcccagggcagcctgcacagagtgcccctgagaagacaccccagcctgaagaagaagctgagagccagaagccagctgagcgagttctggaagagccacaacctggacatgatccagttcaccgagagctgcagcatggaccagagcgccaaggagcccctgatcaactacctggacatggagtacttcggcaccatcagcatcggcagccccccccagaacttcaccgtgatcttcgacaccggcagcagcaacctgtgggtgcccagcgtgtactgcaccagccccgcctgcaagacccacagcagattccagcccagccagagcagcacctacagccagcccggccagagcttcagcatccagtacggcaccggcagcctgagcggcatcatcggcgccgaccaggtgagcgccttcagctaccaggtggagggcctgaccgtggtgggccagcagttcggcgagagcgtgaccgagcccggccagaccttcgtggacgccgagttcgacggcatcctgggcctgggctaccccagcctggccgtgggcggcgtgacccccgtgttcgacaacatgatggcccagaacctggtggacctgcccatgttcagcgtgtacatgagcagcaaccccgagggcggcgccggcagcgagctgatcttcggcggctacgaccacagccacttcagcggcagcctgaactgggtgcccgtgaccaagcaggcctactggcagatcgccctggacaacatccaggtgggcggcaccgtgatgttctgcagcgagggctgccaggccatcgtggacaccggcaccagcctgatcaccggccccagcgacaagatcaagcagctgcagaacgccatcggcgccgcccccgtggacggcgagtacgccgtggagtgcgccaacctgaacgtgatgcccgacgtgaccttcaccatcaacggcgtgccctacaccctgagccccaccgcctacaccctgctggacttcgtggacggcatgcagttctgcagcagcggcttccagggcctggacatccacccccccgccggccccctgtggatcctgggcgacgtgttcatcagacagttctacagcgtgttcgacagaggcaacaacagagtgggcctggcccccgccgtgccctag

SEQ ID NO: 75726 - DNA, 867 bp, synthetic construct
  misc_feature 1..867: note = Description of Artificial Sequence: Synthetic coding sequence
  source 1..867: mol_type = other DNA
atggagtacttcggcaccatcagcatcggcagccccccccagaacttcaccgtgatcttcgacaccggcagcagcaacctgtgggtgcccagcgtgtactgcaccagccccgcctgcaagacccacagcagattccagcccagccagagcagcacctacagccagcccggccagagcttcagcatccagtacggcaccggcagcctgagcggcatcatcggcgccgaccaggtgagcgtggagggcctgaccgtggtgggccagcagttcggcgagagcgtgaccgagcccggccagaccttcgtggacgccgagttcgacggcatcctgggcctgggctaccccagcctggccgtgggcggcgtgacccccgtgttcgacaacatgatggcccagaacctggtggacctgcccatgttcagcgtgtacatgagcagcaaccccgagggcggcgccggcagcgagctgatcttcggcggctacgaccacagccacttcagcggcagcctgaactgggtgcccgtgaccaagcaggcctactggcagatcgccctggacaacatgctgtggagcgtgcccaccctgaccagctgcagaatgagccccagccccctgaccgagagccccatccccagcgcccagctgcccaccccctactggaccagctggatggagtgcagcagcgccgccgtggccttcaaggacctgaccagcaccctgcagctgggccccagcggcagctggggcatgagcagcttcgacagcttcacccagagcctgaccgtgggcatcaccgtgtgggactggccccagcagagccccaaggagggcccctgcgtgtgcgcctgcctgagcgacagaccctag

SEQ ID NO: 75727 - DNA, 1455 bp, synthetic construct
  misc_feature 1..1455: note = Description of Artificial Sequence: Synthetic coding sequence
  source 1..1455: mol_type = other DNA
atggccccctggctgcagctgctgagcctgctgggcctgctgcccggcgccgtggccgcccccgcccagcccagagccgccagcttccaggcctggggcccccccagccccgagctgctggcccccaccagattcgccctggagatgttcaacagaggcagagccgccggcaccagagccgtgctgggcctggtgagaggcagagtgagaagagccggccagggcagcctgtacagcctggaggccaccctggaggagcccccctgcaacgaccccatggtgtgcagactgcccgtgagcaagaagaccctgctgtgcagcttccaggtgctggacgagctgggcagacacgtgctgctgagaaaggactgcggccccgtggacaccaaggtgcccggcgccggcgagcccaagagcgccttcacccagggcagcgccatgatcagcagcctgagccagaaccaccccgacaacagaaacgagaccttcagcagcgtgatcagcctgctgaacgaggaccccctgagccaggacctgcccgtgaagatggccagcatcttcaagaacttcgtgatcacctacaacagaacctacgagagcaaggaggaggccagatggagactgagcgtgttcgtgaacaacatggtgagagcccagaagatccaggccctggacagaggcaccgcccagtacggcgtgaccaagttcagcgacctgaccgaggaggagttcagaaccatctacctgaacaccctgctgagaaaggagcccggcaacaagatgaagcaggccaagagcgtgggcgacctggccccccccgagtgggactggagaagcaagggcgccgtgaccaaggtgaaggaccagggcatgtgcggcagctgctgggccttcagcgtgaccggcaacgtggagggccagtggttcctgaaccagggcaccctgctgagcctgagcgagcaggagctgctggactgcgacaagatggacaaggcctgcatgggcggcctgcccagcaacgcctacagcgccatcaagaacctgggcggcctggagaccgaggacgactacagctaccagggccacatgcagagctgcaacttcagcgccgagaaggccaaggtgtacatcaacgacagcgtggagctgagccagaacgagcagaagctggccgcctggctggccaagagaggccccatcagcgtggccatcaacgccttcggcatgcagttctacagacacggcatcagcagacccctgagacccctgtgcagcccctggctgatcgaccacgccgtgctgctggtgggctacggcaacagaagcgacgtgcccttctgggccatcaagaacagctggggcaccgactggggcgagaagggctactactacctgcacagaggcagcggcgcctgcggcgtgaacaccatggccagcagcgccgtggtggactag

SEQ ID NO: 75728 - DNA, 675 bp, synthetic construct
  misc_feature 1..675: note = Description of Artificial Sequence: Synthetic coding sequence
  source 1..675: mol_type = other DNA
atggccgccgccgtgccccagagagcctggaccgtggagcagctgagaagcgagcagctgcccaagaaggacatcatcaagttcctgcaggagcacggcagcgacagcttcctggccgagcacaagctgctgggcaacatcaagaacgtggccaagaccgccaacaaggaccacctggtgaccgcctacaaccacctgttcgagaccaagagattcaagggcaccgagagcatcagcaaggtgagcgagcaggtgaagaacgtgaagctgaacgaggacaagcccaaggagaccaagagcgaggagaccctggacgagggcccccccaagtacaccaagagcgtgctgaagaagggcgacaagaccaacttccccaagaagggcgacgtggtgcactgctggtacaccggcaccctgcaggacggcaccgtgttcgacaccaacatccagaccagcgccaagaagaagaagaacgccaagcccctgagcttcaaggtgggcgtgggcaaggtgatcagaggctgggacgaggccctgctgaccatgagcaagggcgagaaggccagactggagatcgagcccgagtgggcctacggcaagaagggccagcccgacgccaagatcccccccaacgccaagctgaccttcgaggtggagctggtggacatcgactag

SEQ ID NO: 75729 - DNA, 801 bp, synthetic construct
  misc_feature 1..801: note = Description of Artificial Sequence: Synthetic coding sequence
  source 1..801: mol_type = other DNA
atgagcagcgtgttcggcaagcccagagccggcagcggcccccagagcgcccccctggaggtgaacctggccatcctgggcagaagaggcgccggcaagagcgccctgaccgtgaagttcctgaccaagagattcatcagcgagtacgaccccaacctggaggacacctacagcagcgaggagaccgtggaccaccagcccgtgcacctgagagtgatggacaccgccgacctggacacccccagaaactgcgagagatacctgaactgggcccacgccttcctggtggtgtacagcgtggacagcagacagagcttcgacagcagcagcagctacctggagctgctggccctgcacgccaaggagacccagagaagcatccccgccctgctgctgggcaacaagctggacatggcccagtacagacaggtgaccaaggccgagggcgtggccctggccggcagattcggctgcctgttcttcgaggtgagcgcctgcctggacttcgagcacgtgcagcacgtgttccacgaggccgtgagagaggccagaagagagctggagaagagccccctgaccagacccctgttcatcagcgaggagagagccctgccccaccaggcccccctgaccgccagacacggcctggccagctgcaccttcaacaccctgagcaccatcaacctgaaggagatgcccaccgtggcccaggccaagctggtgaccgtgaagagcagcagagcccagagcaagagaaaggcccccaccctgaccctgctgaagggcttcaagatcttctag

SEQ ID NO: 75730 - DNA, 972 bp, synthetic construct
  misc_feature 1..972: note = Description of Artificial Sequence: Synthetic coding sequence
  source 1..972: mol_type = other DNA
atgtgggccaccctgcccctgctgtgcgccgccgagctgtgcgtgaacagcctggagaagttccacttcaagagctggatgagcaagcacagaaagacctacagcaccgaggagtaccaccacagactgcagaccttcgccagcaactggagaaagatcaacgcccacaacaacggcaaccacaccttcaagatggccctgaaccagttcagcgacatgagcttcgccgagatcaagcacaagtacctgtggagcgagccccagaactgcagcgccaccaagagcaactacctgagaggcaccggcccctacccccccagcgtggactggagaaagaagggcaacttcgtgagccccgtgaagaaccagggcgcctgcggcagctgctggaccttcagcaccaccggcgccctggagagcgccatcgccatcgccaccggcaagatgctgagcctggccgagcagcagctggtggactgcgcccaggacttcaacaaccacggctgccagggcggcctgcccagccaggccttcgagtacatcctgtacaacaagggcatcatgggcgaggacacctacccctaccagggcaaggacggctactgcaagttccagcccggcaaggccatcggcttcgtgaaggacgtggccaacatcaccatctacgacgaggaggccatggtggaggccgtggccctgtacaaccccgtgagcttcgccttcgaggtgacccaggacttcatgatgtacagaaccggcatctacagcagcaccagctgccacaagacccccgacaaggtgaaccacgccgtgctggccgtgggctacggcgagaagaacggcatcccctactggatcgtgaagaacagctggggcccccagtggggcatgaacggctacttcctgatcgagagaggcaagaacatgtgcggcctggccgcctgcgccagctaccccatccccctggtgtag

SEQ ID NO: 75731 - DNA, 621 bp, synthetic construct
  misc_feature 1..621: note = Description of Artificial Sequence: Synthetic coding sequence
  source 1..621: mol_type = other DNA
atgtgggccaccctgcccctgctgtgcgccggcgcctggctgctgggcgtgcccgtgtgcggcgccgccgagctgtgcgtgaacagcctggagaagttccacttcaagagctggatgagcaagcacagaaagacctacagcaccgaggagtaccaccacagactgcagaccttcgccagcaactggagaaagatcaacgcccacaacaacggcaaccacaccttcaagatggccctgaaccagttcagcgacatgagcttcgccgagatcaagcacaagtacctgtggagcgagccccagaactgcagcgccaccaagagcaactacctgagaggcaccggcccctacccccccagcgtggactggagaaagaagggcaacttcgtgagccccgtgaagaaccaggtgtgcctggccatcagcatcctgagcctgcagaacggccacacccccagacagtacaccagaaagaacaacagcaagggcccccagaaccaccacaagcacatccccgccagcgtgagcagcagacacctgagccccggcagacccagcctgccccagctgagagagatctgcgagggcaagagactgggcgaggccagcgtgaacctgggctag

SEQ ID NO: 75732 - DNA, 990 bp, synthetic construct
  misc_feature 1..990: note = Description of Artificial Sequence: Synthetic coding sequence
  source 1..990: mol_type = other DNA
atgtggggcctgaaggtgctgctgctgcccgtggtgagcttcgccctgtaccccgaggagatcctggacacccactgggagctgtggaagaagacccacagaaagcagtacaacaacaaggtggacgagatcagcagaagactgatctgggagaagaacctgaagtacatcagcatccacaacctggaggccagcctgggcgtgcacacctacgagctggccatgaaccacctgggcgacatgaccagcgaggaggtggtgcagaagatgaccggcctgaaggtgcccctgagccacagcagaagcaacgacaccctgtacatccccgagtgggagggcagagcccccgacagcgtggactacagaaagaagggctacgtgacccccgtgaagaaccagggccagtgcggcagctgctgggccttcagcagcgtgggcgccctggagggccagctgaagaagaagaccggcaagctgctgaacctgagcccccagaacctggtggactgcgtgagcgagaacgacggctgcggcggcggctacatgaccaacgccttccagtacgtgcagaagaacagaggcatcgacagcgaggacgcctacccctacgtgggccaggaggagagctgcatgtacaaccccaccggcaaggccgccaagtgcagaggctacagagagatccccgagggcaacgagaaggccctgaagagagccgtggccagagtgggccccgtgagcgtggccatcgacgccagcctgaccagcttccagttctacagcaagggcgtgtactacgacgagagctgcaacagcgacaacctgaaccacgccgtgctggccgtgggctacggcatccagaagggcaacaagcactggatcatcaagaacagctggggcgagaactggggcaacaagggctacatcctgatggccagaaacaagaacaacgcctgcggcatcgccaacctggccagcttccccaagatgtag

SEQ ID NO: 75733 - DNA, 777 bp, synthetic construct
  misc_feature 1..777: note = Description of Artificial Sequence: Synthetic coding sequence
  source 1..777: mol_type = other DNA
atgcacaaggagaacgaggagatctacaacgtgagcgagaacagaaagcactgccccatcttcccctgccccctgctgaccagaagcggcaaggtgcccgagttcagacacgagagagaggagagactggaggagatgatcagaagacagaacctggacggcaacctgagcttcgtgatgtggggcctgaaggtgctgctgctgcccgtggtgagcttcgccctgtaccccgaggagatcctggacacccactgggagctgtggaagaagacccacagaaagcagtacaacaacaaggtggacgagatcagcagaagactgatctgggagaagaacctgaagtacatcagcatccacaacctggaggccagcctgggcgtgcacacctacgagctggccatgaaccacctgggcgacatgaccagcgaggaggtggtgcagaagatgaccggcctgaaggtgcccctgagccacagcagaagcaacgacaccctgtacatccccgagtgggagggcagagcccccgacagcgtggactacagaaagaagggctacgtgacccccgtgaagaaccagggccagtgcggcagctgctgggccttcagcagcgtgggcgccctggagggccagctgaagaagaagaccggcaagctgctgaacctgagcccccagaacctggtggactgcgtgagcgagaacgacggctgcggcggcggctacatgaccaacgccttccagtacgtgcagaagaacagaggcatcgacagcgaggactag

SEQ ID NO: 75734 - DNA, 1005 bp, synthetic construct
  misc_feature 1..1005: note = Description of Artificial Sequence: Synthetic coding sequence
  source 1..1005: mol_type = other DNA
atgaacctgagcctggtgctggccgccttctgcctgggcatcgccagcgccgtgcccaagttcgaccagaacctggacaccaagtggtaccagtggaaggccacccacagaagactgtacggcgccaacgaggagggctggagaagagccgtgtgggagaagaacatgaagatgatcgagctgcacaacggcgagtacagccagggcaagcacggcttcaccatggccatgaacgccttcggcgacatgaccaacgaggagttcagacagatgatgggctgcttcagaaaccagaagttcagaaagggcaaggtgttcagagagcccctgttcctggacctgcccaagagcgtggactggagaaagaagggctacgtgacccccgtgaagaaccagaagcagtgcggcagctgctgggccttcagcgccaccggcgccctggagggccagatgttcagaaagaccggcaagctggtgagcctgagcgagcagaacctggtggactgcagcagaccccagggcaaccagggctgcaacggcggcttcatggccagagccttccagtacgtgaaggagaacggcggcctggacagcgaggagagctacccctacgtggccgtggacgagatctgcaagtacagacccgagaacagcgtggccaacgacaccggcttcaccgtggtggcccccggcaaggagaaggccctgatgaaggccgtggccaccgtgggccccatcagcgtggccatggacgccggccacagcagcttccagttctacaagagcggcatctacttcgagcccgactgcagcagcaagaacctggaccacggcgtgctggtggtgggctacggcttcgagggcgccaacagcaacaacagcaagtactggctggtgaagaacagctggggccccgagtggggcagcaacggctacgtgaagatcgccaaggacaagaacaaccactgcggcatcgccaccgccgccagctaccccaacgtgtag

SEQ ID NO: 75735 - DNA, 1005 bp, synthetic construct; identical to SEQ ID NO: 75734
  misc_feature 1..1005: note = Description of Artificial Sequence: Synthetic coding sequence
  source 1..1005: mol_type = other DNA

SEQ ID NO: 75736 - DNA, 996 bp, synthetic construct
  misc_feature 1..996: note = Description of Artificial Sequence: Synthetic coding sequence
  source 1..996: mol_type = other DNA
atgaagagactggtgtgcgtgctgctggtgtgcagcagcgccgtggcccagctgcacaaggaccccaccctggaccaccactggcacctgtggaagaagacctacggcaagcagtacaaggagaagaacgaggaggccgtgagaagactgatctgggagaagaacctgaagttcgtgatgctgcacaacctggagcacagcatgggcatgcacagctacgacctgggcatgaaccacctgggcgacatgaccagcgaggaggtgatgagcctgatgagcagcctgagagtgcccagccagtggcagagaaacatcacctacaagagcaaccccaacagaatcctgcccgacagcgtggactggagagagaagggctgcgtgaccgaggtgaagtaccagggcagctgcggcgcctgctgggccttcagcgccgtgggcgccctggaggcccagctgaagctgaagaccggcaagctggtgagcctgagcgcccagaacctggtggactgcagcaccgagaagtacggcaacaagggctgcaacggcggcttcatgaccaccgccttccagtacatcatcgacaacaagggcatcgacagcgacgccagctacccctacaaggccatggaccagaagtgccagtacgacagcaagtacagagccgccacctgcagcaagtacaccgagctgccctacggcagagaggacgtgctgaaggaggccgtggccaacaagggccccgtgagcgtgggcgtggacgccagacaccccagcttcttcctgtacagaagcggcgtgtactacgagcccagctgcacccagaacgtgaaccacggcgtgctggtggtgggctacggcgacctgaacggcaaggagtactggctggtgaagaacagctggggccacaacttcggcgaggagggctacatcagaatggccagaaacaagggcaaccactgcggcatcgccagcttccccagctaccccgagatctag

SEQ ID NO: 75737 - DNA, 846 bp, synthetic construct
  misc_feature 1..846: note = Description of Artificial Sequence: Synthetic coding sequence
  source 1..846: mol_type = other DNA
atgaagagactggtgtgcgtgctgctggtgtgcagcagcgccgtggcccagctgcacaaggaccccaccctggaccaccactggcacctgtggaagaagacctacggcaagcagtacaaggagaagaacgaggaggccgtgagaagactgatctgggagaagaacctgaagttcgtgatgctgcacaacctggagcacagcatgggcatgcacagctacgacctgggcatgaaccacctgggcgacatgggcagctgcggcgcctgctgggccttcagcgccgtgggcgccctggaggcccagctgaagctgaagaccggcaagctggtgagcctgagcgcccagaacctggtggactgcagcaccgagaagtacggcaacaagggctgcaacggcggcttcatgaccaccgccttccagtacatcatcgacaacaagggcatcgacagcgacgccagctacccctacaaggccatggaccagaagtgccagtacgacagcaagtacagagccgccacctgcagcaagtacaccgagctgccctacggcagagaggacgtgctgaaggaggccgtggccaacaagggccccgtgagcgtgggcgtggacgccagacaccccagcttcttcctgtacagaagcggcgtgtactacgagcccagctgcacccagaacgtgaaccacggcgtgctggtggtgggctacggcgacctgaacggcaaggagtactggctggtgaagaacagctggggccacaacttcggcgaggagggctacatcagaatggccagaaacaagggcaaccactgcggcatcgccagcttccccagctaccccgagatctag

SEQ ID NO: 75738 - DNA, 1131 bp, synthetic construct
  misc_feature 1..1131: note = Description of Artificial Sequence: Synthetic coding sequence
  source 1..1131: mol_type = other DNA
atggccctgaccgcccaccccagctgcctgctggccctgctggtggccggcctggcccagggcatcagaggccccctgagagcccaggacctgggcccccagcccctggagctgaaggaggccttcaagctgttccagatccagttcaacagaagctacctgagccccgaggagcacgcccacagactggacatcttcgcccacaacctggcccaggcccagagactgcaggaggaggacctgggcaccgccgagttcggcgtgacccccttcagcgacctgaccgaggaggagttcggccagctgtacggctacagaagagccgccggcggcgtgcccagcatgggcagagagatcagaagcgaggagcccgaggagagcgtgcccttcagctgcgactggagaaaggtggccagcgccatcagccccatcaaggaccagaagaactgcaactgctgctgggccatggccgccgccggcaacatcgagaccctgtggagaatcagcttctgggacttcgtggacgtgagcgtgcaggagctgctggactgcggcagatgcggcgacggctgccacggcggcttcgtgtgggacgccttcatcaccgtgctgaacaacagcggcctggccagcgagaaggactaccccttccagggcaaggtgagagcccacagatgccaccccaagaagtaccagaaggtggcctggatccaggacttcatcatgctgcagaacaacgagcacagaatcgcccagtacctggccacctacggccccatcaccgtgaccatcaacatgaagcccctgcagctgtacagaaagggcgtgatcaaggccacccccaccacctgcgacccccagctggtggaccacagcgtgctgctggtgggcttcggcagcgtgaagagcgaggagggcatctgggccgagaccgtgagcagccagagccagccccagcccccccaccccaccccctactggatcctgaagaacagctggggcgcccagtggggcgagaagggctacttcagactgcacagaggcagcaacacctgcggcatcaccaagttccccctgaccgccagagtgcagaagcccgacatgaagcccagagtgagctgccccccctag

SEQ ID NO: 75739 - DNA, 2679 bp, synthetic construct
  misc_feature 1..2679: note = Description of Artificial Sequence: Synthetic coding sequence
  source 1..2679: mol_type = other DNA
atgaccgaccccttctgcgtgggcggcagaagactgcccggcagcagcaagagcggccccggcaaggacggcagcagaaaggaggtgagactgcccatgctgcacgacccccccaagatgggcatgcccgtggtgagaggcggccagaccgtgcccggccaggcccccctgtgcttcgaccccggcagccccgccagcgacaagaccgagggcaagaagaagggcagacccaaggccgagaaccaggccctgagagacatccccctgagcctgatgaacgactggaaggacgagttcaaggcccacagcagagtgaagtgccccaacagcggctgctggctggagttccccagcatctacggcctgaagtaccactaccagagatgccagggcggcgccatcagcgacagactggccttcccctgccccttctgcgaggccgccttcaccagcaagacccagctggagaagcacagaatctggaaccacatggacagacccctgcccgccagcaagcccggccccatcagcagacccgtgaccatcagcagacccgtgggcgtgagcaagcccatcggcgtgagcaagcccgtgaccatcggcaagcccgtgggcgtgagcaagcccatcggcatcagcaagcccgtgagcgtgggcagacccatgcccgtgaccaaggccatccccgtgaccagacccgtgcccgtgaccaagcccgtgaccgtgagcagacccatgcccgtgaccaaggccatgcccgtgaccaagcccatcaccgtgaccaagagcgtgcccgtgaccaagcccgtgcccgtgaccaagcccatcaccgtgaccaagctggtgaccgtgaccaagcccgtgcccgtgaccaagcccgtgaccgtgagcagacccatcgtggtgagcaagcccgtgaccgtgagcagacccatcgccatcagcagacacacccccccctgcaagatggtgctgctgaccagaagcgagaacaaggcccccagagccaccggcagaaacagcggcaagaagagagccgccgacagcctggacacctgccccatcccccccaagcaggccagacccgagaacggcgagtacggccccagcagcatgggccagagcagcgccttccagctgagcgccgacaccagcagcggcagcctgagccccggcagcagacccagcggcggcatggaggccctgaaggccgccggccccgccagcccccccgaggaggaccccgagagaaccaagcacagaagaaagcagaagacccccaagaagttcaccggcgagcagcccagcatcagcggcaccttcggcctgaagggcctggtgaaggccgaggacaaggccagagtgcacagaagcaagaagcaggagggccccggccccgaggacgccagaaagaaggtgcccgccgcccccatcaccgtgagcaaggaggcccccgcccccgtggcccaccccgcccccggcggccccgaggagcagtggcagagagccatccacgagagaggcgaggccgtgtgccccacctgcaacgtggtgaccagaaagaccctggtgggcctgaagaagcacatggaggtgtgccagaagctgcaggacgccctgaagtgccagcactgcagaaagcagttcaagagcaaggccggcctgaactaccacaccatggccgagcacagcgccaagcccagcgacgccgaggccagcgagggcggcgagcaggaggagagagagagactgagaaaggtgctgaagcagatgggcagactgagatgcccccaggagggctgcggcgccgccttcagcagcctgatgggctaccagtaccaccagagaagatgcggcaagcccccctgcgaggtggacagccccagcttcccctgcacccactgcggcaagacctacagaagcaaggccggccacgactaccacgtgagaagcgagcacaccgcccccccccccgaggagcccaccgacaagagccccgaggccgaggaccccctgggcgtggagagaacccccagcggcagagtgagaagaaccagcgcccaggtggccgtgttccacctgcaggagatcgccgaggacgagctggccagagactggaccaagagaagaatgaaggacgacctggtgcccgagaccgccagactgaactacaccagacccggcctgcccaccctgaacccccagctgctggaggcctggaagaacgaggtgaaggagaagggccacgtgaactgccccaacgactgctgcgaggccatctacagcagcgtgagcggcctgaaggcccacctggccagctgcagcaagggcgcccacctggccggcaagtacagatgcctgctgtgccccaaggagttcagcagcgagagcggcgtgaagtaccacatcctgaagacccacgccgagaactggttcagaaccagcgccgaccccccccccaagcacagaagccaggacagcctggtgcccaagaaggagaagaagaagaacctggccggcggcaagaagagaggcagaaagcccaaggagagaacccccgaggagcccgtggccaagctgccccccagaagagacgactggccccccggctgcagagacaagggcgccagaggcagcaccggcagaaaggtgggcgtgagcaaggcccccgagaagtag

SEQ ID NO: 75740 - DNA, 2343 bp, synthetic construct
  misc_feature 1..2343: note = Description of Artificial Sequence: Synthetic coding sequence
  source 1..2343: mol_type = other DNA
atggaccagaacagcgtgcccgagaaggcccagaacgaggccgacaccaacaacgccgacagattcttcagaagccacagcagccccccccaccacagacccggccacagcagagccctgcaccactacgagctgcaccaccacggcgtgccccaccagagaggcgagagccaccacccccccgagttccaggacttccacgaccaggccctgagcagccacgtgcaccagagccaccaccacagcgaggccagaaaccacggcagagcccacggccccaccggcttcggcctggcccccagccagggcgccgtgcccagccacagaagctacggcgaggactaccacgacgagctgcagagagacggcagaagacaccacgacggcagccagtacggcggcttccaccagcagagcgacagccactaccacagaggcagccaccacggcagaccccagtacctgggcgagaacctgagccactacagcagcggcgtgccccaccacggcgaggccagccaccacggcggcagctacctgccccacggccccaacccctacagcgagagcttccaccacagcgaggccagccacctgagcggcctgcagcacgacgagagccagcaccaccaggtgccccacagaggctggccccaccaccaccaggtgcaccaccacggcagaagcagacaccacgaggcccaccagcacggcaagagcccccaccacggcgagaccatcagcccccacagcagcgtgggcagctaccagagaggcatcagcgactaccacagcgagtaccaccagggcgaccaccaccccagcgagtaccaccacggcgaccacccccaccacacccagcaccactaccaccagacccacagacacagagactaccaccagcaccaggaccaccacggcgcctaccacagcagctacctgcacggcgactacgtgcagagcaccagccagctgagcatcccccacaccagcagaagcctgatccacgacgcccccggccccgccgccagcagaaccggcgtgttcccctaccacgtggcccaccccagaggcagcgcccacagcatgaccagaagcagcagcaccatcagaagcagagtgacccagatgagcaagaaggtgcacacccaggacatcagcaccaagcacagcgaggactggggcaaggaggagggccagttccagaagagaaagaccggcagactgcagagaaccagaaagaagggccacagcaccaacctgttccagtggctgtgggagaagctgaccttcctgatccagggcttcagagagatgatcagaaacctgacccagagcctggccttcgagaccttcatcttcttcgtggtgtgcctgaacaccgtgatgctggtggcccagaccttcgccgaggtggagatcagaggcgagtggtacttcatggccctggacagcatcttcttctgcatctacgtggtggaggccctgctgaagatcatcgccctgggcctgagctacttcttcgacttctggaacaacctggacttcttcatcatggccatggccgtgctggacttcctgctgatgcagacccacagcttcgccatctaccaccagagcctgttcagaatcctgaaggtgttcaagagcctgagagccctgagagccatcagagtgctgagaagactgagcttcctgaccagcgtgcaggaggtgaccggcaccctgggccagagcctgcccagcatcgccgccatcctgatcctgatgttcacctgcctgttcctgttcagcgccgtgctgagagccctgttcagaaagagcgaccccaagagattccagaacatcttcaccaccatcttcaccctgttcaccctgctgaccctggacgactggagcctgatctacatggacagcagagcccagggcgcctggtacatcatccccatcctggtgatctacatcatcatccagtacttcatcttcctgaacctggtgatcaccgtgctggtggacagcttccagaccgccctgttcaagggcctggagaaggccaagcaggagagagccgccagaatccaggagaagctgctggaggacagcctgaccgagctgagagccgccgagcccaaggaggtggccagcgagggcaccatgctgaagagactgatcgagaagaagttcggcaccatgaccgagaagcagcaggagctgctgttccactacctgcagctggtggccagcgtggagcaggagcagcagaagttcagaagccaggccgccgtgatcgacgagatcgtggacaccaccttcgaggccggcgaggaggacttcagaaactag

SEQ ID NO: 75741 - DNA, 1197 bp, synthetic construct
  misc_feature 1..1197: note = Description of Artificial Sequence: Synthetic coding sequence
  source 1..1197: mol_type = other DNA
atgagccagcacagacaccagagacacagcagagtgatcagcagcagccccgtggacaccaccagcgtgggcttctgccccaccttcaagaagttcaagagaaacgacgacgagtgcagagccttcgtgaagagagtgatcatgagcagattcttcaagatcatcatgatcagcaccgtgaccagcaacgccttcttcatggccctgtggaccagctacgacatcagatacagactgttcagactgctggagttcagcgagatcttcttcgtgagcatctgcaccagcgagctgagcatgaaggtgtacgtggaccccatcaactactggaagaacggctacaacctgctggacgtgatcatcatcatcgtgatgttcctgccctacgccctgagacagctgatgggcaagcagttcacctacctgtacatcgccgacggcatgcagagcctgagaatcctgaagctgatcggctacagccagggcatcagaaccctgatcaccgccgtgggccagaccgtgtacaccgtggccagcgtgctgctgctgctgttcctgctgatgtacatcttcgccatcctgggcttctgcctgttcggcagccccgacaacggcgaccacgacaactggggcaacctggccgccgccttcttcaccctgttcagcctggccaccgtggacggctggaccgacctgcagaagcagctggacaacagagagttcgccctgagcagagccttcaccatcatcttcatcctgctggccagcttcatcttcctgaacatgttcgtgggcgtgatgatcatgcacaccgaggacagcatcagaaagttcgagagagagctgatgctggagcagcaggagatgctgatgggcgagaagcaggtgatcctgcagagacagcaggaggagatcagcagactgatgcacatccagaagaacgccgactgcaccagcttcagcgagctggtggagaacttcaagaagaccctgagccacaccgaccccatggtgctggacgacttcggcaccagcctgcccttcatcgacatctacttcagcaccctggactaccaggacaccaccgtgcacaagctgcaggagctgtactacgagatcgtgcacgtgctgagcctgatgctggaggacctgccccaggagaagccccagagcctggagaaggtggacgagaagtag

SEQ ID NO: 75742 - DNA, 1419 bp, synthetic construct
  misc_feature 1..1419: note = Description of Artificial Sequence: Synthetic coding sequence
  source 1..1419: mol_type = other DNA
atgagagacaacgagaaggcctggtggcagcagtggaccagccacaccggcctggagggctggggcggcacccaggaggacagaatgggcttcggcggcgccgtggccgccctgagaggcagacccagccccctgcagagcaccatccacgagagctacggcagacccgaggagcaggtgctgatcaacagacaggagatcaccaacaaggccgacgcctgggacatgcaggagttcatcacccacatgtacatcaagcagctgctgagacaccccgccttccagctgctgctggccctgctgctggtgatcaacgccatcaccatcgccctgagaaccaacagctacctggaccagaagcactacgagctgttcagcaccatcgacgacatcgtgctgaccatcctgctgtgcgaggtgctgctgggctggctgaacggcttctggatcttctggaaggacggctggaacatcctgaacttcatcatcgtgttcatcctgctgctgagattcttcatcaacgagatcaacatccccagcatcaactacaccctgagagccctgagactggtgcacgtgtgcatggccgtggagcccctggccagaatcatcagagtgatcctgcagagcgtgcccgacatggccaacatcatggtgctgatcctgttcttcatgctggtgttcagcgtgttcggcgtgaccctgttcggcgccttcgtgcccaagcacttccagaacatccaggtggccctgtacaccctgttcatctgcatcacccaggacggctgggtggacatctacagcgacttccagaccgagaagagagagtacgccatggagatcggcggcgccatctacttcaccatcttcatcaccatcggcgccttcatcggcatcaacctgttcgtgatcgtggtgaccaccaacctggagcagatgatgaaggccggcgagcagggccagcagcagagaatcaccttcagcgagaccggcgccgaggaggaggaggagaacgaccagctgcccctggtgcactgcgtggtggccagaagcgagaagagcggcctgctgcaggagcccctggccggcggccccctgagcaacctgagcgagaacacctgcgacaacttctgcctggtgctggaggccatccaggagaacctgagacagtacaaggagatcagagacgagctgaacatgatcgtggaggaggtgagagccatcagattcaaccaggagcaggagagcgaggtgctgaacagaagaagcagcaccagcggcagcctggagaccaccagcagcaaggacatcagacagatgagccagcagcaggacctgctgagcgccctggtgagcatggagaaggtgcacgacagcagcagccagatcctgctgaagaagcacaagagcagccactag

SEQ ID NO: 75743 - DNA, 3351 bp, synthetic construct
  misc_feature 1..3351: note = Description of Artificial Sequence: Synthetic coding sequence
  source 1..3351: mol_type = other DNA
atggagagccccctgatctacgtgagcgtgctgctgctgaacatcttcgagttcagcagcggcatcgtgtacaacaaggacgacaccgagaagagattcgcctgcagcaacaagggcttcccccaggagaacgagatcatcaagctgtacctgttcctggagaacctgaagatccagtgcttcttccagaccgagaacgagatcgccagcaaggccatgctgagcgtgttcaccagcggcggcctggcccccagcctgggcatcatgaacagcacctacaacggcatcttccacttcaacctgaccctgttcagcgacagaatcctgtggctggtggacatccccagagagaacatcacccagagcaccgacatcgccgccgtggaggagtggctggtgagaatcaccctgcaccacggcctgaacatctacgccaccgagggcaccctgctggacgtgatcagagagcccatcctgcagtggacccccggcgacgtgatccccgagagcgagatcagcaagctgtacccccacgtggtggacctgaaggtgaccaagtgcccctgcgccaacgacgtggccctgctgggcttcatcgtggacaccatcgtggacggcgtgtacatcggcatcaccttcggcggcttctggcacgactacgacaccacctggttcaacatgacccagaccatctacagccagctgcaggaggagtacgaggacctgagcctggtggacatggtgctgaccaaccacttcctggtgatcctgaccagcctgggcctgttcgtgagcgaggacctgagataccccagcagacacagcctgagcttcagcagagccgacttctgcggcttcgagagagtggactacgtgaagggcaagctgtggtacaacgagagatgcttcgccaacagagagcacttcgaggtggactacgtgaccgtgaccttcgagagaaacagaaccctgagcgagagcagcagctgcttctacagccaggagcccttcctggagtgggtgccctgcctgccccacatcttcaagggcatcaagatcttccccaccgtgctgaccttcctggtggaccaggagagaggcaccggcgtgtacctgttctacaacaaggtgagaaagaccgccatcgccagcgtgagcaccctgagaaacaacgagcccaacagccagagcaagttccccatcttcagattccccagcagcttcagcagccccgtgggcatggtgttccaccccagaagccacttcctgtacgcctacggcaaccagatctggctgagcgtggacggcggcaacaccttccagctgatcgccaacttccacgacgacatcatcaagaagaccttccacagcttctacaccagcgccatcaccttcgtgagccagagaggcaaggtgtacagcaccaaggccggcatgggcagatacagcgccgtgggcagcgtgaccgagagaatcttcaccctgtactacgaccacctgggcttcctgcacaagctgaccctgggcagattcgaggccagcggcccccccaccgccttcggcaacagcagaaacctgttcggccagccccccgacatgggcttcgagaccgccctggccccccagcacaccagcctggacgagatcatcttcttcgcctacgtgcccgagaacgagccccaggagaccatctacagcaagaagttcggcaacatccactacggcaaggtgatccacagcggcaagaccggcagagcctacatcagaaaggtgctgcagcacaccacccccaagggcttcctgagcagcgtgatcgccgagatgaaggagcccttcggcctggaggaggtgaacgagagcagctgcctgagcagcagcctgctgatcaacaaggccggcaacgtgtacaagctgaccctggacagccaggtggtgcaggccctgttcgaggacaccgacatcgagaagaccgtggtgctgcccggctacagcagcttcctgatcaccagcatcctggacaacaagaacgccctggccatcgccaccatgcccgagagcgcccccaacaacatgaccttcctgaagagcacctggttcctgtacaacttcggccagagaaacggcagaacctggaagatctacagcaagccctgcaactactggttccagcacgacgacagccccagcctgaacatcgtgaagtacatcgacctgggcaacagctacgtgctgaaggccaaggtgatcagaaacgccaagggcttcagaatgctggagatccccctgctgaccgtgttcgtgggcaaccccaacctgctggaggtgaccgccgaggtgaccttcgacgacaccgacagctacgtgatcaccatcagcgccgccagcaaggtgctgcaccagggcagcaccagcctggccttcatcatgtggagcgccagcaccgagtgcttcgtgaccaccatggtgcccaccctgaagagcagctgcagctacctgagaagcatgcaccacatccccagcaagttcatccccttcgaggactggatcagcggcgtgcacaaggacagccagggcttcaacctgatcaagaccctgcccatcaactacagaccccccagcaacatgggcatcgccatccccctgaccgacaacttctaccacgccgaccccagcaagcccatccccagaaacatgttccacatgagcaagaagaccggcaagttcaagcagtgcgccaacgtgagcaccagagaggagtgcaactgcaccaaggaccagaagttcagccacgccgtggccttcagcgactgcagagagaaggtgcccagattcaagttccccatcacccagtaccccgtgagcctggagatcatcaacgaggacggcagagtgcccctgcagagcccctacctggtgaccgtgaccgaggtgaacatgagacacaactggaagctgaagcacaccgtgcccgagaacatcaagagaatgaagcagctggtggagcccatcctgggcgccgccgtgtacaaccccagcggcctgaacctgagcatcaagggcagcgagctgttccacttcagagtgaccgtgatcagcggcgtgaccttctgcaacctgatcgaggagttccagatctacgtggacgaggcccccctgcccttccccggccacaccctgatcgccgtggccaccgccgtggtgctgggcggcctgatcttcatcgccttcatgttccagctgcagggcatccacccctggagaaccttccagagatggatcagaagaaaccaggagaagttcagcagcatcagcctgagcgagctgatccacagaagcaagagcgaggagtag

SEQ ID NO: 75744 - DNA, 225 bp, synthetic construct
  misc_feature 1..225: note = Description of Artificial Sequence: Synthetic coding sequence
  source 1..225: mol_type = other DNA
atggagagccccctgatctacgtgagcgtgctgctgctgaacatcttcgagttcagcagcggcatcgtgtacaacaaggacgacaccgagaagagattcgcctgcagcaacaagggcttcccccaggagaacgagatcatcaagctgtacctgttcctggagaacctgaagatccagtgcttcttccagaccgagaacgagatcgccagcaaggccatgctgtag

SEQ ID NO: 75745 - DNA, 303 bp, synthetic construct
  misc_feature 1..303: note = Description of Artificial Sequence: Synthetic coding sequence
  source 1..303: mol_type = other DNA
atggagagccccctgatctacgtgagcgtgctgctgctgaacatcttcgagttcagcagcggcatcgtgtacaacaaggacgacaccgagaagagattcgcctgcagcaacaagggcttcccccaggagaacgagatcatcaagctgtacctgttcctggagaacctgaagatccagtgcttcttccagaccgagaacgagatcgccagcaaggccatgctgagcgtgttcaccagcggcggcctggcccccagcctgggcatcatgaacagcacctacaacggcatcttccacttcaactag

SEQ ID NO: 75746 - DNA, 225 bp, synthetic construct; identical to SEQ ID NO: 75744
  misc_feature 1..225: note = Description of Artificial Sequence: Synthetic coding sequence
  source 1..225: mol_type = other DNA

SEQ ID NO: 75747 - DNA, 795 bp, synthetic construct
  misc_feature 1..795: note = Description of Artificial Sequence: Synthetic coding sequence
  source 1..795: mol_type = other DNA
atgcacaaccccgacggcagcgccagccccaccgccgaccccggcagcgagctgcagaccctgggccaggccgccagaagaccccccccccccagagccggccacgacgcccccagaagaaccagacccagcgccagaaagcccctgagctgcttcagcagaagacccatgcccaccagagagccccccaagaccagaggcagcagaggccacctgcacacccacccccccggccccggcccccccctgcagggcctggcccccagaggcctgaagaccagcgcccccagacccccctgccagccccagcccggcccccacaaggccaagaccaagaagatcgtgttcgaggacgagctgctgagccaggccctgctgggcgccaagaagcccatcggcgccatccccaagggccacaagcccagaccccaccccgtgcccgactacgagctgaagtacccccccgtgagcagcgagagagagagaagcagatacgtggccgtgttccaggaccagtacggcgagttcctggagctgcagcacgaggtgggctgcgcccaggccaagctgagacagctggaggccctgctgagcagcctgccccccccccagagccagaaggaggcccaggtggccgccagagtgtggagagagttcgagatgaagagaatggaccccggcttcctggacaagcaggccagatgccactacctgaagggcaagctgagacacctgaagacccagatccagaagttcgacgaccagggcgacagcgagggcagcgtgtacttctag

SEQ ID NO: 75748 - DNA, 3480 bp, synthetic construct
  misc_feature 1..3480: note = Description of Artificial Sequence: Synthetic coding sequence
  source 1..3480: mol_type = other DNA
atgtgcggccccgccatgttccccgccggccccccctggcccagagtgagagtggtgcaggtgctgtgggccctgctggccgtgctgctggccagctggagactgtgggccatcaaggacttccaggagtgcacctggcaggtggtgctgaacgagttcaagagagtgggcgagagcggcgtgagcgacagcttcttcgagcaggagcccgtggacaccgtgagcagcctgttccacatgctggtggacagccccatcgaccccagcgagaagtacctgggcttcccctactacctgaagatcaactacagctgcgaggagaagcccagcgaggacctggtgagaatgggccacctgaccggcctgaagcccctggtgctggtgaccttccagagccccgtgaacttctacagatggaagatcgagcagctgcagatccagatggaggccgcccccttcagaagcaaggagccctgcatggccgaggaggtgtgcagcatgagctggtacacccccatgcccatcaagaagggcagcgtggtgatgagagtggacatcagcagcaacggcctgggcaccttcatccccgacaagagattccagatgaacatcaacggcttcctgaagagagacagagacaacaacatccagttcaccgtgggcgaggagctgttcaacctgatgccccagtacttcgtgggcgtgagcagcagacccctgtggcacaccgtggaccagagccccgtgctgatcctgggcggcatccccaacgagaagtacgtgctgatgaccgacaccagcttcaaggacttcagcctggtggagctgagcatcgacagctgctgggtgggcagcttctactgcccccacagcggcttcaccgccaccatctacgacaccatcgccaccgagagcaccctgttcatcagacagaaccagctggtgtactacttcaccggcacctacaccaccctgtacgagagaaacagaggcagcggcagctggatcagagtgctggccagcgagtgcatcaagaagctgtgccccgtgtacttccacagcaacggcagcgagtacatcatggccctgaccaccggcaagcacgagggctacgtgcacttcggcaccatcagagacggccaggtgagcttcgagatgctgcccagacagtggagcgtgtgcgagcagatcggcgtgaccacctgcagcatcatctggagcgagtacatcgccggcgagtacaccctgctgctgctggtggagagcggctacggcaacgccagcaagagattccaggtggtgagctacaacaccgccagcgacgacctggagctgctgtaccacatccccgagttcatccccgaggccagaggcctggagttcctgatgatcctgggcaccgagagctacaccagcaccgccatggcccccaagggcatcttctgcaacccctacaacaacctgatcttcatctggggcaacttcctgctgcagagcagcaacaaggagaacttcatctacctggccgacttccccaaggagctgagcatcaagtacatggccagaagcttcagaggcgccgtggccatcgtgaccgagaccgaggagatctggtacctgctggagggcagctacagagtgtaccagctgttccccagcaagggctggcaggtgcacatcagcctgaagctgatgcagcagagcagcctgtacgccagcaacgagaccatgctgaccctgttctacgaggacagcaagctgtaccagctggtgtacctgatgaacaaccagaagggccagctggtgaagagactggtgcccgtggagcagctgctgatgtaccagcagcacaccagccactacgacctggagagaaagggcggctacctgatgctgagcttcatcgacttctgccccttcagcgtgatgagactgagaagcctgcccagcccccagagatacaccagacaggagagatacagagccagaccccccagagtgctggagagaagcggcttccacaacgagaacagcctggccatctaccagggcctggtgtactacctgctgtggctgcacagcgtgtacgacaagccctacgccgaccccgtgcacgaccccacctggagatggtgggccaacaacaagcaggaccaggactactacttcttcctggccagcaactggagaagcgccggcggcgtgagcatcgagatggacagctacgagaagatctacaacctggagagcgcctacgagctgcccgagagaatcttcctggacaagggcaccgagtacagcttcgccatcttcctgagcgcccagggccacagcttcagaacccagagcgagctgggcaccgccttccagctgcacagccaggtggacgtgggcgtggtgctggccgaccccggctgcatcgaggccagcgtgaagcaggaggtgctgatcaacagaaacagcgtgctgttcagcatcaccctgaaggacaagaagctgtgctacgaccagggcatcagcggccaccacctgatggagaccagcatgaccgtgaacgtggtgggcagcagcggcctgtgcttccaggagacccacctgggcccccacatgcagggcaacctgatggtgcccgtgttcatcggctgcccccccggcaagagactggccttcgacatcacctacaccctggagtacagcagactgaagaacaagcactacttcgactgcgtgaacgtgaaccccgagatgccctgcttcctgttcagagacatcttctaccccttcttcctgatccaggacctggtgaccggcgacagcggcagcttccagggcagctacgtgctgctggtggtgggcggcggccccaccctggacagcctgaaggactacagcgaggacgagatctacagattcaacagccccctggacaagaccaacagcctgatctggaccaccagaaccaccagaaccaccaaggacagcgccttccacatcatgagccacgagagccccggcatcgagtggctgtgcctggagaacgccccctgctacgacaacgtgccccagggcatcttcgcccccgagttcttcttcaaggtgctggtgagcaacagaggcgtggacaccagcacctactgcaactaccagctgaccttcctgctgcacatccacggcctgcccctgagccccaagagagccctgttcatcatcatggtgagcgccagcgtgttcgtgggcctggtgatcttctacatcgccttctgcctgctgtggcccctggtggtgaagggctgcaccatgatcagatggaagatcaacaacctgatcgccagcgagagctactacacctacgccagcatcagcggcatcagcagcatgcccagcctgagacacagcagaatgggcagcatgttcagcagcagaatgaccgaggacagagccgagcccaaggaggccgtggagagacagctgatgacctag

SEQ ID NO: 75749 - DNA, 3480 bp, synthetic construct; identical to SEQ ID NO: 75748
  misc_feature 1..3480: note = Description of Artificial Sequence: Synthetic coding sequence
  source 1..3480: mol_type = other DNA

SEQ ID NO: 75750 - DNA, 1983 bp, synthetic construct
  misc_feature 1..1983: note = Description of Artificial Sequence: Synthetic coding sequence
  source 1..1983: mol_type = other DNA
atggacgtgctggtgagcgagtgcagcgccagactgctgcagcaggaggaggagatcaagagcctgaccgccgagatcgacagactgaagaactgcggctgcctgggcgccagccccaacctggagcagctgcaggaggagaacctgaagctgaagtacagactgaacatcctgagaaagagcctgcaggccgagagaaacaagcccaccaagaacatgatcaacatcatcagcagactgcaggaggtgttcggccacgccatcaaggccgcctaccccgacctggagaacccccccctgctggtgacccccagccagcaggccaagttcggcgactaccagtgcaacagcgccatgggcatcagccagatgctgaagaccaaggagcagaaggtgaaccccagagagatcgccgagaacatcaccaagcacctgcccgacaacgagtgcatcgagaaggtggagatcgccggccccggcttcatcaacgtgcacctgagaaaggacttcgtgagcgagcagctgaccagcctgctggtgaacggcgtgcagctgcccgccctgggcgagaacaagaaggtgatcgtggacttcagcagccccaacatcgccaaggagatgcacgtgggccacctgagaagcaccatcatcggcgagagcatcagcagactgttcgagttcgccggctacgacgtgctgagactgaaccacgtgggcgactggggcacccagttcggcatgctgatcgcccacctgcaggacaagttccccgactacctgaccgtgagcccccccatcggcgacctgcaggtgttctacaaggagagcaagaagagattcgacaccgaggaggagttcaagaagagagcctaccagtgcgtggtgctgctgcagggcaagaaccccgacatcaccaaggcctggaagctgatctgcgacgtgagcagacaggagctgaacaagatctacgacgccctggacgtgagcctgatcgagagaggcgagagcttctaccaggacagaatgaacgacatcgtgaaggagttcgaggacagaggcttcgtgcaggtggacgacggcagaaagatcgtgttcgtgcccggctgcagcatccccctgaccatcgtgaagagcgacggcggctacacctacgacaccagcgacctggccgccatcaagcagagactgttcgaggagaaggccgacatgatcatctacgtggtggacaacggccagagcgtgcacttccagaccatcttcgccgccgcccagatgatcggctggtacgaccccaaggtgaccagagtgttccacgccggcttcggcgtggtgctgggcgaggacaagaagaagttcaagaccagaagcggcgagaccgtgagactgatggacctgctgggcgagggcctgaagagaagcatggacaagctgaaggagaaggagagagacaaggtgctgaccgccgaggagctgaacgccgcccagaccagcgtggcctacggctgcatcaagtacgccgacctgagccacaacagactgaacgactacatcttcagcttcgacaagatgctggacgacagaggcaacaccgccgcctacctgctgtacgccttcaccagaatcagaagcatcgccagactggccaacatcgacgaggagatgctgcagaaggccgccagagagaccaagatcctgctggaccacgagaaggagtggaagctgggcagatgcatcctgagattccccgagatcctgcagaagatcctggacgacctgttcctgcacaccctgtgcgactacatctacgagctggccaccgccttcaccgagttctacgacagctgctactgcgtggagaaggacagacagaccggcaagatcctgaaggtgaacatgtggagaatgctgctgtgcgaggccgtggccgccgtgatggccaagggcttcgacatcctgggcatcaagcccgtgcagagaatgtag

SEQ ID NO: 75751 - DNA, 465 bp, synthetic construct
  misc_feature 1..465: note = Description of Artificial Sequence: Synthetic coding sequence
  source 1..465: mol_type = other DNA
atgtgctggaccagaatcagacccggcacccccagcagccccggcgcccagagacccaccccctacgagtggatgagaagaagcgtggccgccggcggcggcggcggcagcggcaagaccagaaccaaggacaagtacagagtggtgtacaccgaccaccagagactggagctggagaaggagttccactacagcagatacatcaccatcagaagaaagagcgagctggccgccaacctgggcctgaccgagagacaggtgaagatctggttccagaacagaagagccaaggagagaaaggtgaacaagaagaagcagcagcagcagcagcccccccagccccccatggcccacgacatcaccgccacccccgccggccccagcctgggcggcctgtgccccagcaacaccagcctgctggccaccagcagccccatgcccgtgaaggaggagttcctgccctag

SEQ ID NO: 75752 - DNA, 183 bp, synthetic construct
  misc_feature 1..183: note = Description of Artificial Sequence: Synthetic coding sequence
  source 1..183: mol_type = other DNA
atgagaggcggccccagaggccaccacgtgtgcggcctgtgcgccggccagggcttcgccagagtgcccagacccagccaggccagccagcccagacccggccccgccagcctgtgccccagcaacaccagcctgctggccaccagcagccccatgcccgtgaaggaggagttcctgccctag

SEQ ID NO: 75753 - DNA, 942 bp, synthetic construct
  misc_feature 1..942: note = Description of Artificial Sequence: Synthetic coding sequence
  source 1..942: mol_type = other DNA
atgtacgtgagctacctgctggacaaggacgtgagcatgtaccccagcagcgtgagacacagcggcggcctgaacctggccccccagaacttcgtgagccccccccagtaccccgactacggcggctaccacgtggccgccgccgccgccgccgccgccaacctggacagcgcccagagccccggccccagctggcccgccgcctacggcgcccccctgagagaggactggaacggctacgcccccggcggcgccgccgccgccgccaacgccgtggcccacggcctgaacggcggcagccccgccgccgccatgggctacagcagccccgccgactaccacccccaccaccacccccaccaccacccccaccaccccgccgccgcccccagctgcgccagcggcctgctgcagaccctgaaccccggcccccccggccccgccgccaccgccgccgccgagcagctgagccccggcggccagagaagaaacctgtgcgagtggatgagaaagcccgcccagcagagcctgggcagccaggtgaagaccagaaccaaggacaagtacagagtggtgtacaccgaccaccagagactggagctggagaaggagttccactacagcagatacatcaccatcagaagaaaggccgagctggccgccaccctgggcctgagcgagagacaggtgaagatctggttccagaacagaagagccaaggagagaaagatcaacaagaagaagctgcagcagcagcagcagcagcagcccccccagcccccccccccccccccccagcccccccagccccagcccggccccctgagaagcgtgcccgagcccctgagccccgtgagcagcctgcaggccagcgtgcccggcagcgtgcccggcgtgctgggccccaccggcggcgtgctgaaccccaccgtgacccagtag

SEQ ID NO: 75754 - DNA, 855 bp, synthetic construct
  misc_feature 1..855: note = Description of Artificial Sequence: Synthetic coding sequence
  source 1..855: mol_type = other DNA
atgtacggcagctgcctgctggagaaggaggccggcatgtaccccggcaccctgatgagccccggcggcgacggcaccgccggcaccggcggcaccggcggcggcggcagccccatgcccgccagcaacttcgccgccgcccccgccttcagccactacatgggctacccccacatgcccagcatggacccccactggcccagcctgggcgtgtggggcagcccctacagcccccccagagaggactggagcgtgtaccccggccccagcagcaccatgggcaccgtgcccgtgaacgacgtgaccagcagccccgccgccttctgcagcaccgactacagcaacctgggccccgtgggcggcggcaccagcggcagcagcctgcccggccaggccggcggcagcctggtgcccaccgacgccggcgccgccaaggccagcagccccagcagaagcagacacagcccctacgcctggatgagaaagaccgtgcaggtgaccggcaagaccagaaccaaggagaagtacagagtggtgtacaccgaccaccagagactggagctggagaaggagttccactgcaacagatacatcaccatccagagaaagagcgagctggccgtgaacctgggcctgagcgagagacaggtgaagatctggttccagaacagaagagccaaggagagaaagatgatcaagaagaagatcagccagttcgagaacagcggcggcagcgtgcagagcgacagcgacagcatcagccccggcgagctgcccaacaccttcttcaccacccccagcgccgtgagaggcttccagcccatcgagatccagcaggtgatcgtgagcgagtag

SEQ ID NO: 75755 - DNA, 456 bp, synthetic construct
  misc_feature 1..456: note = Description of Artificial Sequence: Synthetic coding sequence
  source 1..456: mol_type = other DNA
atgatggccgaggagcacaccgacctggaggcccagatcgtgaaggacatccactgcaaggagatcgacctggtgaacagagaccccaagaacatcaacgaggacatcgtgaaggtggacttcgaggacgtgatcgccgagcccgtgggcacctacagcttcgacggcgtgtggaaggtgagctacaccaccttcaccgtgagcaagtactggtgctacagactgctgagcaccctgctgggcgtgcccctggccctgctgtggggcttcctgttcgcctgcatcagcttctgccacatctgggccgtggtgccctgcatcaagagctacctgatcgagatccagtgcatcagccacatctacagcctgtgcatcagaaccttctgcaaccccctgttcgccgccctgggccaggtgtgcagcagcatcaaggtggtgctgagaaaggaggtgtag

SEQ ID NO: 75756 - DNA, 456 bp, synthetic construct; identical to SEQ ID NO: 75755
  misc_feature 1..456: note = Description of Artificial Sequence: Synthetic coding sequence
  source 1..456: mol_type = other DNA

SEQ ID NO: 75757 - DNA, 813 bp, synthetic construct
  misc_feature 1..813: note = Description of Artificial Sequence: Synthetic coding sequence
  source 1..813: mol_type = other DNA
atggccgaccacatgatggccatgaaccacggcagattccccgacggcaccaacggcctgcaccaccaccccgcccacagaatgggcatgggccagttccccagcccccaccaccaccagcagcagcagccccagcacgccttcaacgccctgatgggcgagcacatccactacggcgccggcaacatgaacgccaccagcggcatcagacacgccatgggccccggcaccgtgaacggcggccacccccccagcgccctggcccccgccgccagattcaacaacagccagttcatgggcccccccgtggccagccagggcggcagcctgcccgccagcatgcagctgcagaagctgaacaaccagtacttcaaccaccacccctacccccacaaccactacatgcccgacctgcaccccgccgccggccaccagatgaacggcaccaaccagcacttcagagactgcaaccccaagcacagcggcggcagcagcacccccggcggcagcggcggcagcagcacccccggcggcagcggcagcagcagcggcggcggcgccggcagcagcaacagcggcggcggcagcggcagcggcaacatgcccgccagcgtggcccacgtgcccgccgccatgctgccccccaacgtgatcgacaccgacttcatcgacgaggaggtgctgatgagcctggtgatcgagatgggcctggacagaatcaaggagctgcccgagctgtggctgggccagaacgagttcgacttcatgaccgacttcgtgtgcaagcagcagcccagcagagtgagctgctag

SEQ ID NO: 75758 - DNA, 645 bp, synthetic construct
  misc_feature 1..645: note = Description of Artificial Sequence: Synthetic coding sequence
  source 1..645: mol_type = other DNA
atggccgaccacatgatggccatgaaccacggcagattccccgacggcaccaacggcctgcaccaccaccccgcccacagaatgggcatgggccagttccccagcccccaccaccaccagcagcagcagccccagcacgccttcaacgccctgatgggcgagcacatccactacggcgccggcaacatgaacgccaccagcggcatcagacacgccatgggccccggcaccgtgaacggcggccacccccccagcgccctggcccccgccgccagattcaacaacagccagttcatgggcccccccgtggccagccagggcggcagcctgcccgccagcatgcagctgcagaagctgaacaaccagtacttcaaccaccacccctacccccacaaccactacatgcccgacctgcaccccgccgccggccaccagatgaacggcaccaaccagcacttcagagactgcaacccccccaacgtgatcgacaccgacttcatcgacgaggaggtgctgatgagcctggtgatcgagatgggcctggacagaatcaaggagctgcccgagctgtggctgggccagaacgagttcgacttcatgaccgacttcgtgtgcaagcagcagcccagcagagtgagctgctag

SEQ ID NO: 75759 - DNA, 813 bp, synthetic construct; identical to SEQ ID NO: 75757
  misc_feature 1..813: note = Description of Artificial Sequence: Synthetic coding sequence
  source 1..813: mol_type = other DNA

SEQ ID NO: 75760 - DNA, 813 bp, synthetic construct; identical to SEQ ID NO: 75757
  misc_feature 1..813: note = Description of Artificial Sequence: Synthetic coding sequence
  source 1..813: mol_type = other DNA

SEQ ID NO: 75761 - DNA, 1797 bp, synthetic construct
  misc_feature 1..1797: note = Description of Artificial Sequence: Synthetic coding sequence
  source 1..1797: mol_type = other DNA
atggagaacagcagcgccgccagcgccagcagcgaggccggcagcagcagaagccaggagatcgaggagctggagagattcatcgacagctacgtgctggagtaccaggtgcagggcctgctggccgacaagaccgagggcgacggcgagagcgagagaacccagagccacatcagccagtggaccgccgactgcagcgagcccctggacagcagctgcagcttcagcagaggcagagcccccccccagcagaacggcagcaaggacaacagcctggacatgctgggcaccgacatctgggccgccaacaccttcgacagcttcagcggcgccacctgggacctgcagcccgagaagctggacttcacccagttccacagaaaggtgagacacacccccaagcagcccctgccccacatcgacagagagggctgcggcaagggcaagctggaggacggcgacggcatcaacctgaacgacatcgagaaggtgctgcccgcctggcagggctaccaccccatgccccacgaggtggagatcgcccacaccaagaagctgttcagaagaagaagaaacgacagaagaagacagcagagaccccccggcggcaacaagccccagcagcacggcgaccaccagcccggcagcgccaagcacaacagagaccaccagaagagctaccagggcggcagcgccccccaccccagcggcagacccacccaccacggctacagccagaacagaagatggcaccacggcaacatgaagcacccccccggcgacaagggcgaggccggcgcccacagaaacgccaaggagaccatgaccatcgagaaccccaagctggaggacaccgccggcgacaccggccacagcagcctggaggcccccagaagccccgacaccctggcccccgtggccagcgagagactgcccccccagcagagcggcggccccgaggtggagaccaagagaaaggacagcatcctgcccgagagaatcggcgagagacccaagatcaccctgctgcagagcagcaaggacagactgagaagaagactgaaggagaaggacgaggtggccgtggagaccaccaccccccagcagaacaagatggacaagctgatcgagatcctgaacagcatgagaaacaacagcagcgacgtggacaccaagctgaccaccttcatggaggaggcccagaacagcaccaacagcgaggagatgctgggcgagatcgtgagaaccatctaccagaaggccgtgagcgacagaagcttcgccttcaccgccgccaagctgtgcgacaagatggccctgttcatggtggagggcaccaagttcagaagcctgctgctgaacatgctgcagaaggacttcaccgtgagagaggagctgcagcagcaggacgtggagagatggctgggcttcatcaccttcctgtgcgaggtgttcggcaccatgagaagcagcaccggcgagcccttcagagtgctggtgtgccccatctacacctgcctgagagagctgctgcagagccaggacgtgaaggaggacgccgtgctgtgctgcagcatggagctgcagagcaccggcagactgctggaggagcagctgcccgagatgatgaccgagctgctggccagcgccagagacaagatgctgtgccccagcgagagcatgctgaccagaagcctgctgctggaggtgatcgagctgcacgccaacagctggaaccccctgaccccccccatcacccagtactacaacagaaccatccagaagctgaccgcctag

SEQ ID NO: 75762 - DNA, 1803 bp, synthetic construct
  misc_feature 1..1803: note = Description of Artificial Sequence: Synthetic coding sequence
  source 1..1803: mol_type = other DNA
atggagaacagcagcgccgccagcgccagcagcgaggccggcagcagcagaagccaggagatcgaggagctggagagattcatcgacagctacgtgctggagtaccaggtgcagggcctgctggccgacaagaccgagggcgacggcgagagcgagagaacccagagccacatcagccagtggaccgccgactgcagcgagcccctggacagcagctgcagcttcagcagaggcagagcccccccccagcagaacggcagcaaggacaacagcctggacatgctgggcaccgacatctgggccgccaacaccttcgacagcttcagcggcgccacctgggacctgcagcccgagaagctggacttcacccagttccacagaaaggtgagacacacccccaagcagcccctgccccacatcgacagagagggctgcggcaagggcaagctggaggacggcgacggcatcaacctgaacgacatcgagaaggtgctgcccgcctggcagggctaccaccccatgccccacgaggtggagatcgcccacaccaagaagctgttcagaagaagaagaaacgacagaagaagacagcagagaccccccggcggcaacaagccccagcagcacggcgaccaccagcccggcagcgccaagcacaacagagaccaccagaagagctaccagggcggcagcgccccccaccccagcggcagacccacccaccacggctacagccagaacagaagatggcaccacggcaacatgaagcacccccccggcgacaagggcgaggccggcgcccacagaaacgccaaggagaccatgaccatcgagaaccccaagctggaggacaccgccggcgacaccggccacagcagcctggaggcccccagaagccccgacaccctggcccccgtggccagcgagagactgcccccccagcagagcggcggccccgaggtggagaccaagagaaaggacagcatcctgcccgagagaatcggcgagagacccaagatcaccctgctgcagagcagcaaggacagactgagaagaagactgaaggagaaggtgcccgacgaggtggccgtggagaccaccaccccccagcagaacaagatggacaagctgatcgagatcctgaacagcatgagaaacaacagcagcgacgtggacaccaagctgaccaccttcatggaggaggcccagaacagcaccaacagcgaggagatgctgggcgagatcgtgagaaccatctaccagaaggccgtgagcgacagaagcttcgccttcaccgccgccaagctgtgcgacaagatggccctgttcatggtggagggcaccaagttcagaagcctgctgctgaacatgctgcagaaggacttcaccgtgagagaggagctgcagcagcaggacgtggagagatggctgggcttcatcaccttcctgtgcgaggtgttcggcaccatgagaagcagcaccggcgagcccttcagagtgctggtgtgccccatctacacctgcctgagagagctgctgcagagccaggacgtgaaggaggacgccgtgctgtgctgcagcatggagctgcagagcaccggcagactgctggaggagcagctgcccgagatgatgaccgagctgctggccagcgccagagacaagatgctgtgccccagcgagagcatgctgaccagaagcctgctgctggaggtgatcgagctgcacgccaacagctggaaccccctgaccccccccatcacccagtactacaacagaaccatccagaagctgaccgcctag

SEQ ID NO: 75763 - DNA, 1947 bp, synthetic construct
  misc_feature 1..1947: note = Description of Artificial Sequence: Synthetic coding sequence
  source 1..1947: mol_type = other DNA
atgggcagactgccctgcggccccctgcccggccagtggaccgccgactgcagcgagcccctggacagcagctgcagcttcagcagaggcagagcccccccccagcagaacggcagcaaggacaacagcctggacatgctgggcaccgacatctgggccgccaacaccttcgacagcttcagcggcgccacctgggacctgcagcccgagaagctggacttcacccagttccacagaaaggtgagacacacccccaagcagcccctgccccacatcgacagagagggctgcggcaagggcaagctggaggacggcgacggcatcaacctgaacgacatcgagaaggtgctgcccgcctggcagggctaccaccccatgccccacgaggtggagatcgcccacaccaagaagctgttcagaagaagaagaaacgacagaagaagacagcagagaccccccggcggcaacaagccccagcagcacggcgaccaccagcccggcagcgccaagcacaacagagaccaccagaagagctaccagggcggcagcgccccccaccccagcggcagacccacccaccacggctacagccagaacagaagatggcaccacggcaacatgaagcacccccccggcgacaagggcgaggccggcgcccacagaaacgccaaggagaccatgaccatcgagaaccccaagctggaggacaccgccggcgacaccggccacagcagcctggaggcccccagaagccccgacaccctggcccccgtggccagcgagagactgcccccccagcagagcggcggccccgaggtggagaccaagagaaaggacagcatcctgcccgagagaatcggcgagagacccaagatcaccctgctgcagagcagcaaggacagactgagaagaagactgaaggagaaggacgaggtggccgtggagaccaccaccccccagcagaacaagatggacaagctgatcgagatcctgaacagcatgagaaacaacagcagcgacgtggacaccaagctgaccaccttcatggaggaggcccagaacagcaccaacagcgaggagatgctgggcgagatcgtgagaaccatctaccagaaggccgtgagcgacagaagcttcgccttcaccgccgccaagctgtgcgacaagatggccctgttcatggtggagggcaccaagttcagaagcctgctgctgaacatgctgcagaaggacttcaccgtgagagaggagctgcagcagcaggacgtggagagatggctgggcttcatcaccttcctgtgcgaggtgttcggcaccatgagaagcagcaccggcgagcccttcagagtgctggtgtgccccatctacacctgcctgagagagctgctgcagagccaggacgtgaaggaggacgccgtgctgtgctgcagcatggagctgcagagcaccggcagactgctggaggagcagctgcccgagatgatgaccgagctgctggccagcgccagagacaagatgctgtgccccagcgagagcatgctgaccagaagcctgctgctggaggtgatcgagctgcacgccaacagctggaaccagggcgcctggcaggccgcccacggccagctgggcccctggtgcaccggccccgacggccaggccggcggccagggctggccctggagagagaaggagatgggcagaagagccggcagagtgggcggccagagcggcgccagagcctgcaagctgacccccatcagagaggcctgcttcttcttcctggtggccctggccctgcccttcctgacccccgccagccccctgcccatcagacccatcccccacggcgccctgtgcgagggcagccacagatgcgacagcagcgagaccctggccgccagccacgccggcgcccccctgggcagcgagagaaccagcgagggctag

SEQ ID NO: 75764 - DNA, 1077 bp, synthetic construct
  misc_feature 1..1077: note = Description of Artificial Sequence: Synthetic coding sequence
  source 1..1077: mol_type = other DNA
atggagagcgccgacttctacgaggccgagcccagaccccccatgagcagccacctgcagagccccccccacgcccccagcagcgccgccttcggcttccccagaggcgccggccccgcccagccccccgccccccccgccgcccccgagcccctgggcggcatctgcgagcacgagaccagcatcgacatcagcgcctacatcgaccccgccgccttcaacgacgagttcctggccgacctgttccagcacagcagacagcaggagaaggccaaggccgccgtgggccccaccggcggcggcggcggcggcgacttcgactaccccggcgcccccgccggccccggcggcgccgtgatgcccggcggcgcccacggccccccccccggctacggctgcgccgccgccggctacctggacggcagactggagcccctgtacgagagagtgggcgcccccgccctgagacccctggtgatcaagcaggagcccagagaggaggacgaggccaagcagctggccctggccggcctgttcccctaccagcccccccccccccccccccccagccacccccacccccaccccccccccgcccacctggccgccccccacctgcagttccagatcgcccactgcggccagaccaccatgcacctgcagcccggccaccccacccccccccccacccccgtgcccagcccccaccccgcccccgccctgggcgccgccggcctgcccggccccggcagcgccctgaagggcctgggcgccgcccaccccgacctgagagccagcggcggcagcggcgccggcaaggccaagaagagcgtggacaagaacagcaacgagtacagagtgagaagagagagaaacaacatcgccgtgagaaagagcagagacaaggccaagcagagaaacgtggagacccagcagaaggtgctggagctgaccagcgacaacgacagactgagaaagagagtggagcagctgagcagagagctggacaccctgagaggcatcttcagacagctgcccgagagcagcctggtgaaggccatgggcaactgcgcctag

SEQ ID NO: 75765 - DNA, 810 bp, synthetic construct
  misc_feature 1..810: note = Description of Artificial Sequence: Synthetic coding sequence
  source 1..810: mol_type = other DNA
atgagcgccgccctgttcagcctggacggccccgccagaggcgccccctggcccgccgagcccgcccccttctacgagcccggcagagccggcaagcccggcagaggcgccgagcccggcgccctgggcgagcccggcgccgccgcccccgccatgtacgacgacgagagcgccatcgacttcagcgcctacatcgacagcatggccgccgtgcccaccctggagctgtgccacgacgagctgttcgccgacctgttcaacagcaaccacaaggccggcggcgccggccccctggagctgctgcccggcggccccgccagacccctgggccccggccccgccgcccccagactgctgaagagagagcccgactggggcgacggcgacgcccccggcagcctgctgcccgcccaggtggccgcctgcgcccagaccgtggtgagcctggccgccgccggccagcccaccccccccaccagccccgagccccccagaagcagccccagacagacccccgcccccggccccgccagagagaagagcgccggcaagagaggccccgacagaggcagccccgagtacagacagagaagagagagaaacaacatcgccgtgagaaagagcagagacaaggccaagagaagaaaccaggagatgcagcagaagctggtggagctgagcgccgagaacgagaagctgcaccagagagtggagcagctgaccagagacctggccggcctgagacagttcttcaagcagctgcccagcccccccttcctgcccgccgccggcaccgccgactgcagatag

SEQ ID NO: 75766 - DNA, 402 bp, synthetic construct
  misc_feature 1..402: note = Description of Artificial Sequence: Synthetic coding sequence
  source 1..402: mol_type = other DNA
atgagcgccgccctgttcagcctggacggccccgccagaggcgccccctggcccgccgagcccgcccccttctacgagcccggcagagccggcaagcccggcagaggcgccgagcccggcgccctgggcgagcccggcgccgccgcccccgccatgtacgacgacgagagcgccatcgacttcagcgcctacatcgacagcatggccgccgtgcccaccctggagctgtgccacgacgagctgttcgccgacctgttcaacagcaaccacaaggccagagccccctgggccagagccctgcccctgcccgcctgcagcagcgccagccccaccggcgccaccgccaccagacccgccagatgctgccccagaagatggcccagagcccacagaccctggtag

SEQ ID NO: 75767 - DNA, 1092 bp, synthetic construct
  misc_feature 1..1092: note = Description of Artificial Sequence: Synthetic coding sequence
  source 1..1092: mol_type = other DNA
atggccagcggcgacttctgcagccccggcgagggcatggagatcctgcagcaggtgtgcagcaagcagctgcccccctgcaacctgagcaaggaggacctgctgcagaacccctacttcagcaagctgctgctgaacctgagccagcacgtggacgagagcggcctgagcctgaccctggccaaggagcaggcccaggcctggaaggaggtgagactgcacaagaccacctggctgagaagcgagatcctgcacagagtgatccaggagctgctggtggactactacgtgaagatccaggacaccaacgtgaccagcgaggacaagaagttccacgagaccctggagcagagactgctggtgaccgagctgatgagactgctgggccccagccaggagagagagatcccccccctgctgggcctggagaaggccgacctgctggagctgatgcccctgagcgaggacttcgtgtggatgagagccagactgcagcaggaggtggaggagcagctgaagaagaagtgcttcaccctgctgtgctactacgaccccaacagcgacgccgacagcgagaccgtgaaggccgccaaggtgtggaagctggccgaggtgctggtgggcgagcagcagcagtgccaggacgccaagagccagcagaaggagcagatgctgctgctggagaagaagagcgccgcctacagccaggtgctgctgagatgcctgaccctgctgcagagactgctgcaggagcacagactgaagacccagagcgagctggacagaatcaacgcccagtacctggaggtgaagtgcggcgccatgatcctgaagctgagaatggaggagctgaagatcctgagcgacacctacaccgtggagaaggtggaggtgcacagactgatcagagacagactggagggcgccatccacctgcaggagcaggacatggagaacagcagacaggtgctgaacagctacgaggtgctgggcgaggagttcgacagactggtgaaggagtacaccgtgctgaagcaggccaccgagaacaagagatgggccctgcaggagttcagcaaggtgtacagatag

SEQ ID NO: 75768 - DNA, 1359 bp, synthetic construct
  misc_feature 1..1359: note = Description of Artificial Sequence: Synthetic coding sequence
  source 1..1359: mol_type = other DNA
atgggcagcagccagagcgtggagatccccggcggcggcaccgagggctaccacgtgctgagagtgcaggagaacagccccggccacagagccggcctggagcccttcttcgacttcatcgtgagcatcaacggcagcagactgaacaaggacaacgacaccctgaaggacctgctgaaggccaacgtggagaagcccgtgaagatgctgatctacagcagcaagaccctggagctgagagagaccagcgtgacccccagcaacctgtggggcggccagggcctgctgggcgtgagcatcagattctgcagcttcgacggcgccaacgagaacgtgtggcacgtgctggaggtggagagcaacagccccgccgccctggccggcctgagaccccacagcgactacatcatcggcgccgacaccgtgatgaacgagagcgaggacctgttcagcctgatcgagacccacgaggccaagcccctgaagctgtacgtgtacaacaccgacaccgacaactgcagagaggtgatcatcacccccaacagcgcctggggcggcgagggcagcctgggctgcggcatcggctacggctacctgcacagaatccccaccagacccttcgaggagggcaagaagatcagcctgcccggccagatggccggcacccccatcacccccctgaaggacggcttcaccgaggtgcagctgagcagcgtgaacccccccagcctgagcccccccggcaccaccggcatcgagcagagcctgaccggcctgagcatcagcagcaccccccccgccgtgagcagcgtgctgagcaccggcgtgcccaccgtgcccctgctgcccccccaggtgaaccagagcctgaccagcgtgccccccatgaaccccgccaccaccctgcccggcctgatgcccctgcccgccggcctgcccaacctgcccaacctgaacctgaacctgcccgccccccacatcatgcccggcgtgggcctgcccgagctggtgaaccccggcctgccccccctgcccagcatgccccccagaaacctgcccggcatcgcccccctgcccctgcccagcgagttcctgcccagcttccccctggtgcccgagagcagcagcgccgccagcagcggcgagctgctgagcagcctgccccccaccagcaacgcccccagcgaccccgccaccaccaccgccaaggccgacgccgccagcagcctgaccgtggacgtgaccccccccaccgccaaggcccccaccaccgtggaggacagagtgggcgacagcacccccgtgagcgagaagcccgtgagcgccgccgtggacgccaacgccagcgagagcccctag

SEQ ID NO: 75769 - DNA, 2997 bp, synthetic construct
  misc_feature 1..2997: note = Description of Artificial Sequence: Synthetic coding sequence
  source 1..2997: mol_type = other DNA
atggccgccgtgaaggagcccctggagttccacgccaagagaccctggagacccgaggaggccgtggaggaccccgacgaggaggacgaggacaacaccagcgaggccgagaacggcttcagcctggaggaggtgctgagactgggcggcaccaagcaggactacctgatgctggccaccctggacgagaacgaggaggtgatcgacggcggcaagaagggcgccatcgacgacctgcagcagggcgagctggaggccttcatccagaacctgaacctggccaagtacaccaaggccagcctggtggaggaggacgagcccgccgagaaggagaacagcagcaagaaggaggtgaagatccccaagatcaacaacaagaacaccgccgagagccagagaaccagcgtgaacaaggtgaagaacaagaacagacccgagccccacagcgacgagaacggcagcaccacccccaaggtgaagaaggacaagcagaacatcttcgagttcttcgagagacagaccctgctgctgagacccggcggcaagtggtacgacctggagtacagcaacgagtacagcctgaagccccagccccaggacgtggtgagcaagtacaagaccctggcccagaagctgtaccagcacgagatcaacctgttcaagagcaagaccaacagccagaagggcgccagcagcacctggatgaaggccatcgtgagcagcggcaccctgggcgacagaatggccgccatgatcctgctgatccaggacgacgccgtgcacaccctgcagttcgtggagaccctggtgaacctggtgaagaagaagggcagcaagcagcagtgcctgatggccctggacaccttcaaggagctgctgatcaccgacctgctgcccgacaacagaaagctgagaatcttcagccagagacccttcgacaagctggagcagctgagcagcggcaacaaggacagcagagacagaagactgatcctgtggtacttcgagcaccagctgaagcacctggtggccgagttcgtgcaggtgctggagaccctgagccacgacaccctggtgaccaccaagaccagagccctgaccgtggcccacgagctgctgtgcaacaagcccgaggaggagaaggccctgctggtgcaggtggtgaacaagctgggcgacccccagaacagaatcgccaccaaggccagccacctgctggagaccctgctgtgcaagcaccccaacatgaagggcgtggtgagcggcgaggtggagagactgctgttcagaagcaacatcagcagcaaggcccagtactacgccatctgcttcctgaaccagatggccctgagccacgaggagagcgagctggccaacaagctgatcaccgtgtacttctgcttcttcagaacctgcgtgaagaagaaggacgtggagagcaagatgctgagcgccctgctgaccggcgtgaacagagcctacccctacagccagaccggcgacgacaaggtgagagagcagatcgacaccctgttcaaggtgctgcacatcgtgaacttcaacaccagcgtgcaggccctgatgctgctgttccaggtgatgaacagccagcagaccatcagcgacagatactacaccgccctgtacagaaagatgctggaccccggcctgatgacctgcagcaagcaggccatgttcctgaacctggtgtacaagagcctgaaggccgacatcgtgctgagaagagtgaaggccttcgtgaagagactgctgcaggtgacctgccagcagatgccccccttcatctgcggcgccctgtacctggtgagcgagatcctgaaggccaagcccggcctgagaagccagctggacgaccaccccgagagcgacgacgaggagaacttcatcgacgccaacgacgacgaggacatggagaagttcaccgacgccgacaaggagaccgagatcgtgaagaagctggagaccgaggagaccgtgcccgagaccgacgtggagaccaagaagcccgaggtggccagctgggtgcacttcgacaacctgaagggcggcaagcagctgaacaagtacgaccccttcagcagaaaccccctgttctgcggcgccgagaacaccagcctgtgggagctgaagaagctgagcgtgcacttccaccccagcgtggccctgttcgccaagaccatcctgcagggcaactacatccagtacagcggcgaccccctgcaggacttcaccctgatgagattcctggacagattcgtgtacagaaaccccaagccccacaagggcaaggagaacaccgacagcgtggtgatgcagcccaagagaaagcacttcatcaaggacatcagacacctgcccgtgaacagcaaggagttcctggccaaggaggagagccagatccccgtggacgaggtgttcttccacagatactacaagaaggtggccgtgaaggagaagcagaagagagacgccgacgaggagagcatcgaggacgtggacgacgaggagttcgaggagctgatcgacaccttcgaggacgacaactgcttcagcagcggcaaggacgacatggacttcgccggcaacgtgaagaagagaaccaagggcgccaaggacaacaccctggacgaggacagcgagggcagcgacgacgagctgggcaacctggacgacgacgaggtgagcctgggcagcatggacgacgaggagttcgccgaggtggacgaggacggcggcaccttcatggacgtgctggacgacgagagcgagagcgtgcccgagctggaggtgcacagcaaggtgagcaccaagaagagcaagagaaagggcaccgacgacttcgacttcgccggcagcttccagggccccagaaagaagaagagaaacctgaacgacagcagcctgttcgtgagcgccgaggagttcggccacctgctggacgagaacatgggcagcaagttcgacaacatcgcctag

SEQ ID NO: 75770 - DNA, 1992 bp, synthetic construct
  misc_feature 1..1992: note = Description of Artificial Sequence: Synthetic coding sequence
  source 1..1992: mol_type = other DNA
atggccgccaccgagatcagcgtgctgagcgagcagttcaccaagatcaaggagctggagctgatgcccgagaagggcctgaaggaggaggagaaggacggcgtgtgcagagagaaggaccacagaagccccagcgagctggaggccgagagaaccagcggcgccttccaggacagcgtgctggaggaggaggtggagctggtgctggcccccagcgaggagagcgagaagtacatcctgaccctgcagaccgtgcacttcaccagcgaggccgtggagctgcaggacatgagcctgctgagcatccagcagcaggagggcgtgcaggtggtggtgcagcagcccggccccggcctgctgtggctggaggagggccccagacagagcctgcagcagtgcgtggccatcagcatccagcaggagctgtacagcccccaggagatggaggtgctgcagttccacgccctggaggagaacgtgatggtggccagcgaggacagcaagctggccgtgagcctggccgagaccaccggcctgatcaagctggaggaggagcaggagaagaaccagctgctggccgagagaaccaaggagcagctgttcttcgtggagaccatgagcggcgacgagagaagcgacgagatcgtgctgaccgtgagcaacagcaacgtggaggagcaggaggaccagcccaccgccggccaggccgacgccgagaaggccaagagcaccaagaaccagagaaagaccaagggcgccaagggcaccttccactgcgacgtgtgcatgttcaccagcagcagaatgagcagcttcaacagacacatgaagacccacaccagcgagaagccccacctgtgccacctgtgcctgaagaccttcagaaccgtgaccctgctgagaaaccacgtgaacacccacaccggcaccagaccctacaagtgcaacgactgcaacatggccttcgtgaccagcggcgagctggtgagacacagaagatacaagcacacccacgagaagcccttcaagtgcagcatgtgcaagtacgccagcgtggaggccagcaagctgaagagacacgtgagaagccacaccggcgagagacccttccagtgctgccagtgcagctacgccagcagagacacctacaagctgaagagacacatgagaacccacagcggcgagaagccctacgagtgccacatctgccacaccagattcacccagagcggcaccatgaagatccacatcctgcagaagcacggcgagaacgtgcccaagtaccagtgcccccactgcgccaccatcatcgccagaaagagcgacctgagagtgcacatgagaaacctgcacgcctacagcgccgccgagctgaagtgcagatactgcagcgccgtgttccacgagagatacgccctgatccagcaccagaagacccacaagaacgagaagagattcaagtgcaagcactgcagctacgcctgcaagcaggagagacacatgaccgcccacatcagaacccacaccggcgagaagcccttcacctgcctgagctgcaacaagtgcttcagacagaagcagctgctgaacgcccacttcagaaagtaccacgacgccaacttcatccccaccgtgtacaagtgcagcaagtgcggcaagggcttcagcagatggatcaacctgcacagacacagcgagaagtgcggcagcggcgaggccaagagcgccgccagcggcaagggcagaagaaccagaaagagaaagcagaccatcctgaaggaggccaccaagggccagaaggaggccgccaagggctggaaggaggccgccaacggcgacgaggccgccgccgaggaggccagcaccaccaagggcgagcagttccccggcgagatgttccccgtggcctgcagagagaccaccgccagagtgaaggaggaggtggacgagggcgtgacctgcgagatgctgctgaacaccatggacaagtag

SEQ ID NO: 75771 - DNA, 1992 bp, synthetic construct; identical to SEQ ID NO: 75770
  misc_feature 1..1992: note = Description of Artificial Sequence: Synthetic coding sequence
  source 1..1992: mol_type = other DNA

SEQ ID NO: 75772 - DNA, 1284 bp, synthetic construct
  misc_feature 1..1284: note = Description of Artificial Sequence: Synthetic coding sequence
  source 1..1284: mol_type = other DNA
atggccgccaccgagatcagcgtgctgagcgagcagttcaccaagatcaaggagctggagctgatgcccgagaagggcctgaaggaggaggagaaggacggcgtgtgcagagagaaggaccacagaagccccagcgagctggaggccgagagaaccagcggcgccttccaggacagcgtgctggaggaggaggtggagctggtgctggcccccagcgaggagagcgagaagtacatcctgaccctgcagaccgtgcacttcaccagcgaggccgtggagctgcaggacatgagcctgctgagcatccagcagcaggagggcgtgcaggtggtggtgcagcagcccggccccggcctgctgtggctggaggagggccccagacagagcctgcagcagtgcgtggccatcagcatccagcaggagctgtacagcccccaggagatggaggtgctgcagttccacgccctggaggagaacgtgatggtggccagcgaggacagcaagctggccgtgagcctggccgagaccaccggcctgatcaagctggaggaggagcaggagaagaaccagctgctggccgagagaaccaaggagcagctgttcttcgtggagaccatgagcggcgacgagagaagcgacgagatcgtgctgaccgtgagcaacagcaacgtggaggagcaggaggaccagcccaccgccggccaggccgacgccgagaaggccaagagcaccaagaaccagagaaagaccaagggcgccaagggcaccttccactgcgacgtgtgcatgttcaccagcagcagaatgagcagcttcaacagacacatgaagacccacaccagcgagaagccccacctgtgccacctgtgcctgaagaccttcagaaccgtgaccctgctgagaaaccacgtgaacacccacaccggcaccagaccctacaagtgcaacgactgcaacatggccttcgtgaccagcggcgagctggtgagacacagaagatacaagcacacccacgagaagcccttcaagtgcagcatgtgcaagtacgccagcgtggaggccagcaagctgaagagacacgtgagaagccacaccggcgagagacccttccagtgctgccagtgcagctacgccagcagagacacctacaagctgaagagacacatgagaacccacagcgaggccaccagcaagagaagcctgcaggagatccccagatgcaagttccaccccgactgcctgcagatgctgcaggtgtggcagagactgttccccctggactag

SEQ ID NO: 75773 - DNA, 1722 bp, synthetic construct
  misc_feature 1..1722: note = Description of Artificial Sequence: Synthetic coding sequence
  source 1..1722: mol_type = other DNA
atggccgccaccgagatcagcgtgctgagcgagcagttcaccaagatcaaggagctggagctgatgcccgagaagggcctgaaggaggaggagaaggacggcgtgtgcagagagaaggaccacagaagccccagcgagctggaggccgagagaaccagcggcgccttccaggacagcgtgctggaggaggaggtggagctggtgctggcccccagcgaggagagcgagaagtacatcctgaccctgcagaccgtgcacttcaccagcgaggccgtggagctgcaggacatgagcctgctgagcatccagcagcaggagggcgtgcaggtggtggtgcagcagcccggccccggcctgctgtggctggaggagggccccagacagagcctgcagcagtgcgtggccatcagcatccagcaggagctgtacagcccccaggagatggaggtgctgcagttccacgccctggaggagaacgtgatggtggccagcgaggacagcaagctggccgtgagcctggccgagaccaccggcctgatcaagctggaggaggagcaggagaagaaccagctgctggccgagagaaccaaggagcagctgttcttcgtggagaccatgagcggcgacgagagaagcgacgagatcgtgctgaccgtgagcaacagcaacgtggaggagcaggaggaccagcccaccgccggccaggccgacgccgagaaggccaagagcaccaagaaccagagaaagaccaagggcgccaagggcaccttccactgcgacgtgtgcatgttcaccagcagcagaatgagcagcttcaacagacacatgaagacccacaccagcgagaagccccacctgtgccacctgtgcctgaagaccttcagaaccgtgaccctgctgagaaaccacgtgaacacccacaccggcaccagaccctacaagtgcaacgactgcaacatggccttcgtgaccagcggcgagctggtgagacacagaagatacaagcacacccacgagaagcccttcaagtgcagcatgtgcaagtacgccagcgtggaggccagcaagctgaagagacacgtgagaagccacaccggcgagagacccttccagtgctgccagtgcagctacgccagcagagacacctacaagctgaagagacacatgagaacccacagcggcgagaagccctacgagtgccacatctgccacaccagattcacccagagcggcaccatgaagatccacatcctgcagaagcacggcgagaacgtgcccaagtaccagtgcccccactgcgccaccatcatcgccagaaagagcgacctgagagtgcacatgagaaacctgcacgcctacagcgccgccgagctgaagtgcagatactgcagcgccgtgttccacgagagatacgccctgatccagcaccagaagacccacaagaacgagaagagattcaagtgcaagcactgcagctacgcctgcaagcaggagagacacatgaccgcccacatcagaacccacaccggcgagaagcccttcacctgcctgagctgcaacaagtgcttcagacagaagcagctgctgaacgcccacttcagaaagtaccacgacgccaacttcatccccaccgtgtacaagtgcagcaagtgcggcaagggcttcagcagatggatcaccagcaagtggagcggcctgaagccccagaccttcatcacctag

SEQ ID NO: 75774 - DNA, 2103 bp, synthetic construct
  misc_feature 1..2103: note = Description of Artificial Sequence: Synthetic coding sequence
  source 1..2103: mol_type = other DNA
atggccgccaccgagatcagcgtgctgagcgagcagttcaccaagatcaaggagctggagctgatgcccgagaagggcctgaaggaggaggagaaggacggcgtgtgcagagagaaggaccacagaagccccagcgagctggaggccgagagaaccagcggcgccttccaggacagcgtgctggaggaggaggtggagctggtgctggcccccagcgaggagagcgagaagtacatcctgaccctgcagaccgtgcacttcaccagcgaggccgtggagctgcaggacatgagcctgctgagcatccagcagcaggagggcgtgcaggtggtggtgcagcagcccggccccggcctgctgtggctggaggagggccccagacagagcctgcagcagtgcgtggccatcagcatccagcaggagctgtacagcccccaggagatggaggtgctgcagttccacgccctggaggagaacgtgatggtggccagcgaggacagcaagctggccgtgagcctggccgagaccaccggcctgatcaagctggaggaggagcaggagaagaaccagctgctggccgagagaaccaaggagcagctgttcttcgtggagaccatgagcggcgacgagagaagcgacgagatcgtgctgaccgtgagcaacagcaacgtggaggagcaggaggaccagcccaccgccggccaggccgacgccgagaaggccaagagcaccaagaaccagagaaagaccaagggcgccaagggcaccttccactgcgacgtgtgcatgttcaccagcagcagaatgagcagcttcaacagacacatgaagacccacaccagcgagaagccccacctgtgccacctgtgcctgaagaccttcagaaccgtgaccctgctgagaaaccacgtgaacacccacaccggcaccagaccctacaagtgcaacgactgcaacatggccttcgtgaccagcggcgagctggtgagacacagaagatacaagcacacccacgagaagcccttcaagtgcagcatgtgcaagtacgccagcgtggaggccagcaagctgaagagacacgtgagaagccacaccggcgagagacccttccagtgctgccagtgcagctacgccagcagagacacctacaagctgaagagacacatgagaacccacagcggcgagaagccctacgagtgccacatctgccacaccagattcacccagagcggcaccatgaagatccacatcctgcagaagcacggcgagaacgtgcccaagtaccagtgcccccactgcgccaccatcatcgccagaaagagcgacctgagagtgcacatgagaaacctgcacgcctacagcgccgccgagctgaagtgcagatactgcagcgccgtgttccacgagagatacgccctgatccagcaccagaagacccacaagaacgagaagagattcaagtgcaagcactgcagctacgcctgcaagcaggagagacacatgaccgcccacatcagaacccacaccggcgagaagcccttcacctgcctgagctgcaacaagtgcttcagacagaagcagctgctgaacgcccacttcagaaagtaccacgacgccaacttcatccccaccgtgtacaagtgcagcaagtgcggcaagggcttcagcagatggatcaacctgcacagacacagcgagaagtgcggcagcggcgaggccaagagcgccgccagcggcaagggcagaagaaccagaaagagaaagcagaccatcctgaaggaggccaccaagggccagaaggaggccgccaagggctggaaggaggccgccaacggcgacgaggccgccgccgaggaggccagcaccaccaagggcgagcagttccccggcgagatgttccccgtggcctgcagagagaccaccgccagagtgaaggaggaggtggacgagggcgtgacctgcgagatgctgctgaacaccatggacaacagcgccggctgcaccggcagaatgatgctggtgagcgcctggctgctgggcagaccccaggagacctacaaccagggcagaagaagaagaggcagcagaagagtgacctggtag

SEQ ID NO: 75775 - DNA, 1356 bp, synthetic construct
  misc_feature 1..1356: note = Description of Artificial Sequence: Synthetic coding sequence
  source 1..1356: mol_type = other DNA
atggccgccaccgagatcagcgtgctgagcgagcagttcaccaagatcaaggagctggagctgatgcccgagaagggcctgaaggaggaggagaaggacggcgtgtgcagagagaaggaccacagaagccccagcgagctggaggccgagagaaccagcggcgccttccaggacagcgtgctggaggaggaggtggagctggtgctggcccccagcgaggagagcgagaagtacatcctgaccctgcagaccgtgcacttcaccagcgaggccgtggagctgcaggacatgagcctgctgagcatccagcagcaggagggcgtgcaggtggtggtgcagcagcccggccccggcctgctgtggctggaggagggccccagacagagcctgcagcagtgcgtggccatcagcatccagcaggagctgtacagcccccaggagatggaggtgctgcagttccacgccctggaggagaacgtgatggtggccagcgaggacagcaagctggccgtgagcctggccgagaccaccggcctgatcaagctggaggaggagcaggagaagaaccagctgctggccgagagaaccaaggagcagctgttcttcgtggagaccatgagcggcgacgagagaagcgacgagatcgtgctgaccgtgagcaacagcaacgtggaggagcaggaggaccagcccaccgccggccaggccgacgccgagaaggccaagagcaccaagaaccagagaaagaccaagggcgccaagggcaccttccactgcgacgtgtgcatgttcaccagcagcagaatgagcagcttcaacagacacatgaagacccacaccagcgagaagccccacctgtgccacctgtgcctgaagaccttcagaaccgtgaccctgctgagaaaccacgtgaacacccacaccggcaccagaccctacaagtgcaacgactgcaacatggccttcgtgaccagcggcgagctggtgagacacagaagatacaagcacacccacgagaagcccttcaagtgcagcatgtgcaagtacgccagcgtggaggccagcaagctgaagagacacgtgagaagccacaccggcgagagacccttccagtgctgccagtgcagctacgccagcagagacacctacaagctgaagagacacatgagaacccacagcggcgagaagccctacgagtgccacatctgccacaccagattcacccagagcggcaccatgaagatccacatcctgcagaagcacggcgagaacgtgcccaagtaccagtgcccccactgcgccaccatcatcgccagaaagagcgacctgagattcctgggcctgcccttcccctag

SEQ ID NO: 75776 - DNA, 1842 bp, synthetic construct
  misc_feature 1..1842: note = Description of Artificial Sequence: Synthetic coding sequence
  source 1..1842: mol_type = other DNA
atggccgccaccgagatcagcgtgctgagcgagcagttcaccaagatcaaggagctggagctgatgcccgagaagggcctgaaggaggaggagaaggacggcgtgtgcagagagaaggaccacagaagccccagcgagctggaggccgagagaaccagcggcgccttccaggacagcgtgctggaggaggaggtggagctggtgctggcccccagcgaggagagcgagaagtacatcctgaccctgcagaccgtgcacttcaccagcgaggccgtggagctgcaggacatgagcctgctgagcatccagcagcaggagggcgtgcaggtggtggtgcagcagcccggccccggcctgctgtggctggaggagggccccagacagagcctgcagcagtgcgtggccatcagcatccagcaggagctgtacagcccccaggagatggaggtgctgcagttccacgccctggaggagaacgtgatggtggccagcgaggacagcaagctggccgtgagcctggccgagaccaccggcctgatcaagctggaggaggagcaggagaagaaccagctgctggccgagagaaccaaggagcagctgttcttcgtggagaccatgagcggcgacgagagaagcgacgagatcgtgctgaccgtgagcaacagcaacgtggaggagcaggaggaccagcccaccgccggccaggccgacgccgagaaggccaagagcaccaagaaccagagaaagaccaagggcgccaagggcaccttccactgcgacgtgtgcatgttcaccagcagcagaatgagcagcttcaacagacacatgaagacccacaccagcgagaagccccacctgtgccacctgtgcctgaagaccttcagaaccgtgaccctgctgagaaaccacgtgaacacccacaccggcaccagaccctacaagtgcaacgactgcaacatggccttcgtgaccagcggcgagctggtgagacacagaagatacaagcacacccacgagaagcccttcaagtgcagcatgtgcaagtacgccagcgtggaggccagcaagctgaagagacacgtgagaagccacaccggcgagagacccttccagtgctgccagtgcagctacgccagcagagacacctacaagctgaagagacacatgagaacccacagcggcgtgcacatgagaaacctgcacgcctacagcgccgccgagctgaagtgcagatactgcagcgccgtgttccacgagagatacgccctgatccagcaccagaagacccacaagaacgagaagagattcaagtgcaagcactgcagctacgcctgcaagcaggagagacacatgaccgcccacatcagaacccacaccggcgagaagcccttcacctgcctgagctgcaacaagtgcttcagacagaagcagctgctgaacgcccacttcagaaagtaccacgacgccaacttcatccccaccgtgtacaagtgcagcaagtgcggcaagggcttcagcagatggatcaacctgcacagacacagcgagaagtgcggcagcggcgaggccaagagcgccgccagcggcaagggcagaagaaccagaaagagaaagcagaccatcctgaaggaggccaccaagggccagaaggaggccgccaagggctggaaggaggccgccaacggcgacgaggccgccgccgaggaggccagcaccaccaagggcgagcagttccccggcgagatgttccccgtggcctgcagagagaccaccgccagagtgaaggaggaggtggacgagggcgtgacctgcgagatgctgctgaacaccatggacaagtag

SEQ ID NO: 75777 - DNA, 1452 bp, synthetic construct
  misc_feature 1..1452: note = Description of Artificial Sequence: Synthetic coding sequence
  source 1..1452: mol_type = other DNA
atggccgccaccgagatcagcgtgctgagcgagcagttcaccaagatcaaggagctggagctgatgcccgagaagggcctgaaggaggaggagaaggacggcgtgtgcagagagaaggaccacagaagccccagcgagctggaggccgagagaaccagcggcgccttccaggacagcgtgctggaggaggaggtggagctggtgctggcccccagcgaggagagcgagaagtacatcctgaccctgcagaccgtgcacttcaccagcgaggccgtggagctgcaggacatgagcctgctgagcatccagcagcaggagggcgtgcaggtggtggtgcagcagcccggccccggcctgctgtggctggaggagggccccagacagagcctgcagcagtgcgtggccatcagcatccagcaggagctgtacagcccccaggagatggaggtgctgcagttccacgccctggaggagaacgtgatggtggccagcgaggacagcaagctggccgtgagcctggccgagaccaccggcctgatcaagctggaggaggagcaggagaagaaccagctgctggccgagagaaccaaggagcagctgttcttcgtggagaccatgagcggcgacgagagaagcgacgagatcgtgctgaccgtgagcaacagcaacgtggaggagcaggaggaccagcccaccgccggccaggccgacgccgagaaggccaagagcaccaagaaccagagaaagaccaagggcgccaagggcaccttccactgcgacgtgtgcatgttcaccagcagcagaatgagcagcttcaacagacacatgaagacccacaccagcgagaagccccacctgtgccacctgtgcctgaagaccttcagaaccgtgaccctgctgagaaaccacgtgaacacccacaccggcaccagaccctacaagtgcaacgactgcaacatggccttcgtgaccagcggcgagctggtgagacacagaagatacaagcacacccacgagaagcccttcaagtgcagcatgtgcaagtacgccagcgtggaggagagacacatgaccgcccacatcagaacccacaccggcgagaagcccttcacctgcctgagctgcaacaagtgcttcagacagaagcagctgctgaacgcccacttcagaaagtaccacgacgccaacttcatccccaccgtgtacaagtgcagcaagtgcggcaagggcttcagcagatggatcctgtgggtgggcaacagcgaggtggccgagctgggcggccccggcagcggccccctgctgagactgcagagcggctgcccccccggcctgcaccaccccaaggccggcctgggccccgaggaccccctgcccggccagctgagacacaccaccgccggcaccggcctgagcagcctgctgcagggccccctgtgcagagccgcctag

SEQ ID NO: 75778 - DNA, 1998 bp, synthetic construct
  misc_feature 1..1998: note = Description of Artificial Sequence: Synthetic coding sequence
  source 1..1998: mol_type = other DNA
atggccgccaccgagatcagcgtgctgagcgagcagttcaccaagatcaaggagctggagctgatgcccgagaagggcctgaaggaggaggagaaggacggcgtgtgcagagagaaggaccacagaagccccagcgagctggaggccgagagaaccagcggcgccttccaggacagcgtgctggaggaggaggtggagctggtgctggcccccagcgaggagagcgagaagtacatcctgaccctgcagaccgtgcacttcaccagcgaggccgtggagctgcaggacatgagcctgctgagcatccagcagcaggagggcgtgcaggtggtggtgcagcagcccggccccggcctgctgtggctggaggagggccccagacagagcctgcagcagtgcgtggccatcagcatccagcaggagctgtacagcccccaggagatggaggtgctgcagttccacgccctggaggagaacgtgatggtggccagcgaggacagcaagctggccgtgagcctggccgagaccaccggcctgatcaagctggaggaggagcaggagaagaaccagctgctggccgagagaaccaaggagcagctgttcttcgtggagaccatgagcggcgacgagagaagcgacgagatcgtgctgaccgtgagcaacagcaacgtggaggagcaggaggaccagcccaccgccggccaggccgacgccgagaaggccaagagcaccaagaaccagagaaagaccaagggcgccaagggcaccttccactgcgacgtgtgcatgttcaccagcagcagaatgagcagcttcaacagacacatgaagacccacaccagcgagaagccccacctgtgccacctgtgcctgaagaccttcagaaccgtgaccctgctgagaaaccacgtgaacacccacaccggcaccagaccctacaagtgcaacgactgcaacatggccttcgtgaccagcggcgagctggtgagacacagaagatacaagcacacccacgagaagcccttcaagtgcagcatgtgcaagtacgccagcgtggaggccagcaagctgaagagacacgtgagaagccacaccggcgagagacccttccagtgctgccagtgcagctacgccagcagagacacctacaagctgaagagacacatgagaacccacagcggcgagaagccctacgagtgccacatctgccacaccagattcacccagagcggcaccatgaagatccacatcctgcagaagcacggcgagaacgtgcccaagtaccagtgcccccactgcgccaccatcatcgccagaaagagcgacctgagagtgcacatgagaaacctgcacgcctacagcgccgccgagctgaagtgcagatactgcagcgccgtgttccacgagagatacgccctgatccagcaccagaagacccacaagaacgagaagagattcaagtgcaagcactgcagctacgcctgcaagcaggagagacacatgaccgcccacatcagaacccacaccggcgagaagcccttcacctgcctgagctgcaacaagtgcttcagacagaagcagctgctgaacgcccacttcagaaagtaccacgacgccaacttcatccccaccgtgtacaagtgcagcaagtgcggcaagggcttcagcagatggatcaacctgcacagacacagcgagaagtgcggcagcggcgaggccaagagcgccgccagcggcaagggcagaagaaccagaaagagaaagcagaccatcctgaaggaggccaccaagggccagaaggaggccgccaagggctggaaggaggccgccaacggcgacggcgtgatcagcgcccacagaaacctgtgcctgctgggcagcagcgacagccacgccagcgtgagcggcgccggcatcaccgacgccagacaccacgcctggctgatcgtgctgctgttcctggtggagatgggcttctaccacgtgagccacagctag

SEQ ID NO: 75779 - DNA, 1212 bp, synthetic construct
  misc_feature 1..1212: note = Description of Artificial Sequence: Synthetic coding sequence
  source 1..1212: mol_type = other DNA
atgttcaccagcagcagaatgagcagcttcaacagacacatgaagacccacaccagcgagaagccccacctgtgccacctgtgcctgaagaccttcagaaccgtgaccctgctgagaaaccacgtgaacacccacaccggcaccagaccctacaagtgcaacgactgcaacatggccttcgtgaccagcggcgagctggtgagacacagaagatacaagcacacccacgagaagcccttcaagtgcagcatgtgcaagtacgccagcgtggaggccagcaagctgaagagacacgtgagaagccacaccggcgagagacccttccagtgctgccagtgcagctacgccagcagagacacctacaagctgaagagacacatgagaacccacagcggcgagaagccctacgagtgccacatctgccacaccagattcacccagagcggcaccatgaagatccacatcctgcagaagcacggcgagaacgtgcccaagtaccagtgcccccactgcgccaccatcatcgccagaaagagcgacctgagagtgcacatgagaaacctgcacgcctacagcgccgccgagctgaagtgcagatactgcagcgccgtgttccacgagagatacgccctgatccagcaccagaagacccacaagaacgagaagagattcaagtgcaagcactgcagctacgcctgcaagcaggagagacacatgaccgcccacatcagaacccacaccggcgagaagcccttcacctgcctgagctgcaacaagtgcttcagacagaagcagctgctgaacgcccacttcagaaagtaccacgacgccaacttcatccccaccgtgtacaagtgcagcaagtgcggcaagggcttcagcagatggatcaacctgcacagacacagcgagaagtgcggcagcggcgaggccaagagcgccgccagcggcaagggcagaagaaccagaaagagaaagcagaccatcctgaaggaggccaccaagggccagaaggaggccgccaagggctggaaggaggccgccaacggcgacggcgtgatcagcgcccacagaaacctgtgcctgctgggcagcagcgacagccacgccagcgtgagcggcgccggcatcaccgacgccagacaccacgcctggctgatcgtgctgctgttcctggtggagatgggcttctaccacgtgagccacagctag

SEQ ID NO: 75780 - DNA, 1269 bp, synthetic construct
  misc_feature 1..1269: note = Description of Artificial Sequence: Synthetic coding sequence
  source 1..1269: mol_type = other DNA
atgagcggcgacgagagaagcgacgagatcgtgctgaccgtgagcaacagcaacgtggaggagcaggaggaccagcccaccgccggccaggccgacgccgagaaggccaagagcaccaagaaccagagaaagaccaagggcgccaagggcaccttccactgcgacgtgtgcatgttcaccagcagcagaatgagcagcttcaacagacacatgaagacccacaccagcgagaagccccacctgtgccacctgtgcctgaagaccttcagaaccgtgaccctgctgagaaaccacgtgaacacccacaccggcaccagaccctacaagtgcaacgactgcaacatggccttcgtgaccagcggcgagctggtgagacacagaagatacaagcacacccacgagaagcccttcaagtgcagcatgtgcaagtacgccagcgtggaggccagcaagctgaagagacacgtgagaagccacaccggcgagagacccttccagtgctgccagtgcagctacgccagcagagacacctacaagctgaagagacacatgagaacccacagcggcgagaagccctacgagtgccacatctgccacaccagattcacccagagcggcaccatgaagatccacatcctgcagaagcacggcgagaacgtgcccaagtaccagtgcccccactgcgccaccatcatcgccagaaagagcgacctgagagtgcacatgagaaacctgcacgcctacagcgccgccgagctgaagtgcagatactgcagcgccgtgttccacgagagatacgccctgatccagcaccagaagacccacaagaacgagaagagattcaagtgcaagcactgcagctacgcctgcaagcaggagagacacatgaccgcccacatcagaacccacaccggcgagaagcccttcacctgcctgagctgcaacaagtgcttcagacagaagcagctgctgaacgcccacttcagaaagtaccacgacgccaacttcatccccaccgtgtacaagtgcagcaagtgcggcaagggcttcagcagatggatcctgtgggtgggcaacagcgaggtggccgagctgggcggccccggcagcggccccctgctgagactgcagagcggctgcccccccggcctgcaccaccccaaggccggcctgggccccgaggaccccctgcccggccagctgagacacaccaccgccggcaccggcctgagcagcctgctgcagggccccctgtgcagagccgcctag

SEQ ID NO: 75781 - DNA, 1296 bp, synthetic construct
  misc_feature 1..1296: note = Description of Artificial Sequence: Synthetic coding sequence
  source 1..1296: mol_type = other DNA
atgttccacagccccagaagactgtgcagcgccctgctgcagagagacgcccccggcctgagaagactgcccgcccccggcctgagaagacccctgagcccccccgccgccgtgcccagacccgccagccccagactgctggccgccgccagcgccgccagcggcgccgccagaagctgcagcagaaccgtgtgcagcatgggcaccggcaccagcagactgtacagcgccctggccaagaccctgaacagcagcgccgccagccagcaccccgagtacctggtgagccccgaccccgagcacctggagcccatcgaccccaaggagctgctggaggagtgcagagccgtgctgcacaccagaccccccagattccagagagacttcgtggacctgagaaccgactgccccagcacccacccccccatcagagtgatgcagtggaacatcctggcccaggccctgggcgagggcaaggacaacttcgtgcagtgccccgtggaggccctgaagtgggaggagagaaagtgcctgatcctggaggagatcctggcctaccagcccgacatcctgtgcctgcaggaggtggaccactacttcgacaccttccagcccctgctgagcagactgggctaccagggcaccttcttccccaagccctggagcccctgcctggacgtggagcacaacaacggccccgacggctgcgccctgttcttcctgcagaacagattcaagctggtgaacagcgccaacatcagactgaccgccatgaccctgaagaccaaccaggtggccatcgcccagaccctggagtgcaaggagagcggcagacagttctgcatcgccgtgacccacctgaaggccagaaccggctgggagagattcagaagcgcccagggctgcgacctgctgcagaacctgcagaacatcacccagggcgccaagatccccctgatcgtgtgcggcgacttcaacgccgagcccaccgaggaggtgtacaagcacttcgccagcagcagcctgaacctgaacagcgcctacaagctgctgagcgccgacggccagagcgagcccccctacaccacctggaagatcagaaccagcggcgagtgcagacacaccctggactacatctggtacagcaagcacgccctgaacgtgagaagcgccctggacctgctgaccgaggagcagatcggccccaacagactgcccagcttcaactaccccagcgaccacctgagcctggtgtgcgacttcagcttcaccgaggagagcgacggcctgagctag

SEQ ID NO: 75782 - DNA, 2133 bp, synthetic construct
  misc_feature 1..2133: note = Description of Artificial Sequence: Synthetic coding sequence
  source 1..2133: mol_type = other DNA
atgagcagaagccccgacgccaaggaggaccccgtggagtgccccctgtgcatggagcccctggagatcgacgacatcaacttcttcccctgcacctgcggctaccagatctgcagattctgctggcacagaatcagaaccgacgagaacggcctgtgccccgcctgcagaaagccctaccccgaggaccccgccgtgtacaagcccctgagccaggaggagctgcagagaatcaagaacgagaagaagcagaagcagaacgagagaaagcagaagatcagcgagaacagaaagcacctggccagcgtgagagtggtgcagaagaacctggtgttcgtggtgggcctgagccagagactggccgaccccgaggtgctgaagagacccgagtacttcggcaagttcggcaagatccacaaggtggtgatcaacaacagcaccagctacgccggcagccagggccccagcgccagcgcctacgtgacctacatcagaagcgaggacgccctgagagccatccagtgcgtgaacaacgtggtggtggacggcagaaccctgaaggccagcctgggcaccaccaagtactgcagctacttcctgaagaacatgcagtgccccaagcccgactgcatgtacctgcacgagctgggcgacgaggccgccagcttcaccaaggaggagatgcaggccggcaagcaccaggagtacgagcagaagctgctgcaggagctgtacaagctgaaccccaacttcctgcagctgagcaccggcagcgtggacaagaacaagaacaaggtgacccccctgcagagccccatcgacaagcccagcgacagcctgagcatcggcaacggcgacaacagccagcagatcagcaacagcgacacccccagccccccccccggcctgagcaagagcaaccccgtgatccccatcagcagcagcaaccacagcgccagaagccccttcgagggcgccgtgaccgagagccagagcctgttcagcgacaacttcagacaccccaaccccatccccagcggcctgccccccttccccagcagcccccagaccagcagcgactggcccaccgcccccgagccccagagcctgttcaccagcgagaccatccccgtgagcagcagcaccgactggcaggccgccttcggcttcggcagcagcaagcagcccgaggacgacctgggcttcgaccccttcgacgtgaccagaaaggccctggccgacctgatcgagaaggagctgagcgtgcaggaccagcccagcctgagccccaccagcctgcagaacagcagcagccacaccaccaccgccaagggccccggcagcggcttcctgcaccccgccgccgccaccaacgccaacagcctgaacagcaccttcagcgtgctgccccagagattcccccagttccagcagcacagagccgtgtacaacagcttcagcttccccggccaggccgccagatacccctggatggccttccccagaaacagcatcatgcacctgaaccacaccgccaaccccaccagcaacagcaacttcctggacctgaacctgcccccccagcacaacaccggcctgggcggcatccccgtggccgacaacagcagcagcgtggagagcctgaacatgaaggagtggcaggacggcctgagagccctgctgcccaacatcaacatcaacttcggcggcctgcccaacagcagcagccccagcaacgccaaccacagcgcccccaccagcaacaccgccaccaccgacagcctgagctgggacagccccggcagctggaccgaccccgccatcatcaccggcatccccgccagcagcggcaacagcctggacagcctgcaggacgacaaccccccccactggctgaagagcctgcaggccctgaccgagatggacggccccagcgccgcccccagccagacccaccacagcgcccccttcagcacccagatccccctgcacagagccagctggaacccctaccccccccccagcaaccccagcagcttccacagccccccccccggcttccagaccgccttcagaccccccagcaagacccccaccgacctgctgcagagcagcaccctggacagacactag

SEQ ID NO: 75783 - DNA, 3684 bp, synthetic construct
  misc_feature 1..3684: note = Description of Artificial Sequence: Synthetic coding sequence
  source 1..3684: mol_type = other DNA
atgacccagaaggtggaggagctgaaggagaccgtgaaggaggagttcatgccctgggtgagccagtacctggtgatgaagagagtgagcatcgagcccaacttccacagcctgtacagcaacttcctggacaccctgaagaaccccgagttcaacaagatggtgctgaacgagacctacagaaacatcaaggacctggacgtgaagagcctgctgctggaggcctacgtgaagggccagcaggagctgctgtacgtggtgcccttcgtggccaaggtgctggagagcagcatcagaagcgtggtgttcagaccccccaacccctggaccatggccatcatgaacgtgctggccgagctgcaccaggagcacgacctgaagctgaacctgaagttcgagatcgaggtgctgtgcaagaacctggccctggacatcaacgagctgaagcccggcaacctgctgaaggacaaggacagactgaagaacctggacgagcagctgagcgcccccaagaaggacgtgaagcagcccgaggagctgccccccatcaccaccaccaccaccagcaccacccccgccaccaacaccacctgcaccgccaccgtgcccccccagccccagtacagctaccacgacatcaacgtgtacagcctggccggcctggccccccacatcaccctgaaccccaccatccccctgttccaggcccacccccagctgaagcagtgcgtgagacaggccatcgagagagccgtgcaggagctggtgcaccccgtggtggacagaagcatcaagatcgccatgaccacctgcgagcagatcgtgagaaaggacttcgccctggacagcgaggagagcagaatgagaatcgccgcccaccacatgatgagaaacctgaccgccggcatggccatgatcacctgcagagagcccctgctgatgagcatcagcaccaacctgaagaacagcttcgccagcgccctgagaaccgccagcccccagcagagagagatgatggaccaggccgccgcccagctggcccaggacaactgcgagctggcctgctgcttcatccagaagaccgccgtggagaaggccggccccgagatggacaagagactggccaccgagttcgagctgagaaagcacgccagacaggagggcagaagatactgcgaccccgtggtgctgacctaccaggccgagagaatgcccgagcagatcagactgaaggtgggcggcgtggaccccaagcagctggccgtgtacgaggagttcgccagaaacgtgcccggcttcctgcccaccaacgacctgagccagcccaccggcttcctggcccagcccatgaagcaggcctgggccaccgacgacgtggcccagatctacgacaagtgcatcaccgagctggagcagcacctgcacgccatcccccccaccctggccatgaacccccaggcccaggccctgagaagcctgctggaggtggtggtgctgagcagaaacagcagagacgccatcgccgccctgggcctgctgcagaaggccgtggagggcctgctggacgccaccagcggcgccgacgccgacctgctgctgagatacagagagtgccacctgctggtgctgaaggccctgcaggacggcagagcctacggcagcccctggtgcaacaagcagatcaccagatgcctgatcgagtgcagagacgagtacaagtacaacgtggaggccgtggagctgctgatcagaaaccacctggtgaacatgcagcagtacgacctgcacctggcccagagcatggagaacggcctgaactacatggccgtggccttcgccatgcagctggtgaagatcctgctggtggacgagagaagcgtggcccacgtgaccgaggccgacctgttccacaccatcgagaccctgatgagaatcaacgcccacagcagaggcaacgcccccgagggcctgccccagctgatggaggtggtgagaagcaactacgaggccatgatcgacagagcccacggcggccccaacttcatgatgcacagcggcatcagccaggccagcgagtacgacgacccccccggcctgagagagaaggccgagtacctgctgagagagtgggtgaacctgtaccacagcgccgccgccggcagagacagcaccaaggccttcagcgccttcgtgggccagatgcaccagcagggcatcctgaagaccgacgacctgatcaccagattcttcagactgtgcaccgagatgtgcgtggagatcagctacagagcccaggccgagcagcagcacaaccccgccgccaaccccaccatgatcagagccaagtgctaccacaacctggacgccttcgtgagactgatcgccctgctggtgaagcacagcggcgaggccaccaacaccgtgaccaagatcaacctgctgaacaaggtgctgggcatcgtggtgggcgtgctgctgcaggaccacgacgtgagacagagcgagttccagcagctgccctaccacagaatcttcatcatgctgctgctggagctgaacgcccccgagcacgtgctggagaccatcaacttccagaccctgaccgccttctgcaacaccttccacatcctgagacccaccaaggcccccggcttcgtgtacgcctggctggagctgatcagccacagaatcttcatcgccagaatgctggcccacaccccccagcagaagggctggcccatgtacgcccagctgctgatcgacctgttcaagtacctggcccccttcctgagaaacgtggagctgaccaagcccatgcagatcctgtacaagggcaccctgagagtgctgctggtgctgctgcacgacttccccgagttcctgtgcgactaccactacggcttctgcgacgtgatcccccccaactgcatccagctgagaaacctgatcctgagcgccttccccagaaacatgagactgcccgaccccttcacccccaacctgaaggtggacatgctgagcgagatcaacatcgcccccagaatcctgaccaacttcaccggcgtgatgcccccccagttcaagaaggacctggacagctacctgaagaccagaagccccgtgaccttcctgagcgacctgagaagcaacctgcaggtgagcaacgagcccggcaacagatacaacctgcagctgatcaacgccctggtgctgtacgtgggcacccaggccatcgcccacatccacaacaagggcagcacccccagcatgagcaccatcacccacagcgcccacatggacatcttccagaacctggccgtggacctggacaccgagggcagatacctgttcctgaacgccatcgccaaccagctgagataccccaacagccacacccactacttcagctgcaccatgctgtacctgttcgccgaggccaacaccgaggccatccaggagcagatcaccagagtgctgctggagagactgatcgtgaacagaccccacccctggggcctgctgatcaccttcatcgagctgatcaagaaccccgccttcaagttctggaaccacgagttcgtgcactgcgcccccgagatcgagaagctgttccagagcgtggcccagtgctgcatgggccagaagcaggcccagcaggtgatggagggcaccggcgccagctag

SEQ ID NO: 75784 - DNA, 7131 bp, synthetic construct
  misc_feature 1..7131: note = Description of Artificial Sequence: Synthetic coding sequence
  source 1..7131: mol_type = other DNA
atgaacctggacagcctgagcctggccctgagccagatcagctacctggtggacaacctgaccaagaagaactacagagccagccagcaggagatccagcacatcgtgaacagacacggccccgaggccgacagacacctgctgagatgcctgttcagccacgtggacttcagcggcgacggcaagagcagcggcaaggacttccaccagacccagttcctgatccaggagtgcgccctgctgatcaccaagcccaacttcatcagcaccctgagctacgccatcgacaaccccctgcactaccagaagagcctgaagcccgccccccacctgttcgcccagctgagcaaggtgctgaagctgagcaaggtgcaggaggtgatcttcggcctggccctgctgaacagcagcagcagcgacctgagaggcttcgccgcccagttcatcaagcagaagctgcccgacctgctgagaagctacatcgacgccgacgtgagcggcaaccaggagggcggcttccaggacatcgccatcgaggtgctgcacctgctgctgagccacctgctgttcggccagaagggcgccttcggcgtgggccaggagcagatcgacgccttcctgaagaccctgagaagagacttcccccaggagagatgccccgtggtgctggcccccctgctgtaccccgagaagagagacatcctgatggacagaatcctgcccgacagcggcggcgtggccaagaccatgatggagagcagcctggccgacttcatgcaggaggtgggctacggcttctgcgccagcatcgaggagtgcagaaacatcatcgtgcagttcggcgtgagagaggtgaccgccgcccaggtggccagagtgctgggcatgatggccagaacccacagcggcctgaccgacggcatccccctgcagagcatcagcgcccccggcagcggcatctggagcgacggcaaggacaagagcgacggcgcccaggcccacacctggaacgtggaggtgctgatcgacgtgctgaaggagctgaaccccagcctgaacttcaaggaggtgacctacgagctggaccaccccggcttccagatcagagacagcaagggcctgcacaacgtggtgtacggcatccagagaggcctgggcatggaggtgttccccgtggacctgatctacagaccctggaagcacgccgagggccagctgagcttcatccagcacagcctgatcaaccccgagatcttctgcttcgccgactacccctgccacaccgtggccaccgacatcctgaaggccccccccgaggacgacaacagagagatcgccacctggaagagcctggacctgatcgagagcctgctgagactggccgaggtgggccagtacgagcaggtgaagcagctgttcagcttccccatcaagcactgccccgacatgctggtgctggccctgctgcagatcaacaccagctggcacaccctgagacacgagctgatcagcaccctgatgcccatcttcctgggcaaccaccccaacagcgccatcatcctgcactacgcctggcacggccagggccagagccccagcatcagacagctgatcatgcacgccatggccgagtggtacatgagaggcgagcagtacgaccaggccaagctgagcagaatcctggacgtggcccaggacctgaaggccctgagcatgctgctgaacggcacccccttcgccttcgtgatcgacctggccgccctggccagcagaagagagtacctgaagctggacaagtggctgaccgacaagatcagagagcacggcgagcccttcatccaggcctgcatgaccttcctgaagagaagatgccccagcatcctgggcggcctggcccccgagaaggaccagcccaagagcgcccagctgccccccgagaccctggccaccatgctggcctgcctgcaggcctgcgccggcagcgtgagccaggagctgagcgagaccatcctgaccatggtggccaactgcagcaacgtgatgaacaaggccagacagcccccccccggcgtgatgcccaagggcagaccccccagcgccagcagcctggacgccatcagccccgtgcagatcgaccccctggccggcatgaccagcctgagcatcggcggcagcgccgccccccacacccagagcatgcagggcttcccccccaacctgggcagcgccttcagcaccccccagagccccgccaaggccttcccccccctgagcacccccaaccagaccaccgccttcagcggcatcggcggcctgagcagccagctgcccgtgggcggcctgggcaccggcagcctgaccggcatcggcaccggcgccctgggcctgcccgccgtgaacaacgaccccttcgtgcagagaaagctgggcaccagcggcctgaaccagcccaccttccagcagagcaagatgaagcccagcgacctgagccaggtgtggcccgaggccaaccagcacttcagcaaggagatcgacgacgaggccaacagctacttccagagaatctacaaccaccccccccaccccaccatgagcgtggacgaggtgctggagatgctgcagagattcaaggacagcaccatcaagagagagagagaggtgttcaactgcatgctgagaaacctgttcgaggagtacagattcttcccccagtaccccgacaaggagctgcacatcaccgcctgcctgttcggcggcatcatcgagaagggcctggtgacctacatggccctgggcctggccctgagatacgtgctggaggccctgagaaagcccttcggcagcaagatgtactacttcggcatcgccgccctggacagattcaagaacagactgaaggactacccccagtactgccagcacctggccagcatcagccacttcatgcagttcccccaccacctgcaggagtacatcgagtacggccagcagagcagagacccccccgtgaagatgcagggcagcatcaccacccccggcagcatcgccctggcccaggcccaggcccaggcccaggtgcccgccaaggcccccctggccggccaggtgagcaccatggtgaccaccagcaccaccaccaccgtggccaagaccgtgaccgtgaccagacccaccggcgtgagcttcaagaaggacgtgccccccagcatcaacaccaccaacatcgacaccctgctggtggccaccgaccagaccgagagaatcgtggagccccccgagaacatccaggagaagatcgccttcatcttcaacaacctgagccagagcaacatgacccagaaggtggaggagctgaaggagaccgtgaaggaggagttcatgccctgggtgagccagtacctggtgatgaagagagtgagcatcgagcccaacttccacagcctgtacagcaacttcctggacaccctgaagaaccccgagttcaacaagatggtgctgaacgagacctacagaaacatcaaggtgctgctgaccagcgacaaggccgccgccaacttcagcgacagaagcctgctgaagaacctgggccactggctgggcatgatcaccctggccaagaacaagcccatcctgcacaccgacctggacgtgaagagcctgctgctggaggcctacgtgaagggccagcaggagctgctgtacgtggtgcccttcgtggccaaggtgctggagagcagcatcagaagcgtggtgttcagaccccccaacccctggaccatggccatcatgaacgtgctggccgagctgcaccaggagcacgacctgaagctgaacctgaagttcgagatcgaggtgctgtgcaagaacctggccctggacatcaacgagctgaagcccggcaacctgctgaaggacaaggacagactgaagaacctggacgagcagctgagcgcccccaagaaggacgtgaagcagcccgaggagctgccccccatcaccaccaccaccaccagcaccacccccgccaccaacaccacctgcaccgccaccgtgcccccccagccccagtacagctaccacgacatcaacgtgtacagcctggccggcctggccccccacatcaccctgaaccccaccatccccctgttccaggcccacccccagctgaagcagtgcgtgagacaggccatcgagagagccgtgcaggagctggtgcaccccgtggtggacagaagcatcaagatcgccatgaccacctgcgagcagatcgtgagaaaggacttcgccctggacagcgaggagagcagaatgagaatcgccgcccaccacatgatgagaaacctgaccgccggcatggccatgatcacctgcagagagcccctgctgatgagcatcagcaccaacctgaagaacagcttcgccagcgccctgagaaccgccagcccccagcagagagagatgatggaccaggccgccgcccagctggcccaggacaactgcgagctggcctgctgcttcatccagaagaccgccgtggagaaggccggccccgagatggacaagagactggccaccgagttcgagctgagaaagcacgccagacaggagggcagaagatactgcgaccccgtggtgctgacctaccaggccgagagaatgcccgagcagatcagactgaaggtgggcggcgtggaccccaagcagctggccgtgtacgaggagttcgccagaaacgtgcccggcttcctgcccaccaacgacctgagccagcccaccggcttcctggcccagcccatgaagcaggcctgggccaccgacgacgtggcccagatctacgacaagtgcatcaccgagctggagcagcacctgcacgccatcccccccaccctggccatgaacccccaggcccaggccctgagaagcctgctggaggtggtggtgctgagcagaaacagcagagacgccatcgccgccctgggcctgctgcagaaggccgtggagggcctgctggacgccaccagcggcgccgacgccgacctgctgctgagatacagagagtgccacctgctggtgctgaaggccctgcaggacggcagagcctacggcagcccctggtgcaacaagcagatcaccagatgcctgatcgagtgcagagacgagtacaagtacaacgtggaggccgtggagctgctgatcagaaaccacctggtgaacatgcagcagtacgacctgcacctggcccagagcatggagaacggcctgaactacatggccgtggccttcgccatgcagctggtgaagatcctgctggtggacgagagaagcgtggcccacgtgaccgaggccgacctgttccacaccatcgagaccctgatgagaatcaacgcccacagcagaggcaacgcccccgagggcctgccccagctgatggaggtggtgagaagcaactacgaggccatgatcgacagagcccacggcggccccaacttcatgatgcacagcggcatcagccaggccagcgagtacgacgacccccccggcctgagagagaaggccgagtacctgctgagagagtgggtgaacctgtaccacagcgccgccgccggcagagacagcaccaaggccttcagcgccttcgtgggccagatgcaccagcagggcatcctgaagaccgacgacctgatcaccagattcttcagactgtgcaccgagatgtgcgtggagatcagctacagagcccaggccgagcagcagcacaaccccgccgccaaccccaccatgatcagagccaagtgctaccacaacctggacgccttcgtgagactgatcgccctgctggtgaagcacagcggcgaggccaccaacaccgtgaccaagatcaacctgctgaacaaggtgctgggcatcgtggtgggcgtgctgctgcaggaccacgacgtgagacagagcgagttccagcagctgccctaccacagaatcttcatcatgctgctgctggagctgaacgcccccgagcacgtgctggagaccatcaacttccagaccctgaccgccttctgcaacaccttccacatcctgagacccaccaaggcccccggcttcgtgtacgcctggctggagctgatcagccacagaatcttcatcgccagaatgctggcccacaccccccagcagaagggctggcccatgtacgcccagctgctgatcgacctgttcaagtacctggcccccttcctgagaaacgtggagctgaccaagcccatgcagatcctgtacaagggcaccctgagagtgctgctggtgctgctgcacgacttccccgagttcctgtgcgactaccactacggcttctgcgacgtgatcccccccaactgcatccagctgagaaacctgatcctgagcgccttccccagaaacatgagactgcccgaccccttcacccccaacctgaaggtggacatgctgagcgagatcaacatcgcccccagaatcctgaccaacttcaccggcgtgatgcccccccagttcaagaaggacctggacagctacctgaagaccagaagccccgtgaccttcctgagcgacctgagaagcaacctgcaggtgagcaacgagcccggcaacagatacaacctgcagctgatcaacgccctggtgctgtacgtgggcacccaggccatcgcccacatccacaacaagggcagcacccccagcatgagcaccatcacccacagcgcccacatggacatcttccagaacctggccgtggacctggacaccgagggcagatacctgttcctgaacgccatcgccaaccagctgagataccccaacagccacacccactacttcagctgcaccatgctgtacctgttcgccgaggccaacaccgaggccatccaggagcagatcaccagagtgctgctggagagactgatcgtgaacagaccccacccctggggcctgctgatcaccttcatcgagctgatcaagaaccccgccttcaagttctggaaccacgagttcgtgcactgcgcccccgagatcgagaagctgttccagagcgtggcccagtgctgcatgggccagaagcaggcccagcaggtgatggagggcaccggcgccagctag

SEQ ID NO: 75785 - DNA, 6453 bp, synthetic construct
  misc_feature 1..6453: note = Description of Artificial Sequence: Synthetic coding sequence
  source 1..6453: mol_type = other DNA
atgaacctggacagcctgagcctggccctgagccagatcagctacctggtggacaacctgaccaagaagaactacagagccagccagcaggagatccagcacatcgtgaacagacacggccccgaggccgacagacacctgctgagatgcctgttcagccacgtggacttcagcggcgacggcaagagcagcggcaaggacttccaccagacccagttcctgatccaggagtgcgccctgctgatcaccaagcccaacttcatcagcaccctgagctacgccatcgacaaccccctgcactaccagaagagcctgaagcccgccccccacctgttcgcccagctgagcaaggtgctgaagctgagcaaggtgcaggaggtgatcttcggcctggccctgctgaacagcagcagcagcgacctgagaggcttcgccgcccagttcatcaagcagaagctgcccgacctgctgagaagctacatcgacgccgacgtgagcggcaaccaggagggcggcttccaggacatcgccatcgaggtgctgcacctgctgctgagccacctgctgttcggccagaagggcgccttcggcgtgggccaggagcagatcgacgccttcctgaagaccctgagaagagacttcccccaggagagatgccccgtggtgctggcccccctgctgtaccccgagaagagagacatcctgatggacagaatcctgcccgacagcggcggcgtggccaagaccatgatggagagcagcctggccgacttcatgcaggaggtgggctacggcttctgcgccagcatcgaggagtgcagaaacatcatcgtgcagttcggcgtgagagaggtgaccgccgcccaggtggccagagtgctgggcatgatggccagaacccacagcggcctgaccgacggcatccccctgcagagcatcagcgcccccggcagcggcatctggagcgacggcaaggacaagagcgacggcgcccaggcccacacctggaacgtggaggtgctgatcgacgtgctgaaggagctgaaccccagcctgaacttcaaggaggtgacctacgagctggaccaccccggcttccagatcagagacagcaagggcctgcacaacgtggtgtacggcatccagagaggcctgggcatggaggtgttccccgtggacctgatctacagaccctggaagcacgccgagggccagctgagcttcatccagcacagcctgatcaaccccgagatcttctgcttcgccgactacccctgccacaccgtggccaccgacatcctgaaggccccccccgaggacgacaacagagagatcgccacctggaagagcctggacctgatcgagagcctgctgagactggccgaggtgggccagtacgagcaggtgaagcagctgttcagcttccccatcaagcactgccccgacatgctggtgctggccctgctgcagatcaacaccagctggcacaccctgagacacgagctgatcagcaccctgatgcccatcttcctgggcaaccaccccaacagcgccatcatcctgcactacgcctggcacggccagggccagagccccagcatcagacagctgatcatgcacgccatggccgagtggtacatgagaggcgagcagtacgaccaggccaagctgagcagaatcctggacgtggcccaggacctgaaggccctgagcatgctgctgaacggcacccccttcgccttcgtgatcgacctggccgccctggccagcagaagagagtacctgaagctggacaagtggctgaccgacaagatcagagagcacggcgagcccttcatccaggcctgcatgaccttcctgaagagaagatgccccagcatcctgggcggcctggcccccgagaaggaccagcccaagagcgcccagctgccccccgagaccctggccaccatgctggcctgcctgcaggcctgcgccggcagcgtgagccaggagctgagcgagaccatcctgaccatggtggccaactgcagcaacgtgatgaacaaggccagacagcccccccccggcgtgatgcccaagggcagaccccccagcgccagcagcctggacgccatcagccccgtgcagatcgaccccctggccggcatgaccagcctgagcatcggcggcagcgccgccccccacacccagagcatgcagggcttcccccccaacctgggcagcgccttcagcaccccccagagccccgccaaggccttcccccccctgagcacccccaaccagaccaccgccttcagcggcatcggcggcctgagcagccagctgcccgtgggcggcctgggcaccggcagcctgaccggcatcggcaccggcgccctgggcctgcccgccgtgaacaacgaccccttcgtgcagagaaagctgggcaccagcggcctgaaccagcccaccttccagcagaccgacctgagccaggtgtggcccgaggccaaccagcacttcagcaaggagatcgacgacgaggccaacagctacttccagagaatctacaaccaccccccccaccccaccatgagcgtggacgaggtgctggagatgctgcagagattcaaggacagcaccatcaagagagagagagaggtgttcaactgcatgctgagaaacctgttcgaggagtacagattcttcccccagtaccccgacaaggagctgcacatcaccgcctgcctgttcggcggcatcatcgagaagggcctggtgacctacatggccctgggcctggccctgagatacgtgctggaggccctgagaaagcccttcggcagcaagatgtactacttcggcatcgccgccctggacagattcaagaacagactgaaggactacccccagtactgccagcacctggccagcatcagccacttcatgcagttcccccaccacctgcaggagtacatcgagtacggccagcagagcagagacccccccgtgaagatgcagggcagcatcaccacccccggcagcatcgccctggcccaggcccaggcccaggcccaggtgcccgccaaggcccccctggccggccaggtgagcaccatggtgaccaccagcaccaccaccaccgtggccaagaccgtgaccgtgaccagacccaccggcgtgagcttcaagaaggacgtgccccccagcatcaacaccaccaacatcgacaccctgctggtggccaccgaccagaccgagagaatcgtggagccccccgagaacatccaggagaagatcgccttcatcttcaacaacctgagccagagcaacatgacccagaaggtggaggagctgaaggagaccgtgaaggaggagttcatgccctgggtgagccagtacctggtgatgaagagagtgagcatcgagcccaacttccacagcctgtacagcaacttcctggacaccctgaagaaccccgagttcaacaagatggtgctgaacgagacctacagaaacatcaaggtgctgctgaccagcgacaaggccgccgccaacttcagcgacagaagcctgctgaagaacctgggccactggctgggcatgatcaccctggccaagaacaagcccatcctgcacaccgacctggacgtgaagagcctgctgctggaggcctacgtgaagggccagcaggagctgctgtacgtggtgcccttcgtggccaaggtgctggagagcagcatcagaagcgtggtgttcagaccccccaacccctggaccatggccatcatgaacgtgctggccgagctgcaccaggagcacgacctgaagctgaacctgaagttcgagatcgaggtgctgtgcaagaacctggccctggacatcaacgagctgaagcccggcaacctgctgaaggacaaggacagactgaagaacctggacgagcagctgagcgcccccaagaaggacgtgaagcagcccgaggagctgccccccatcaccaccaccaccaccagcaccacccccgccaccaacaccacctgcaccgccaccgtgcccccccagccccagtacagctaccacgacatcaacgtgtacagcctggccggcctggccccccacatcaccctgaaccccaccatccccctgttccaggcccacccccagctgaagcagtgcgtgagacaggccatcgagagagccgtgcaggagctggtgcaccccgtggtggacagaagcatcaagatcgccatgaccacctgcgagcagatcgtgagaaaggacttcgccctggacagcgaggagagcagaatgagaatcgccgcccaccacatgatgagaaacctgaccgccggcatggccatgatcacctgcagagagcccctgctgatgagcatcagcaccaacctgaagaacagcttcgccagcgccctgagaaccgccagcccccagcagagagagatgatggaccaggccgccgcccagctggcccaggacaactgcgagctggcctgctgcttcatccagaagaccgccgtggagaaggccggccccgagatggacaagagactggccaccgagttcgagctgagaaagcacgccagacaggagggcagaagatactgcgaccccgtggtgctgacctaccaggccgagagaatgcccgagcagatcagactgaaggtgggcggcgtggaccccaagcagctggccgtgtacgaggagttcgccagaaacgtgcccggcttcctgcccaccaacgacctgagccagcccaccggcttcctggcccagcccatgaagcaggcctgggccaccgacgacgtggcccagatctacgacaagtgcatcaccgagctggagcagcacctgcacgccatcccccccaccctggccatgaacccccaggcccaggccctgagaagcctgctggaggtggtggtgctgagcagaaacagcagagacgccatcgccgccctgggcctgctgcagaaggccgtggagggcctgctggacgccaccagcggcgccgacgccgacctgctgctgagatacagagagtgccacctgctggtgctgaaggccctgcaggacggcagagcctacggcagcccctggtgcaacaagcagatcaccagatgcctgatcgagtgcagagacgagtacaagtacaacgtggaggccgtggagctgctgatcagaaaccacctggtgaacatgcagcagtacgacctgcacctggcccagagcatggagaacggcctgaactacatggccgtggccttcgccatgcagctggtgaagatcctgctggtggacgagagaagcgtggcccacgtgaccgaggccgacctgttccacaccatcgagaccctgatgagaatcaacgcccacagcagaggcaacgcccccgagggcctgccccagctgatggaggtggtgagaagcaactacgaggccatgatcgacagagcccacggcggccccaacttcatgatgcacagcggcatcagccaggccagcgagtacgacgacccccccggcctgagagagaaggccgagtacctgctgagagagtgggtgaacctgtaccacagcgccgccgccggcagagacagcaccaaggccttcagcgccttcgtgggccagatgcaccagcagggcatcctgaagaccgacgacctgatcaccagattcttcagactgtgcaccgagatgtgcgtggagatcagctacagagcccaggccgagcagcagcacaaccccgccgccaaccccaccatgatcagagccaagtgctaccacaacctggacgccttcgtgagactgatcgccctgctggtgaagcacagcggcgaggccaccaacaccgtgaccaagatcaacctgctgaacaaggtgctgggcatcgtggtgggcgtgctgctgcaggaccacgacgtgagacagagcgagttccagcagctgccctaccacagaatcttcatcatgctgctgctggagctgaacgcccccgagcacgtgctggagaccatcaacttccagaccctgaccgccttctgcaacaccttccacatcctgagacccaccaaggcccccggcttcgtgtacgcctggctggagctgatcagccacagaatcttcatcgccagaatgctggcccacaccccccagcagaagggctggcccatgtacgcccagctgctgatcgacctgttcaagtacctggcccccttcctgagaaacgtggagctgaccaagcccatgcagatcctgtacaagggcaccctgagagtgctgctggtgctgctgcacgacttccccgagttcctgtgcgactaccactacggcttctgcgacgtgatcccccccaactgcatccagctgagaaacctgatcctgagcgccttccccagaaacatgagactgcccgaccccttcacccccaacctgaaggagatcatgctgtag

SEQ ID NO: 75786 - DNA, 3213 bp, synthetic construct
  misc_feature 1..3213: note = Description of Artificial Sequence: Synthetic coding sequence
  source 1..3213: mol_type = other DNA
atgctgctgaacggcacccccttcgccttcgtgatcgacctggccgccctggccagcagaagagagtacctgaagctggacaagtggctgaccgacaagatcagagagcacggcgagcccttcatccaggcctgcatgaccttcctgaagagaagatgccccagcatcctgggcggcctggcccccgagaaggaccagcccaagagcgcccagctgccccccgagaccctggccaccatgctggcctgcctgcaggcctgcgccggcagcgtgagccaggagctgagcgagaccatcctgaccatggtggccaactgcagcaacgtgatgaacaaggccagacagcccccccccggcgtgatgcccaagggcagaccccccagcgccagcagcctggacgccatcagccccgtgcagatcgaccccctggccggcatgaccagcctgagcatcggcggcagcgccgccccccacacccagagcatgcagggcttcccccccaacctgggcagcgccttcagcaccccccagagccccgccaaggccttcccccccctgagcacccccaaccagaccaccgccttcagcggcatcggcggcctgagcagccagctgcccgtgggcggcctgggcaccggcagcctgaccggcatcggcaccggcgccctgggcctgcccgccgtgaacaacgaccccttcgtgcagagaaagctgggcaccagcggcctgaaccagcccaccttccagcagagcaagatgaagcccagcgacctgagccaggtgtggcccgaggccaaccagcacttcagcaaggagatcgacgacgaggccaacagctacttccagagaatctacaaccaccccccccaccccaccatgagcgtggacgaggtgctggagatgctgcagagattcaaggacagcaccatcaagagagagagagaggtgttcaactgcatgctgagaaacctgttcgaggagtacagattcttcccccagtaccccgacaaggagctgcacatcaccgcctgcctgttcggcggcatcatcgagaagggcctggtgacctacatggccctgggcctggccctgagatacgtgctggaggccctgagaaagcccttcggcagcaagatgtactacttcggcatcgccgccctggacagattcaagaacagactgaaggactacccccagtactgccagcacctggccagcatcagccacttcatgcagttcccccaccacctgcaggagtacatcgagtacggccagcagagcagagacccccccgtgaagatgcagggcagcatcaccacccccggcagcatcgccctggcccaggcccaggcccaggcccaggtgcccgccaaggcccccctggccggccaggtgagcaccatggtgaccaccagcaccaccaccaccgtggccaagaccgtgaccgtgaccagacccaccggcgtgagcttcaagaaggacgtgccccccagcatcaacaccaccaacatcgacaccctgctggtggccaccgaccagaccgagagaatcgtggagccccccgagaacatccaggagaagatcgccttcatcttcaacaacctgagccagagcaacatgacccagaaggtggaggagctgaaggagaccgtgaaggaggagttcatgccctgggtgagccagtacctggtgatgaagagagtgagcatcgagcccaacttccacagcctgtacagcaacttcctggacaccctgaagaacctgatcaccagattcttcagactgtgcaccgagatgtgcgtggagatcagctacagagcccaggccgagcagcagcacaaccccgccgccaaccccaccatgatcagagccaagtgctaccacaacctggacgccttcgtgagactgatcgccctgctggtgaagcacagcggcgaggccaccaacaccgtgaccaagatcaacctgctgaacaaggtgctgggcatcgtggtgggcgtgctgctgcaggaccacgacgtgagacagagcgagttccagcagctgccctaccacagaatcttcatcatgctgctgctggagctgaacgcccccgagcacgtgctggagaccatcaacttccagaccctgaccgccttctgcaacaccttccacatcctgagacccaccaaggcccccggcttcgtgtacgcctggctggagctgatcagccacagaatcttcatcgccagaatgctggcccacaccccccagcagaagggctggcccatgtacgcccagctgctgatcgacctgttcaagtacctggcccccttcctgagaaacgtggagctgaccaagcccatgcagatcctgtacaagggcaccctgagagtgctgctggtgctgctgcacgacttccccgagttcctgtgcgactaccactacggcttctgcgacgtgatcccccccaactgcatccagctgagaaacctgatcctgagcgccttccccagaaacatgagactgcccgaccccttcacccccaacctgaaggtggacatgctgagcgagatcaacatcgcccccagaatcctgaccaacttcaccggcgtgatgcccccccagttcaagaaggacctggacagctacctgaagaccagaagccccgtgaccttcctgagcgacctgagaagcaacctgcaggtgagcaacgagcccggcaacagatacaacctgcagctgatcaacgccctggtgctgtacgtgggcacccaggccatcgcccacatccacaacaagggcagcacccccagcatgagcaccatcacccacagcgcccacatggacatcttccagaacctggccgtggacctggacaccgagggcagatacctgttcctgaacgccatcgccaaccagctgagataccccaacagccacacccactacttcagctgcaccatgctgtacctgttcgccgaggccaacaccgaggccatccaggagcagatcaccagagtgctgctggagagactgatcgtgaacagaccccacccctggggcctgctgatcaccttcatcgagctgatcaagaaccccgccttcaagttctggaaccacgagttcgtgcactgcgcccccgagatcgagaagctgttccagagcgtggcccagtgctgcatgggccagaagcaggcccagcaggtgatggagggcaccggcgccagctag

SEQ ID NO: 75787 - DNA, 4656 bp, synthetic construct
  misc_feature 1..4656: note = Description of Artificial Sequence: Synthetic coding sequence
  source 1..4656: mol_type = other DNA
atgaacctggacagcctgagcctggccctgagccagatcagctacctggtggacaacctgaccaagaagaactacagagccagccagcaggagatccagcacatcgtgaacagacacggccccgaggccgacagacacctgctgagatgcctgttcagccacgtggacttcagcggcgacggcaagagcagcggcaaggacttccaccagacccagttcctgatccaggagtgcgccctgctgatcaccaagcccaacttcatcagcaccctgagctacgccatcgacaaccccctgcactaccagaagagcctgaagcccgccccccacctgttcgcccagctgagcaaggtgctgaagctgagcaaggtgcaggaggtgatcttcggcctggccctgctgaacagcagcagcagcgacctgagaggcttcgccgcccagttcatcaagcagaagctgcccgacctgctgagaagctacatcgacgccgacgtgagcggcaaccaggagggcggcttccaggacatcgccatcgaggtgctgcacctgctgctgagccacctgctgttcggccagaagggcgccttcggcgtgggccaggagcagatcgacgccttcctgaagaccctgagaagagacttcccccaggagagatgccccgtggtgctggcccccctgctgtaccccgagaagagagacatcctgatggacagaatcctgcccgacagcggcggcgtggccaagaccatgatggagagcagcctggccgacttcatgcaggaggtgggctacggcttctgcgccagcatcgaggagtgcagaaacatcatcgtgcagttcggcgtgagagaggtgaccgccgcccaggtggccagagtgctgggcatgatggccagaacccacagcggcctgaccgacggcatccccctgcagagcatcagcgcccccggcagcggcatctggagcgacggcaaggacaagagcgacggcgcccaggcccacacctggaacgtggaggtgctgatcgacgtgctgaaggagctgaaccccagcctgaacttcaaggaggtgacctacgagctggaccaccccggcttccagatcagagacagcaagggcctgcacaacgtggtgtacggcatccagagaggcctgggcatggaggtgttccccgtggacctgatctacagaccctggaagcacgccgagggccagctgagcttcatccagcacagcctgatcaaccccgagatcttctgcttcgccgactacccctgccacaccgtggccaccgacatcctgaaggccccccccgaggacgacaacagagagatcgccacctggaagagcctggacctgatcgagagcctgctgagactggccgaggtgggccagtacgagcaggtgaagcagctgttcagcttccccatcaagcactgccccgacatgctggtgctggccctgctgcagatcaacaccagctggcacaccctgagacacgagctgatcagcaccctgatgcccatcttcctgggcaaccaccccaacagcgccatcatcctgcactacgcctggcacggccagggccagagccccagcatcagacagctgatcatgcacgccatggccgagtggtacatgagaggcgagcagtacgaccaggccaagctgagcagaatcctggacgtggcccaggacctgaaggccctgagcatgctgctgaacggcacccccttcgccttcgtgatcgacctggccgccctggccagcagaagagagtacctgaagctggacaagtggctgaccgacaagatcagagagcacggcgagcccttcatccaggcctgcatgaccttcctgaagagaagatgccccagcatcctgggcggcctggcccccgagaaggaccagcccaagagcgcccagctgccccccgagaccctggccaccatgctggcctgcctgcaggcctgcgccggcagcgtgagccaggagctgagcgagaccatcctgaccatggtggccaactgcagcaacgtgatgaacaaggccagacagcccccccccggcgtgatgcccaagggcagaccccccagcgccagcagcctggacgccatcagccccgtgcagatcgaccccctggccggcatgaccagcctgagcatcggcggcagcgccgccccccacacccagagcatgcagggcttcccccccaacctgggcagcgccttcagcaccccccagagccccgccaaggccttcccccccctgagcacccccaaccagaccaccgccttcagcggcatcggcggcctgagcagccagctgcccgtgggcggcctgggcaccggcagcctgaccggcatcggcaccggcgccctgggcctgcccgccgtgaacaacgaccccttcgtgcagagaaagctgggcaccagcggcctgaaccagcccaccttccagcagagcaagatgaagcccagcgacctgagccaggtgtggcccgaggccaaccagcacttcagcaaggagatcgacgacgaggccaacagctacttccagagaatctacaaccaccccccccaccccaccatgagcgtggacgaggtgctggagatgctgcagagattcaaggacagcaccatcaagagagagagagaggtgttcaactgcatgctgagaaacctgttcgaggagtacagattcttcccccagtaccccgacaaggagctgcacatcaccgcctgcctgttcggcggcatcatcgagaagggcctggtgacctacatggccctgggcctggccctgagatacgtgctggaggccctgagaaagcccttcggcagcaagatgtactacttcggcatcgccgccctggacagattcaagaacagactgaaggactacccccagtactgccagcacctggccagcatcagccacttcatgcagttcccccaccacctgcaggagtacatcgagtacggccagcagagcagagacccccccgtgaagatgcagggcagcatcaccacccccggcagcatcgccctggcccaggcccaggcccaggcccaggtgcccgccaaggcccccctggccggccaggtgagcaccatggtgaccaccagcaccaccaccaccgtggccaagaccgtgaccgtgaccagacccaccggcgtgagcttcaagaaggacgtgccccccagcatcaacaccaccaacatcgacaccctgctggtggccaccgaccagaccgagagaatcgtggagccccccgagaacatccaggagaagatcgccttcatcttcaacaacctgagccagagcaacatgacccagaaggtggaggagctgaaggagaccgtgaaggaggagttcatgccctgggtgagccagtacctggtgatgaagagagtgagcatcgagcccaacttccacagcctgtacagcaacttcctggacaccctgaagaaccccgagttcaacaagatggtgctgaacgagacctacagaaacatcaaggtgctgctgaccagcgacaaggccgccgccaacttcagcgacagaagcctgctgaagaacctgggccactggctgggcatgatcaccctggccaagaacaagcccatcctgcacaccgacctggacgtgaagagcctgctgctggaggcctacgtgaagggccagcaggagctgctgtacgtggtgcccttcgtggccaaggtgctggagagcagcatcagaagcgtggtgttcagaccccccaacccctggaccatggccatcatgaacgtgctggccgagctgcaccaggagcacgacctgaagctgaacctgaagttcgagatcgaggtgctgtgcaagaacctggccctggacatcaacgagctgaagcccggcaacctgctgaaggacaaggacagactgaagaacctggacgagcagctgagcgcccccaagaaggacgtgaagcagcccgaggagctgccccccatcaccaccaccaccaccagcaccacccccgccaccaacaccacctgcaccgccaccgtgcccccccagccccagtacagctaccacgacatcaacgtgtacagcctggccggcctggccccccacatcaccctgaaccccaccatccccctgttccaggcccacccccagctgaagcagtgcgtgagacaggccatcgagagagccgtgcaggagctggtgcaccccgtggtggacagaagcatcaagatcgccatgaccacctgcgagcagatcgtgagaaaggacttcgccctggacagcgaggagagcagaatgagaatcgccgcccaccacatgatgagaaacctgaccgccggcatggccatgatcacctgcagagagcccctgctgatgagcatcagcaccaacctgaagaacagcttcgccagcgccctgagagtgagctggctgttcccctggtacagatacaagacctactactgcctgagcgtgatcatcttcttcttcgtgtacatctggcactgggccctgcccctgatcctgaacaaccaccacatctgcctgatgagcagcatcatcctggactgcaacagcgtgagacagagcatcatgagcgtgtgcttcttcttcttcctgctgtacagccagcacgacgtgtag

SEQ ID NO: 75788 - DNA, 951 bp, synthetic construct
  misc_feature 1..951: note = Description of Artificial Sequence: Synthetic coding sequence
  source 1..951: mol_type = other DNA
atgctgctgctggagctgaacgcccccgagcacgtgctggagaccatcaacttccagaccctgaccgccttctgcaacaccttccacatcctgagacccaccaaggcccccggcttcgtgtacgcctggctggagctgatcagccacagaatcttcatcgccagaatgctggcccacaccccccagcagaagggctggcccatgtacgcccagctgctgatcgacctgttcaagtacctggcccccttcctgagaaacgtggagctgaccaagcccatgcagatcctgtacaagggcaccctgagagtgctgctggtgctgctgcacgacttccccgagttcctgtgcgactaccactacggcttctgcgacgtgatcccccccaactgcatccagctgagaaacctgatcctgagcgccttccccagaaacatgagactgcccgaccccttcacccccaacctgaaggtggacatgctgagcgagatcaacatcgcccccagaatcctgaccaacttcaccggcgtgatgcccccccagttcaagaaggacctggacagctacctgaagaccagaagccccgtgaccttcctgagcgacctgagaagcaacctgcaggtgagcaacgagcccggcaacagatacaacctgcagctgatcaacgccctggtgctgtacgtgggcacccaggccatcgcccacatccacaacaagggcagcacccccagcatgagcaccatcacccacagcgcccacatggacatcttccagaacctggccgtggacctggacaccgagggcagatacctgttcctgaacgccatcgccaaccagagcggcacccagatcgccaccctgaccaccagcgtggccccctgctgcaccttcctgcagagacccatcagaaagcccagcaagaacagaagccaggagttcagctggaacggctag

SEQ ID NO: 75789 - DNA, 2778 bp, synthetic construct
  misc_feature 1..2778: note = Description of Artificial Sequence: Synthetic coding sequence
  source 1..2778: mol_type = other DNA
atggacagaagcggcttcggcgagatcagcagccccgtgatcagagaggccgaggtgaccagaaccgccagaaagcagagcgcccagaagagagtgctgctgcaggccagccaggacgagaacttcggcaacaccacccccagaaaccaggtgatccccagaacccccagcagcttcagacagcccttcacccccaccagcagaagcctgctgagacagcccgacatcagctgcatcctgggcaccggcggcaagagccccagactgacccagagcagcggcttcttcggcaacctgagcatggtgaccaacctggacgacagcaactgggccgccgccttcagcagccagagaagcggcctgttcaccaacaccgagccccacagcatcaccgaggacgtgaccatcagcgccgtgatgctgagagaggacgaccccggcgaggccgccagcatgagcatgttcagcgacttcctgcagagcttcctgaagcacagcagcagcaccgtgttcgacctggtggaggagtacgagaacatctgcggcagccaggtgaacatcctgagcaagatcgtgagcagagccacccccggcctgcagaagttcagcaagaccgccagcatgctgtggctgctgcagcaggagatggtgacctggagactgctggccagcctgtacagagacagaatccagagcgccctggaggaggagagcgtgttcgccgtgaccgccgtgaacgccagcgagaagaccgtggtggaggccctgttccagagagacagcctggtgagacagagccagctggtggtggactggctggagagcatcgccaaggacgagatcggcgagttcagcgacaacatcgagttctacgccaagagcgtgtactgggagaacaccctgcacaccctgaagcagagacagctgaccagctacgtgggcagcgtgagacccctggtgaccgagctggaccccgacgcccccatcagacagaagatgcccctggacgacctggacagagaggacgaggtgagactgctgaagtacctgttcaccctgatcagagccggcatgaccgaggaggcccagagactgtgcaagagatgcggccaggcctggagagccgccaccctggagggctggaagctgtaccacgaccccaacgtgaacggcggcaccgagctggagcccgtggagggcaacccctacagaagaatctggaagatcagctgctggagaatggccgaggacgagctgttcaacagatacgagagagccatctacgccgccctgagcggcaacctgaagcagctgctgcccgtgtgcgacacctgggaggacaccgtgtgggcctacttcagagtgatggtggacagcctggtggagcaggagatccagaccagcgtggccaccctggacgagaccgaggagctgcccagagagtacctgggcgccaactggaccctggagaaggtgttcgaggagctgcaggccaccgacaagaagagagtgctggaggagaaccaggagcactaccacatcgtgcagaagttcctgatcctgggcgacatcgacggcctgatggacgagttcagcaagtggctgagcaagagcagaaacaacctgcccggccacctgctgagattcatgacccacctgatcctgttcttcagaaccctgggcctgcagaccaaggaggaggtgagcatcgaggtgctgaagacctacatccagctgctgatcagagagaagcacaccaacctgatcgccttctacacctgccacctgccccaggacctggccgtggcccagtacgccctgttcctggagagcgtgaccgagttcgagcagagacaccactgcctggagctggccaaggaggccgacctggacgtggccaccatcaccaagaccgtggtggagaacatcagaaagaaggacaacggcgagttcagccaccacgacctggcccccgccctggacaccggcaccaccgaggaggacagactgaagatcgacgtgatcgactggctggtgttcgaccccgcccagagagccgaggccctgaagcagggcaacgccatcatgagaaagttcctggccagcaagaagcacgaggccgccaaggaggtgttcgtgaagatcccccaggacagcatcgccgagatctacaaccagtgcgaggagcagggcatggagagccccctgcccgccgaggacgacaacgccatcagagagcacctgtgcatcagagcctacctggaggcccacgagaccttcaacgagtggttcaagcacatgaacagcgtgccccagaagcccgccctgatcccccagcccaccttcaccgagaaggtggcccacgagcacaaggagaagaagtacgagatggacttcggcatctggaagggccacctggacgccctgaccgccgacgtgaaggagaagatgtacaacgtgctgctgttcgtggacggcggctggatggtggacgtgagagaggacgccaaggaggaccacgagagaacccaccagatggtgctgctgagaaagctgtgcctgcccatgctgtgcttcctgctgcacaccatcctgcacagcaccggccagtaccaggagtgcctgcagctggccgacatggtgagcagcgagagacacaagctgtacctggtgttcagcaaggaggagctgagaaagctgctgcagaagctgagagagagcagcctgatgctgctggaccagggcctggaccccctgggctacgagatccagctgtag

SEQ ID NO: 75790 - DNA, 1623 bp, synthetic construct
  misc_feature 1..1623: note = Description of Artificial Sequence: Synthetic coding sequence
  source 1..1623: mol_type = other DNA
atggtgagaaccgacggccacaccctgagcgagaagagaaactaccaggtgaccaacagcatgttcggcgccagcagaaagaagttcgtggagggcgtggacagcgactaccacgacgagaacatgtactacagccagagcagcatgttcccccacagaagcgagaaggacatgctggccagccccagcaccagcggccagctgagccagttcggcgccagcctgtacggccagcagagcgccctgggcctgcccatgagaggcatgagcaacaacaccccccagctgaacagaagcctgagccagggcacccagctgcccagccacgtgacccccaccaccggcgtgcccaccatgagcctgcacaccccccccagccccagcagaggcatcctgcccatgaaccccagaaacatgatgaaccacagccaggtgggccagggcatcggcatccccagcagaaccaacagcatgagcagcagcggcctgggcagccccaacagaagcagccccagcatcatctgcatgcccaagcagcagcccagcagacagcccttcaccgtgaacagcatgagcggcttcggcatgaacagaaaccaggccttcggcatgaacaacagcctgagcagcaacatcttcaacggcaccgacggcagcgagaacgtgaccggcctggacctgagcgacttccccgccctggccgacagaaacagaagagagggcagcggcaaccccacccccctgatcaaccccctggccggcagagccccctacgtgggcatggtgaccaagcccgccaacgagcagagccaggacttcagcatccacaacgaggacttccccgccctgcccggcagcagctacaaggaccccaccagcagcaacgacgacagcaagagcaacctgaacaccagcggcaagaccaccagcagcaccgacggccccaagttccccggcgacaagagcagcaccacccagaacaacaaccagcagaagaagggcatccaggtgctgcccgacggcagagtgaccaacatcccccagggcatggtgaccgaccagttcggcatgatcggcctgctgaccttcatcagagccgccgagaccgaccccggcatggtgcacctggccctgggcagcgacctgaccaccctgggcctgaacctgaacagccccgagaacctgtaccccaagttcgccagcccctgggccagcagcccctgcagaccccaggacatcgacttccacgtgcccagcgagtacctgaccaacatccacatcagagacaagctggccgccatcaagctgggcagatacggcgaggacctgctgttctacctgtactacatgaacggcggcgacgtgctgcagctgctggccgccgtggagctgttcaacagagactggagataccacaaggaggagagagtgtggatcaccagagcccccggcatggagcccaccatgaagaccaacacctacgagagaggcacctactacttcttcgactgcctgaactggagaaaggtggccaaggagttccacctggagtacgacaagctggaggagagaccccacctgcccagcaccttcaactacaaccccgcccagcaggccttctag

SEQ ID NO: 75791 - DNA, 78 bp, synthetic construct
  misc_feature 1..78: note = Description of Artificial Sequence: Synthetic coding sequence
  source 1..78: mol_type = other DNA
atggtgagaaccgacggccacaccctgagcgagaagagaaactaccaggtgaccaacagcatgttcggcgccagctag

SEQ ID NO: 75792 - DNA, 552 bp, synthetic construct
  misc_feature 1..552: note = Description of Artificial Sequence: Synthetic coding sequence
  source 1..552: mol_type = other DNA
atggtgagaaccgacggccacaccctgagcgagaagagaaactaccaggtgaccaacagcatgttcggcgccagcagaaagaagttcgtggagggcgtggacagcgactaccacgacgagaacatgtactacagccagagcagcatgttcccccacagaagcgagaaggacatgctggccagccccagcaccagcggccagctgagccagttcggcgccagcctgtacggccagcagagcgccctgggcctgcccatgagaggcatgagcaacaacaccccccagctgaacagaagcctgagccagggcacccagctgcccagccacgtgacccccaccaccggcgtgcccaccatgagcctgcacaccccccccagccccagcagaggcatcctgcccatgaaccccagaaacatgatgaaccacagccaggtgggccagggcatcggcatccccagcagaaccaacagcatgagcagcagcggcctgggcagccccaacagaagcagccccagcatcatctgcatgcccaagcagcagcccagcagatag

SEQ ID NO: 75793 - DNA, 1623 bp, synthetic construct; identical to SEQ ID NO: 75790
  misc_feature 1..1623: note = Description of Artificial Sequence: Synthetic coding sequence
  source 1..1623: mol_type = other DNA

SEQ ID NO: 75794 - DNA, 576 bp, synthetic construct
  misc_feature 1..576: note = Description of Artificial Sequence: Synthetic coding sequence
  source 1..576: mol_type = other DNA
atggtgaccgaccagttcggcatgatcggcctgctgaccttcatcagagccgccgagaccgaccccggcatggtgcacctggccctgggcagcgacctgaccaccctgggcctgaacctgaacagccccgagaacctgtaccccaagttcgccagcccctgggccagcagcccctgcagaccccaggacatcgacttccacgtgcccagcgagtacctgaccaacatccacatcagagacaagctggccgccatcaagctgggcagatacggcgaggacctgctgttctacctgtactacatgaacggcggcgacgtgctgcagctgctggccgccgtggagctgttcaacagagactggagataccacaaggaggagagagtgtggatcaccagagcccccggcatggagcccaccatgaagaccaacacctacgagagaggcacctactacttcttcgactgcctgaactggagaaaggtggccaaggagttccacctggagtacgacaagctggaggagagaccccacctgcccagcaccttcaactacaaccccgcccagcaggccttctag

SEQ ID NO: 75795 - DNA, 966 bp, synthetic construct
  misc_feature 1..966: note = Description of Artificial Sequence: Synthetic coding sequence
  source 1..966: mol_type = other DNA
atggtgagaaccgacggccacaccctgagcgagaagagaaactaccaggtgaccaacagcatgttcggcgccagcagaaagaagttcgtggagggcgtggacagcgactaccacgacgagaacatgtactacagccagagcagcatgttcccccacagaagcgagaaggacatgctggccagccccagcaccagcggccagctgagccagttcggcgccagcctgtacggccagcagagcgccctgggcctgcccatgagaggcatgagcaacaacaccccccagctgaacagaagcctgagccagggcacccagctgcccagccacgtgacccccaccaccggcgtgcccaccatgagcctgcacaccccccccagccccagcagaggcatcctgcccatgaaccccagaaacatgatgaaccacagccaggtgggccagggcatcggcatccccagcagaaccaacagcatgagcagcagcggcctgggcagccccaacagaagcagccccagcatcatctgcatgcccaagcagcagcccagcagacagcccttcaccgtgaacagcatgagcggcttcggcatgaacagaaaccaggccttcggcatgaacaacagcctgagcagcaacatcttcaacggcaccgacggcagcgagaacgtgaccggcctggacctgagcgacttccccgccctggccgacagaaacagaagagagggcagcggcaaccccacccccctgatcaaccccctggccggcagagccccctacgtgggcatggtgaccaagcccgccaacgagcagagccaggacttcagcatccacaacgaggacttccccgccctgcccggcagcagctacaaggaccccaccagcagcaacgacgacagcaagagcaacctgaacaccagcggcaagaccaccagcagcaccgacggccccaagttccccggcgacaagtag

SEQ ID NO: 75796 - DNA, 978 bp, synthetic construct
  misc_feature 1..978: note = Description of Artificial Sequence: Synthetic coding sequence
  source 1..978: mol_type = other DNA
atgagcaccgccagagagcagcccatcttcagcaccagagcccacgtgttccagatcgaccccgccaccaagagaaactggatccccgccggcaagcacgccctgaccgtgagctacttctacgacgccaccagaaacgtgtacagaatcatcagcatcggcggcgccaaggccatcatcaacagcaccgtgacccccaacatgaccttcaccaagaccagccagaagttcggccagtgggccgacagcagagccaacaccgtgtacggcctgggcttcgccagcgagcagcacctgacccaggtgccccccagccccctggtgagcgccaacggccccggcgaggagaagctgttcagaagccagagcgccgacgcccccggccccaccgagagagagagactgaagaagatgctgagcgagggcagcgtgggcgaggtgcagtgggaggccgagttcttcgccctgcaggacagcaacaacaagctggccggcgccctgagagaggccaacgccgccgccgcccagtggagacagcagctggaggcccagagagccgaggccgagagactgagacagagagtggccgagctggaggcccaggccgccagcgaggtgacccccaccggcgagaaggagggcctgggccagggccagagcctggagcagctggaggccctggtgcagaccaaggaccaggagatccagaccctgaagagccagaccggcggccccagagaggccctggaggccgccgagagagaggagacccagcagaaggtgcaggacctggagaccagaaacgccgagctggagcaccagctgagagccatggagagaagcctggaggaggccagagccgagagagagagagccagagccgaggtgggcagagccgcccagctgctggacgtgagcctgttcgagctgagcgagctgagagagggcctggccagactggccgaggccgccccctag

SEQ ID NO: 75797 - DNA, 1716 bp, synthetic construct
  misc_feature 1..1716: note = Description of Artificial Sequence: Synthetic coding sequence
  source 1..1716: mol_type = other DNA
atgctggagaccatcctgagaatgctggacaacgacagcatcctggtggacgccatcagaaagatcaaggacgacgtggagtactacgtggacagcagccaggaccccgacttcgaggagaacgagttcctgtacgacgacctggacctggaggacatcccccaggccctggtggccaccagcccccccagccacagccacatggaggacgagatcttcaaccagagcagcagcacccccaccagcaccaccagcagcagccccatcccccccagccccgccaactgcaccaccgagaacagcgaggacgacaagaagagaggcagaagcaccgacagcgaggtgagccagagccccgccaagaacggcagcaagcccgtgcacagcaaccagcacccccagagccccgccgtgccccccacctaccccagcggccccccccccgccgccagcgccctgagcaccacccccggcaacaacggcgtgcccgcccccgccgccccccccagcgccctgggccccaaggccagccccgcccccagccacaacagcggcacccccgccccctacgcccaggccgtggccccccccgcccccagcggccccagcaccacccagcccagaccccccagcgtgcagcccagcggcggcggcggcggcggcagcggcggcggcggcagcagcagcagcagcaacagcagcgccggcggcggcgccggcaagcagaacggcgccaccagctacagcagcgtggtggccgacagccccgccgaggtggccctgagcagcagcggcggcaacaacgccagcagccaggccctgggcccccccagcggcccccacaaccccccccccagcaccagcaaggagcccagcgccgccgcccccaccggcgccggcggcgtggcccccggcagcggcaacaacagcggcggccccagcctgctggtgcccctgcccgtgaacccccccagcagccccacccccagcttcagcgacgccaaggccgccggcgccctgctgaacggccccccccagttcagcaccgcccccgagatcaaggcccccgagcccctgagcagcctgaagagcatggccgagagagccgccatcagcagcggcatcgaggaccccgtgcccaccctgcacctgaccgagagagacatcatcctgagcagcaccagcgccccccccgccagcgcccagccccccctgcagctgagcgaggtgaacatccccctgagcctgggcgtgtgccccctgggccccgtgcccctgaccaaggagcagctgtaccagcaggccatggaggaggccgcctggcaccacatgccccaccccagcgacagcgagagaatcagacagtacctgcccagaaacccctgccccacccccccctaccaccaccagatgccccccccccacagcgacaccgtggagttctaccagagactgagcaccgagaccctgttcttcatcttctactacctggagcccagagacgtgagaaccgcctgggtggacagcgaggccggccccctgagacacaccagcgcccccctgcccgtggcccactggctgaccagaggccccagccccgccctgctgcagcagccccagagcagacccacccccctgtgcagcagcgcccacagccaggccagcctggagaccaccggcgagctgagcagccccctgcccacccccctgctgtag

SEQ ID NO: 75798 - DNA, 2262 bp, synthetic construct
  misc_feature 1..2262: note = Description of Artificial Sequence: Synthetic coding sequence
  source 1..2262: mol_type = other DNA
atggccgacaagagaaagctgcagggcgagatcgacagatgcctgaagaaggtgagcgagggcgtggagcagttcgaggacatctggcagaagctgcacaacgccgccaacgccaaccagaaggagaagtacgaggccgacctgaagaaggagatcaagaagctgcagagactgagagaccagatcaagacctgggtggccagcaacgagatcaaggacaagagacagctgatcgacaacagaaagctgatcgagacccagatggagagattcaaggtggtggagagagagaccaagaccaaggcctacagcaaggagggcctgggcctggcccagaaggtggaccccgcccagaaggagaaggaggaggtgggccagtggctgaccaacaccatcgacaccctgaacatgcaggtggaccagttcgagagcgaggtggagagcctgagcgtgcagaccagaaagaagaagggcgacaaggacaagcaggacagaatcgagggcctgaagagacacatcgagaagcacagataccacgtgagaatgctggagaccatcctgagaatgctggacaacgacagcatcctggtggacgccatcagaaagatcaaggacgacgtggagtactacgtggacagcagccaggaccccgacttcgaggagaacgagttcctgtacgacgacctggacctggaggacatcccccaggccctggtggccaccagcccccccagccacagccacatggaggacgagatcttcaaccagagcagcagcacccccaccagcaccaccagcagcagccccatcccccccagccccgccaactgcaccaccgagaacagcgaggacgacaagaagagaggcagaagcaccgacagcgaggtgagccagagccccgccaagaacggcagcaagcccgtgcacagcaaccagcacccccagagccccgccgtgccccccacctaccccagcggccccccccccgccgccagcgccctgagcaccacccccggcaacaacggcgtgcccgcccccgccgccccccccagcgccctgggccccaaggccagccccgcccccagccacaacagcggcacccccgccccctacgcccaggccgtggccccccccgcccccagcggccccagcaccacccagcccagaccccccagcgtgcagcccagcggcggcggcggcggcggcagcggcggcggcggcagcagcagcagcagcaacagcagcgccggcggcggcgccggcaagcagaacggcgccaccagctacagcagcgtggtggccgacagccccgccgaggtggccctgagcagcagcggcggcaacaacgccagcagccaggccctgggcccccccagcggcccccacaaccccccccccagcaccagcaaggagcccagcgccgccgcccccaccggcgccggcggcgtggcccccggcagcggcaacaacagcggcggccccagcctgctggtgcccctgcccgtgaacccccccagcagccccacccccagcttcagcgacgccaaggccgccggcgccctgctgaacggccccccccagttcagcaccgcccccgagatcaaggcccccgagcccctgagcagcctgaagagcatggccgagagagccgccatcagcagcggcatcgaggaccccgtgcccaccctgcacctgaccgagagagacatcatcctgagcagcaccagcgccccccccgccagcgcccagccccccctgcagctgagcgaggtgaacatccccctgagcctgggcgtgtgccccctgggccccgtgcccctgaccaaggagcagctgtaccagcaggccatggaggaggccgcctggcaccacatgccccaccccagcgacagcgagagaatcagacagtacctgcccagaaacccctgccccacccccccctaccaccaccagatgccccccccccacagcgacaccgtggagttctaccagagactgagcaccgagaccctgttcttcatcttctactacctggagggcaccaaggcccagtacctggccgccaaggccctgaagaagcagagctggagattccacaccaagtacatgatgtggttccagagacacgaggagcccaagaccatcaccgacgagttcgagcagggcacctacatctacttcgactacgagaagtggggccagagaaagaaggagggcttcaccttcgagtacagatacctggaggacagagacctgcagtag

SEQ ID NO: 75799 - DNA, 867 bp, synthetic construct
  misc_feature 1..867: note = Description of Artificial Sequence: Synthetic coding sequence
  source 1..867: mol_type = other DNA
tgaaaggagcccagcgccgccgcccccaccggcgccggcggcgtggcccccggcagcggcaacaacagcggcggccccagcctgctggtgcccctgcccgtgaacccccccagcagccccacccccagcttcagcgacgccaaggccgccggcgccctgctgaacggccccccccagttcagcaccgcccccgagatcaaggcccccgagcccctgagcagcctgaagagcatggccgagagagccgccatcagcagcggcatcgaggaccccgtgcccaccctgcacctgaccgagagagacatcatcctgagcagcaccagcgccccccccgccagcgcccagccccccctgcagctgagcgaggtgaacatccccctgagcctgggcgtgtgccccctgggccccgtgcccctgaccaaggagcagctgtaccagcaggccatggaggaggccgcctggcaccacatgccccaccccagcgacagcgagagaatcagacagtacctgcccagaaacccctgccccacccccccctaccaccaccagatgccccccccccacagcgacaccgtggagttctaccagagactgagcaccgagaccctgttcttcatcttctactacctggagggcaccaaggcccagtacctggccgccaaggccctgaagaagcagagctggagattccacaccaagtacatgatgtggttccagagacacgaggagcccaagaccatcaccgacgagttcgagcagctggcccagagcctgagcctgaccaagtacagcagcctgtggctgagcgcccagcccggcaccccccccagccacccccccctgggccagctgctgggcctgctgtag

SEQ ID NO: 75800 - DNA, 2304 bp, synthetic construct
  misc_feature 1..2304: note = Description of Artificial Sequence: Synthetic coding sequence
  source 1..2304: mol_type = other DNA
atgagcagaagccccgacgccaaggaggaccccgtggagtgccccctgtgcatggagcccctggagatcgacgacatcaacttcttcccctgcacctgcggctaccagatctgcagattctgctggcacagaatcagaaccgacgagaacggcctgtgccccgcctgcagaaagccctaccccgaggaccccgccgtgtacaagcccctgagccaggaggagctgcagagaatcaagaacgagaagaagcagaagcagaacgagagaaagcagaagatcagcgagaacagaaagcacctggccagcgtgagagtggtgcagaagaacctggtgttcgtggtgggcctgagccagagactggccgaccccgaggtgctgaagagacccgagtacttcggcaagttcggcaagatccacaaggtggtgatcaacaacagcaccagctacgccggcagccagggccccagcgccagcgcctacgtgacctacatcagaagcgaggacgccctgagagccatccagtgcgtgaacaacgtggtggtggacggcagaaccctgaaggccagcctgggcaccaccaagtactgcagctacttcctgaagaacatgcagtgccccaagcccgactgcatgtacctgcacgagctgggcgacgaggccgccagcttcaccaaggaggagatgcaggccggcaagcaccaggagtacgagcagaagctgctgcaggagctgtacaagctgaaccccaacttcctgcagctgagcaccggcagcgtggacaagaacaagaacaaggtgacccccctgcagagatacgacacccccatcgacaagcccagcgacagcctgagcatcggcaacggcgacaacagccagcagatcagcaacagcgacacccccagccccccccccggcctgagcaagagcaaccccgtgatccccatcagcagcagcaaccacagcgccagaagccccttcgagggcgccgtgaccgagagccagagcctgttcagcgacaacttcagacaccccaaccccatccccagcggcctgccccccttccccagcagcccccagaccagcagcgactggcccaccgcccccgagccccagagcctgttcaccagcgagaccatccccgtgagcagcagcaccgactggcaggccgccttcggcttcggcagcagcaagcagcccgaggacgacctgggcttcgaccccttcgacgtgaccagaaaggccctggccgacctgatcgagaaggagctgagcgtgcaggaccagcccagcctgagccccaccagcctgcagaacagcagcagccacaccaccaccgccaagggccccggcagcggcttcctgcaccccgccgccgccaccaacgccaacagcctgaacagcaccttcagcgtgctgccccagagattcccccagttccagcagcacagagccgtgtacaacagcttcagcttccccggccaggccgccagatacccctggatggccttccccagaaacagcatcatgcacctgaaccacaccgccaaccccaccagcaacagcaacttcctggacctgaacctgcccccccagcacaacaccggcctgggcggcatccccgtggccgacaacagcagcagcgtggagagcctgaacatgaaggagtggcaggacggcctgagagccctgctgcccaacatcaacatcaacttcggcggcctgcccaacagcagcagccccagcaacgccaaccacagcgcccccaccagcaacaccgccaccaccgacagcctgagctgggacagccccggcagctggaccgaccccgccatcatcaccggcatccccgccagcagcggcaacagcctggacagcctgcaggacgacaaccccccccactggctgaagagcctgcaggccctgaccgagatggacggccccagcgccgcccccagccagacccaccacagcgcccccttcagcacccagatccccctgcacagagccagctggaacccctaccccccccccagcaaccccagcagcttccacagccccccccccggcatctactacagagtgcagcactggaccgccatcagacagagaggcgccaccatcagaaagtgcagaatctgccccaccctgttcagccccagccagcccaccacccacagcagcctgctgatcagctacgtgctgaagaaccccgtgcccgaccagttcttcttcagcctgacccccgacgccatgagaagccagggccactaccacctgttcatcaactgcaagaacttctgctag

SEQ ID NO: 75801 - DNA, 1728 bp, synthetic construct
  misc_feature 1..1728: note = Description of Artificial Sequence: Synthetic coding sequence
  source 1..1728: mol_type = other DNA
atgagcagaagccccgacgccaaggaggaccccgtggagtgccccctgtgcatggagcccctggagatcgacgacatcaacttcttcccctgcacctgcggctaccagatctgcagattctgctggcacagaatcagaaccgacgagaacggcctgtgccccgcctgcagaaagccctaccccgaggaccccgccgtgtacaagcccctgagccaggaggagctgcagagaatcaagaacgagaagaagcagaagcagaacgagagaaagcagaagatcagcgagaacagaaagcacctggccagcgtgagagtggtgcagaagaacctggtgttcgtggtgggcctgagccagagactggccgaccccgaggtgctgaagagacccgagtacttcggcaagttcggcaagatccacaaggtggtgatcaacaacagcaccagctacgccggcagccagggccccagcgccagcgcctacgtgacctacatcagaagcgaggacgccctgagagccatccagtgcgtgaacaacgtggtggtggacggcagaaccctgaaggccagcctgggcaccaccaagtactgcagctacttcctgaagaacatgcagtgccccaagcccgactgcatgtacctgcacgagctgggcgacgaggccgccagcttcaccaaggaggagatgcaggccggcaagcaccaggagtacgagcagaagctgctgcaggagctgtacaagctgaaccccaacttcctgcagctgagcaccggcagcgtggacaagaacaagaacaaggtgacccccctgcagagatacgacacccccatcgacaagcccagcgacagcctgagcatcggcaacggcgacaacagccagcagatcagcaacagcgacacccccagccccccccccggcctgagcaagagcaaccccgtgatccccatcagcagcagcaaccacagcgccagaagccccttcgagggcgccgtgaccgagagccagagcctgttcagcgacaacttcagacaccccaaccccatccccagcggcctgccccccttccccagcagcccccagaccagcagcgactggcccaccgcccccgagccccagagcctgttcaccagcgagaccatccccgtgagcagcagcaccgactggcaggccgccttcggcttcggcagcagcaagcagcccgaggacgacctgggcttcgaccccttcgacgtgaccagaaaggccctggccgacctgatcgagaaggagctgagcgtgcaggaccagcccagcctgagccccaccagcctgcagaacagcagcagccacaccaccaccgccaagggccccggcagcggcttcctgcaccccgccgccgccaccaacgccaacagcctgaacagcaccttcagcgtgctgccccagagattcccccagttccagcagcacagagccgtgtacaacagcttcagcttccccggccaggccgccagatacccctggatggccttccccagaaacagcatcatgcacctgaaccacaccgccaaccccaccagcaacagcaacttcctggacctgaacctgcccccccagcacaacaccggcctgggcggcatccccgtggccggcgaggaggaggtgaaggtgagcaccatgcccctgagcaccagcagccacagcctgcagcagggccagcagcccaccagcctgcacaccaccgtggcctag

SEQ ID NO: 75802 - DNA, 1302 bp, synthetic construct
  misc_feature 1..1302: note = Description of Artificial Sequence: Synthetic coding sequence
  source 1..1302: mol_type = other DNA
atgagcagaagccccgacgccaaggaggaccccgtggagtgccccctgtgcatggagcccctggagatcgacgacatcaacttcttcccctgcacctgcggctaccagatctgcagattctgctggcacagaatcagaaccgacgagaacggcctgtgccccgcctgcagaaagccctaccccgaggaccccgccgtgtacaagcccctgagccaggaggagctgcagagaatcaagaacgagaagaagcagaagcagaacgagagaaagcagaagatcagcgagaacagaaagcacctggccagcgtgagagtggtgcagaagaacctggtgttcgtggtgggcctgagccagagactggccgaccccgaggtgctgaagagacccgagtacttcggcaagttcggcaagatccacaaggtggtgatcaacaacagcaccagctacgccggcagccagggccccagcgccagcgcctacgtgacctacatcagaagcgaggacgccctgagagccatccagtgcgtgaacaacgtggtggtggacggcagaaccctgaaggccagcctgggcaccaccaagtactgcagctacttcctgaagaacatgcagtgccccaagcccgactgcatgtacctgcacgagctgggcgacgaggccgccagcttcaccaaggaggagatgcaggccggcaagcaccaggagtacgagcagaagctgctgcaggagctgtacaagctgaaccccaacttcctgcagctgagcaccggcagcgtggacaagaacaagaacaaggtgacccccctgcagagatacgacacccccatcgacaagcccagcgacagcctgagcatcggcaacggcgacaacagccagcagatcagcaacagcgacacccccagccccccccccggcctgagcaagagcaaccccgtgatccccatcagcagcagcaaccacagcgccagaagccccttcgagggcgccgtgaccgagagccagagcctgttcagcgacaacttcagacaccccaaccccatccccagcggcctgccccccttccccagcagcccccagaccagcagcgactggcccaccgcccccgagccccagagcctgttcaccagcgagaccatccccgtgagcagcagcaccgactggcaggccgccttcggcttcggcagcagcaagcagcccgaggacgacctgggcttcgaccccttcgacgtgaccagaaaggccctggccgacctgaccgagcccatcgagagaaagagactggccgtgctgaagagaagatag

SEQ ID NO: 75803 - DNA, 1920 bp, synthetic construct
  misc_feature 1..1920: note = Description of Artificial Sequence: Synthetic coding sequence
  source 1..1920: mol_type = other DNA
atgagcagaagccccgacgccaaggaggaccccgtggagtgccccctgtgcatggagcccctggagatcgacgacatcaacttcttcccctgcacctgcggctaccagatctgcagattctgctggcacagaatcagaaccgacgagaacggcctgtgccccgcctgcagaaagccctaccccgaggaccccgccgtgtacaagcccctgagccaggaggagctgcagagaatcaagaacgagaagaagcagaagcagaacgagagaaagcagaagatcagcgagaacagaaagcacctggccagcgtgagagtggtgcagaagaacctggtgttcgtggtgggcctgagccagagactggccgaccccgaggtgctgaagagacccgagtacttcggcaagttcggcaagatccacaaggtggtgatcaacaacagcaccagctacgccggcagccagggccccagcgccagcgcctacgtgacctacatcagaagcgaggacgccctgagagccatccagtgcgtgaacaacgtggtggtggacggcagaaccctgaaggccagcctgggcaccaccaagtactgcagctacttcctgaagaacatgcagtgccccaagcccgactgcatgtacctgcacgagctgggcgacgaggccgccagcttcaccaaggaggagatgcaggccggcaagcaccaggagtacgagcagaagctgctgcaggagctgtacaagctgaaccccaacttcctgcagctgagcaccggcagcgtggacaagaacaagaacaaggtgacccccctgcagagccccatcgacaagcccagcgacagcctgagcatcggcaacggcgacaacagccagcagatcagcaacagcgacacccccagccccccccccggcctgagcaagagcaaccccgtgatccccatcagcagcagcaaccacagcgccagaagccccttcgagggcgccgtgaccgagagccagagcctgttcagcgacaacttcagacaccccaaccccatccccagcggcctgccccccttccccagcagcccccagaccagcagcgactggcccaccgcccccgagccccagagcctgttcaccagcgagaccatccccgtgagcagcagcaccgactggcaggccgccttcggcttcggcagcagcaagcagcccgaggacgacctgggcttcgaccccttcgacgtgaccagaaaggccctggccgacctgatcgagaaggagctgagcgtgcaggaccagcccagcctgagccccaccagcctgcagaacagcagcagccacaccaccaccgccaagggccccggcagcggcttcctgcaccccgccgccgccaccaacgccaacagcctgaacagcaccttcagcgtgctgccccagagattcccccagttccagcagcacagagccgtgtacaacagcttcagcttccccggccaggccgccagatacccctggatggccttccccagaaacagcatcatgcacctgaaccacaccgccaaccccaccagcaacagcaacttcctggacctgaacctgcccccccagcacaacaccggcctgggcggcatccccgtggccggcatccccgccagcagcggcaacagcctggacagcctgcaggacgacaaccccccccactggctgaagagcctgcaggccctgaccgagatggacggccccagcgccgcccccagccagacccaccacagcgcccccttcagcacccagatccccctgcacagagccagctggaacccctaccccccccccagcaaccccagcagcttccacagccccccccccggcttccagaccgccttcagaccccccagcaagacccccaccgacctgctgcagagcagcaccctggacagacactag

SEQ ID NO: 75804 - DNA, 1302 bp, synthetic construct; identical to SEQ ID NO: 75802
  misc_feature 1..1302: note = Description of Artificial Sequence: Synthetic coding sequence
  source 1..1302: mol_type = other DNA

SEQ ID NO: 75805 - DNA, 1929 bp, synthetic construct
  misc_feature 1..1929: note = Description of Artificial Sequence: Synthetic coding sequence
  source 1..1929: mol_type = other DNA
atgagcagaagccccgacgccaaggaggaccccgtggagtgccccctgtgcatggagcccctggagatcgacgacatcaacttcttcccctgcacctgcggctaccagatctgcagattctgctggcacagaatcagaaccgacgagaacggcctgtgccccgcctgcagaaagccctaccccgaggaccccgccgtgtacaagcccctgagccaggaggagctgcagagaatcaagaacgagaagaagcagaagcagaacgagagaaagcagaagatcagcgagaacagaaagcacctggccagcgtgagagtggtgcagaagaacctggtgttcgtggtgggcctgagccagagactggccgaccccgaggtgctgaagagacccgagtacttcggcaagttcggcaagatccacaaggtggtgatcaacaacagcaccagctacgccggcagccagggccccagcgccagcgcctacgtgacctacatcagaagcgaggacgccctgagagccatccagtgcgtgaacaacgtggtggtggacggcagaaccctgaaggccagcctgggcaccaccaagtactgcagctacttcctgaagaacatgcagtgccccaagcccgactgcatgtacctgcacgagctgggcgacgaggccgccagcttcaccaaggaggagatgcaggccggcaagcaccaggagtacgagcagaagctgctgcaggagctgtacaagctgaaccccaacttcctgcagctgagcaccggcagcgtggacaagaacaagaacaaggtgacccccctgcagagatacgacacccccatcgacaagcccagcgacagcctgagcatcggcaacggcgacaacagccagcagatcagcaacagcgacacccccagccccccccccggcctgagcaagagcaaccccgtgatccccatcagcagcagcaaccacagcgccagaagccccttcgagggcgccgtgaccgagagccagagcctgttcagcgacaacttcagacaccccaaccccatccccagcggcctgccccccttccccagcagcccccagaccagcagcgactggcccaccgcccccgagccccagagcctgttcaccagcgagaccatccccgtgagcagcagcaccgactggcaggccgccttcggcttcggcagcagcaagcagcccgaggacgacctgggcttcgaccccttcgacgtgaccagaaaggccctggccgacctgatcgagaaggagctgagcgtgcaggaccagcccagcctgagccccaccagcctgcagaacagcagcagccacaccaccaccgccaagggccccggcagcggcttcctgcaccccgccgccgccaccaacgccaacagcctgaacagcaccttcagcgtgctgccccagagattcccccagttccagcagcacagagccgtgtacaacagcttcagcttccccggccaggccgccagatacccctggatggccttccccagaaacagcatcatgcacctgaaccacaccgccaaccccaccagcaacagcaacttcctggacctgaacctgcccccccagcacaacaccggcctgggcggcatccccgtggccggcatccccgccagcagcggcaacagcctggacagcctgcaggacgacaaccccccccactggctgaagagcctgcaggccctgaccgagatggacggccccagcgccgcccccagccagacccaccacagcgcccccttcagcacccagatccccctgcacagagccagctggaacccctaccccccccccagcaaccccagcagcttccacagccccccccccggcttccagaccgccttcagaccccccagcaagacccccaccgacctgctgcagagcagcaccctggacagacactag

SEQ ID NO: 75806 - DNA, 1719 bp, synthetic construct
  misc_feature 1..1719: note = Description of Artificial Sequence: Synthetic coding sequence
  source 1..1719: mol_type = other DNA
atgagcagaagccccgacgccaaggaggaccccgtggagtgccccctgtgcatggagcccctggagatcgacgacatcaacttcttcccctgcacctgcggctaccagatctgcagattctgctggcacagaatcagaaccgacgagaacggcctgtgccccgcctgcagaaagccctaccccgaggaccccgccgtgtacaagcccctgagccaggaggagctgcagagaatcaagaacgagaagaagcagaagcagaacgagagaaagcagaagatcagcgagaacagaaagcacctggccagcgtgagagtggtgcagaagaacctggtgttcgtggtgggcctgagccagagactggccgaccccgaggtgctgaagagacccgagtacttcggcaagttcggcaagatccacaaggtggtgatcaacaacagcaccagctacgccggcagccagggccccagcgccagcgcctacgtgacctacatcagaagcgaggacgccctgagagccatccagtgcgtgaacaacgtggtggtggacggcagaaccctgaaggccagcctgggcaccaccaagtactgcagctacttcctgaagaacatgcagtgccccaagcccgactgcatgtacctgcacgagctgggcgacgaggccgccagcttcaccaaggaggagatgcaggccggcaagcaccaggagtacgagcagaagctgctgcaggagctgtacaagctgaaccccaacttcctgcagctgagcaccggcagcgtggacaagaacaagaacaaggtgacccccctgcagagccccatcgacaagcccagcgacagcctgagcatcggcaacggcgacaacagccagcagatcagcaacagcgacacccccagccccccccccggcctgagcaagagcaaccccgtgatccccatcagcagcagcaaccacagcgccagaagccccttcgagggcgccgtgaccgagagccagagcctgttcagcgacaacttcagacaccccaaccccatccccagcggcctgccccccttccccagcagcccccagaccagcagcgactggcccaccgcccccgagccccagagcctgttcaccagcgagaccatccccgtgagcagcagcaccgactggcaggccgccttcggcttcggcagcagcaagcagcccgaggacgacctgggcttcgaccccttcgacgtgaccagaaaggccctggccgacctgatcgagaaggagctgagcgtgcaggaccagcccagcctgagccccaccagcctgcagaacagcagcagccacaccaccaccgccaagggccccggcagcggcttcctgcaccccgccgccgccaccaacgccaacagcctgaacagcaccttcagcgtgctgccccagagattcccccagttccagcagcacagagccgtgtacaacagcttcagcttccccggccaggccgccagatacccctggatggccttccccagaaacagcatcatgcacctgaaccacaccgccaaccccaccagcaacagcaacttcctggacctgaacctgcccccccagcacaacaccggcctgggcggcatccccgtggccggcgaggaggaggtgaaggtgagcaccatgcccctgagcaccagcagccacagcctgcagcagggccagcagcccaccagcctgcacaccaccgtggcctag

SEQ ID NO: 75807 - DNA, 2142 bp, synthetic construct
  misc_feature 1..2142: note = Description of Artificial Sequence: Synthetic coding sequence
  source 1..2142: mol_type = other DNA
atgagcagaagccccgacgccaaggaggaccccgtggagtgccccctgtgcatggagcccctggagatcgacgacatcaacttcttcccctgcacctgcggctaccagatctgcagattctgctggcacagaatcagaaccgacgagaacggcctgtgccccgcctgcagaaagccctaccccgaggaccccgccgtgtacaagcccctgagccaggaggagctgcagagaatcaagaacgagaagaagcagaagcagaacgagagaaagcagaagatcagcgagaacagaaagcacctggccagcgtgagagtggtgcagaagaacctggtgttcgtggtgggcctgagccagagactggccgaccccgaggtgctgaagagacccgagtacttcggcaagttcggcaagatccacaaggtggtgatcaacaacagcaccagctacgccggcagccagggccccagcgccagcgcctacgtgacctacatcagaagcgaggacgccctgagagccatccagtgcgtgaacaacgtggtggtggacggcagaaccctgaaggccagcctgggcaccaccaagtactgcagctacttcctgaagaacatgcagtgccccaagcccgactgcatgtacctgcacgagctgggcgacgaggccgccagcttcaccaaggaggagatgcaggccggcaagcaccaggagtacgagcagaagctgctgcaggagctgtacaagctgaaccccaacttcctgcagctgagcaccggcagcgtggacaagaacaagaacaaggtgacccccctgcagagatacgacacccccatcgacaagcccagcgacagcctgagcatcggcaacggcgacaacagccagcagatcagcaacagcgacacccccagccccccccccggcctgagcaagagcaaccccgtgatccccatcagcagcagcaaccacagcgccagaagccccttcgagggcgccgtgaccgagagccagagcctgttcagcgacaacttcagacaccccaaccccatccccagcggcctgccccccttccccagcagcccccagaccagcagcgactggcccaccgcccccgagccccagagcctgttcaccagcgagaccatccccgtgagcagcagcaccgactggcaggccgccttcggcttcggcagcagcaagcagcccgaggacgacctgggcttcgaccccttcgacgtgaccagaaaggccctggccgacctgatcgagaaggagctgagcgtgcaggaccagcccagcctgagccccaccagcctgcagaacagcagcagccacaccaccaccgccaagggccccggcagcggcttcctgcaccccgccgccgccaccaacgccaacagcctgaacagcaccttcagcgtgctgccccagagattcccccagttccagcagcacagagccgtgtacaacagcttcagcttccccggccaggccgccagatacccctggatggccttccccagaaacagcatcatgcacctgaaccacaccgccaaccccaccagcaacagcaacttcctggacctgaacctgcccccccagcacaacaccggcctgggcggcatccccgtggccgacaacagcagcagcgtggagagcctgaacatgaaggagtggcaggacggcctgagagccctgctgcccaacatcaacatcaacttcggcggcctgcccaacagcagcagccccagcaacgccaaccacagcgcccccaccagcaacaccgccaccaccgacagcctgagctgggacagccccggcagctggaccgaccccgccatcatcaccggcatccccgccagcagcggcaacagcctggacagcctgcaggacgacaaccccccccactggctgaagagcctgcaggccctgaccgagatggacggccccagcgccgcccccagccagacccaccacagcgcccccttcagcacccagatccccctgcacagagccagctggaacccctaccccccccccagcaaccccagcagcttccacagccccccccccggcttccagaccgccttcagaccccccagcaagacccccaccgacctgctgcagagcagcaccctggacagacactag

SEQ ID NO: 75808 - DNA, 1674 bp, synthetic construct
  misc_feature 1..1674: note = Description of Artificial Sequence: Synthetic coding sequence
  source 1..1674: mol_type = other DNA
atgcccaaggagaagtacgagccccccgaccccagaagaatgtacaccatcatgagcagcgaggaggccgccaacggcaagaagagccactgggccgagctggagatcagcggcaaggtgagaagcctgagcgccagcctgtggagcctgacccacctgaccgccctgcacctgagcgacaacagcctgagcagaatccccagcgacatcgccaagctgcacaacctggtgtacctggacctgagcagcaacaagatcagaagcctgcccgccgagctgggcaacatggtgagcctgagagagctgcacctgaacaacaacctgctgagagtgctgcccttcgagctgggcaagctgttccagctgcagaccctgggcctgaagggcaaccccctgacccaggacatcctgaacctgtaccaggagcccgacggcaccagaagactgctgaactacctgctggacaacctgagcggcaccgccaagagaatcaccaccgagcagcccccccccagaagctggatcatgctgcaggagcccgacagaaccagacccaccgccctgttcagcgtgatgtgctacaacgtgctgtgcgacaagtacgccaccagacagctgtacggctactgccccagctgggccctgaactgggactacagaaagaaggccatcatccaggagatcctgagctgcaacgccgacatcgtgagcctgcaggaggtggagaccgagcagtactacagcttcttcctggtggagctgaaggagagaggctacaacggcttcttcagccccaagagcagagccagaaccatgagcgagcaggagagaaagcacgtggacggctgcgccatcttcttcaagaccgagaagttcaccctggtgcagaagcacaccgtggagttcaaccagctggccatggccaacagcgagggcagcgaggccatgctgaacagagtgatgaccaaggacaacatcggcgtggccgtgctgctggagctgagaaaggagagcatcgagatgcccagcggcaagccccacctgggcaccgagaagcagctgatcctggtggccaacgcccacatgcactgggaccccgagtacagcgacgtgaagctggtgcagaccatgatgttcctgagcgaggtgaagaacatcatcgacaaggccagcagaaacctgaagagcagcgtgctgggcgagttcggcaccatccccctggtgctgtgcgccgacctgaacagcctgcccgacagcggcgtggtggagtacctgagcaccggcggcgtggagaccaaccacaaggacttcaaggagctgagatacaacgagagcctgaccaacttcagctgccacggcaagaacggcaccaccaacggcagaatcacccacggcttcaagctgcagagcgcctacgagagcggcctgatgccctacaccaactacaccttcgacttcaagggcatcatcgactacatcttctacagcaagccccagctgaacaccctgggcatcctgggccccctggaccaccactggctggtggagaacaacatcagcggctgcccccaccccctgatccccagcgaccacttcagcctgttcgcccagctggagctgctgctgcccttcctgccccaggtgaacggcatccacctgcccggcagaagatag

SEQ ID NO: 75809 - DNA, 1674 bp, synthetic construct; identical to SEQ ID NO: 75808
  misc_feature 1..1674: note = Description of Artificial Sequence: Synthetic coding sequence
  source 1..1674: mol_type = other DNA

SEQ ID NO: 75810 - DNA, 858 bp, synthetic construct
  misc_feature 1..858: note = Description of Artificial Sequence: Synthetic coding sequence
  source 1..858: mol_type = other DNA
atgcccgccgccaccgtggaccacagccagagaatctgcgaggtgtgggcctgcaacctggacgaggagatgaagaagatcagacaggtgatcagaaagtacaactacgtggccatggacaccgagttccccggcgtggtggccagacccatcggcgagttcagaagcaacgccgactaccagtaccagctgctgagatgcaacgtggacctgctgaagatcatccagctgggcctgaccttcatgaacgagcagggcgagtacccccccggcaccagcacctggcagttcaacttcaagttcaacctgaccgaggacatgtacgcccaggacagcatcgagctgctgaccaccagcggcatccagttcaagaagcacgaggaggagggcatcgagacccagtacttcgccgagctgctgatgaccagcggcgtggtgctgtgcgagggcgtgaagtggctgagcttccacagcggctacgacttcggctacctgatcaagatcctgaccaacagcaacctgcccgaggaggagctggacttcttcgagatcctgagactgttcttccccgtgatctacgacgtgaagtacctgatgaagagctgcaagaacctgaagggcggcctgcaggaggtggccgagcagctggagctggagagaatcggcccccagcaccaggccggcagcgacagcctgctgaccggcatggccttcttcaagatgagagagatgttcttcgaggaccacatcgacgacgccaagtactgcggccacctgtacggcctgggcagcggcagcagctacgtgcagaacggcaccggcaacgcctacgaggaggaggccaacaagcagagctag

SEQ ID NO: 75811 - DNA, 126 bp, synthetic construct
  misc_feature 1..126: note = Description of Artificial Sequence: Synthetic coding sequence
  source 1..126: mol_type = other DNA
atgcccgccgccaccgtggaccacagccagagaatctgcgaggtgtgggcctgcaacctggacgaggagatgaagaagatcagacaggtgatcagaaagtacaactacgtggccatggacacctag

SEQ ID NO: 75812 - DNA, 735 bp, synthetic construct
  misc_feature 1..735: note = Description of Artificial Sequence: Synthetic coding sequence
  source 1..735: mol_type = other DNA
atgcccgccgccaccgtggaccacagccagagaatctgcgaggtgtgggcctgcaacctggacgaggagatgaagaagatcagacaggtgatcagaaagtacaactacgtggccatggacaccgagttccccggcgtggtggccagacccatcggcgagttcagaagcaacgccgactaccagtaccagctgctgagatgcaacgtggacctgctgaagatcatccagctgggcctgaccttcatgaacgagcagggcgagtacccccccggcaccagcacctggcagttcaacttcaagttcaacctgaccgaggacatgtacgcccaggacagcatcgagctgctgaccaccagcggcatccagttcaagaagcacgaggaggagggcatcgagacccagtacttcgccgagctgctgatgaccagcggcgtggtgctgtgcgagggcgtgaagtggctgagcttccacagcggctacgacttcggctacctgatcaagatcctgaccaacagcaacctgcccgaggaggagctggacttcttcgagatcctgagactgttcttccccgtgatctacgacgtgaagtacctgatgaagagctgcaagaacctgaagggcggcctgcaggaggtggccgagcagctggagctggagagaatcggcccccagcaccaggccggcagcgacagcctgctgaccggcatggccttcttcaagatgagagaggtgtag

SEQ ID NO: 75813 - DNA, 444 bp, synthetic construct
  misc_feature 1..444: note = Description of Artificial Sequence: Synthetic coding sequence
  source 1..444: mol_type = other DNA
atgcccgccgccaccgtggaccacagccagagaatctgcgaggtgtgggcctgcaacctggacgaggagatgaagaagatcagacaggtgatcagaaagtacaactacgtggccatggacaccgagttccccggcgtggtggccagacccatcggcgagttcagaagcaacgccgactaccagtaccagctgctgagatgcaacgtggacctgctgaagatcatccagctgggcctgaccttcatgaacgagcagggcgagtacccccccggcaccagcacctggcagttcaacttcaagttcaacctgaccgaggacatgtacgcccaggacagcatcgagctgctgaccaccagcggcatccagttcaagaagcacgaggaggagggcatcgagacccagtacttcgccgagctgctgatgaccagcggcgtggtgctgtag

SEQ ID NO: 75814 - DNA, 879 bp, synthetic construct
  misc_feature 1..879: note = Description of Artificial Sequence: Synthetic coding sequence
  source 1..879: mol_type = other DNA
atgcccgccgccctggtggagaacagccaggtgatctgcgaggtgtgggccagcaacctggaggaggagatgagaaagatcagagagatcgtgctgagctacagctacatcgccatggacaccgagttccccggcgtggtggtgagacccatcggcgagttcagaagcagcatcgactaccagtaccagctgctgagatgcaacgtggacctgctgaagatcatccagctgggcctgaccttcaccaacgagaagggcgagtaccccagcggcatcaacacctggcagttcaacttcaagttcaacctgaccgaggacatgtacagccaggacagcatcgacctgctggccaacagcggcctgcagttccagaagcacgaggaggagggcatcgacaccctgcacttcgccgagctgctgatgaccagcggcgtggtgctgtgcgacaacgtgaagtggctgagcttccacagcggctacgacttcggctacatggtgaagctgctgaccgacagcagactgcccgaggaggagcacgagttcttccacatcctgaacctgttcttccccagcatctacgacgtgaagtacctgatgaagagctgcaagaacctgaagggcggcctgcaggaggtggccgaccagctggacctgcagagaatcggcagacagcaccaggccggcagcgacagcctgctgaccggcatggccttcttcagaatgaaggagctgttcttcgaggacagcatcgacgacgccaagtactgcggcagactgtacggcctgggcaccggcgtggcccagaagcagaacgaggacgtggacagcgcccaggagaagatgagcatcctggccatcatcaacaacatgcagcagtag

SEQ ID NO: 75815 - DNA, 879 bp, synthetic construct; identical to SEQ ID NO: 75814
  misc_feature 1..879: note = Description of Artificial Sequence: Synthetic coding sequence
  source 1..879: mol_type = other DNA

SEQ ID NO: 75816 - DNA, 357 bp, synthetic construct
  misc_feature 1..357: note = Description of Artificial Sequence: Synthetic coding sequence
  source 1..357: mol_type = other DNA
atgcccgccgccctggtggagaacagccaggtgatctgcgaggtgtgggccagcaacctggaggaggagatgagaaagatcagagagatcgtgctgagctacagctacatcgccatggacaccgagttccccggcgtggtggtgagacccatcggcgagttcagaagcagcatcgactaccagtaccagctgctgagatgcaacgtggacctgctgaagatcatccagctgggcctgaccttcaccaacgagaagggcgagtaccccagcggcatcaacacctggcagttcaacttcaagttcaacctgaccgaggacatgtacagccaggacagcatcgacctgctggccaactag

SEQ ID NO: 75817 - DNA, 879 bp, synthetic construct; identical to SEQ ID NO: 75814
  misc_feature 1..879: note = Description of Artificial Sequence: Synthetic coding sequence
  source 1..879: mol_type = other DNA

SEQ ID NO: 75818 - DNA, 168 bp, synthetic construct
  misc_feature 1..168: note = Description of Artificial Sequence: Synthetic coding sequence
  source 1..168: mol_type = other DNA
atgcccgccgccctggtggagaacagccaggtgatctgcgaggtgtgggccagcaacctggaggaggagatgagaaagatcagagagatcgtgctgagctacagctacatcgccatggacaccgagttccccggcgtggtggtgagacccatcggcgagttcagatag

SEQ ID NO: 75819 - DNA, 678 bp, synthetic construct
  misc_feature 1..678: note = Description of Artificial Sequence: Synthetic coding sequence
  source 1..678: mol_type = other DNA
atgcccgccgccctggtggagaacagccaggtgatctgcgaggtgtgggccagcaacctggaggaggagatgagaaagatcagagagatcgtgctgagctacagctacatcgccatggacaccgagttccccggcgtggtggtgagacccatcggcgagttcagaagcagcatcgactaccagtaccagctgctgagatgcaacgtggacctgctgaagatcatccagctgggcctgaccttcaccaacgagaagggcgagtaccccagcggcatcaacacctggcagttcaacttcaagttcaacctgaccggctacgacttcggctacatggtgaagctgctgaccgacagcagactgcccgaggaggagcacgagttcttccacatcctgaacctgttcttccccagcatctacgacgtgaagtacctgatgaagagctgcaagaacctgaagggcggcctgcaggaggtggccgaccagctggacctgcagagaatcggcagacagcaccaggccggcagcgacagcctgctgaccggcatggccttcttcagaatgaaggagctgttcttcgaggacagcatcgacgacgccaagtactgcggcagactgtacggcctgggcaccggcgtggcccagaagcagaacgaggacgtggacagcgcccaggagtag

SEQ ID NO: 75820 - DNA, 360 bp, synthetic construct
  misc_feature 1..360: note = Description of Artificial Sequence: Synthetic coding sequence
  source 1..360: mol_type = other DNA
atgcccgccgccctggtggagaacagccaggtgatctgcgaggtgtgggccagcaacctggaggaggagatgagaaagatcagagagatcgtgctgagctacagctacatcgccatggacaccgagttccccggcgtggtggtgagacccatcggcgagttcagaagcagcatcgactaccagtaccagctgctgagatgcaacgtggacctgctgaagatcatccagctgggcctgaccttcaccaacgagaagggcgagtaccccagcggcatcaacacctggcagttcaacttcaagttcaacctgaccgaggacatgtacagccaggacagcatcgacctgctggccaacagctag

SEQ ID NO: 75821 - DNA, 717 bp, synthetic construct
  misc_feature 1..717: note = Description of Artificial Sequence: Synthetic coding sequence
  source 1..717: mol_type = other DNA
atgcccgccgccctggtggagaacagccaggtgatctgcgaggtgtgggccagcaacctggaggaggagatgagaaagatcagagagatcgtgctgagctacagctacatcgccatggacaccgagttccccggcgtggtggtgagacccatcggcgagttcagaagcagcatcgactaccagtaccagctgctgagatgcaacgtggacctgctgaagatcatccagctgggcctgaccttcaccaacgagaagggcgagtaccccagcggcatcaacacctggcagttcaacttcaagttcaacctgaccggctacgacttcggctacatggtgaagctgctgaccgacagcagactgcccgaggaggagcacgagttcttccacatcctgaacctgttcttccccagcatctacgacgtgaagtacctgatgaagagctgcaagaacctgaagggcggcctgcaggaggtggccgaccagctggacctgcagagaatcggcagacagcaccaggccggcagcgacagcctgctgaccggcatggccttcttcagaatgaaggagctgttcttcgaggacagcatcgacgacgccaagtactgcggcagactgtacggcctgggcaccggcgtggcccagaagcagaacgaggacgtggacagcgcccaggagaagatgagcatcctggccatcatcaacaacatgcagcagtag

SEQ ID NO: 75822 - DNA, 168 bp, synthetic construct; identical to SEQ ID NO: 75818
  misc_feature 1..168: note = Description of Artificial Sequence: Synthetic coding sequence
  source 1..168: mol_type = other DNA

SEQ ID NO: 75823 - DNA, 258 bp, synthetic construct
  misc_feature 1..258: note = Description of Artificial Sequence: Synthetic coding sequence
  source 1..258: mol_type = other DNA
atgtacagccaggacagcatcgacctgctggccaacagcggcctgcagttccagaagcacgaggaggagggcatcgacaccctgcacttcgccgagctgctgatgaccagcggcgtggtgctgtgcgacaacgtgaagtggctgagcttccacagcggctacgacttcggctacatggtgaagctgctgaccgacagcagactgcccgaggaggagcacgagttcttccacatcctgaacctgttcttccccagctag

SEQ ID NO: 75824 - DNA, 402 bp, synthetic construct
  misc_feature 1..402: note = Description of Artificial Sequence: Synthetic coding sequence
  source 1..402: mol_type = other DNA
atgcccgccgccctggtggagaacagccaggtgatctgcgaggtgtgggccagcaacctggaggaggagatgagaaagatcagagagatcgtgctgagctacagctacatcgccatggacaccgagttccccggcgtggtggtgagacccatcggcgagttcagaagcagcatcgactaccagtaccagctgctgagatgcaacgtggacctgctgaagatcatccagctgggcctgaccttcaccaacgagaagggcgagtaccccagcggcatcaacacctggcagttcaacttcaagttcaacctgaccgaggacatgtacagccaggacagcatcgacctgctggccaacagcggcctgcagttccagaagcacgaggaggagggcatcgacacctag

SEQ ID NO: 75825 - DNA, 561 bp, synthetic construct
  misc_feature 1..561: note = Description of Artificial Sequence: Synthetic coding sequence
  source 1..561: mol_type = other DNA
atgtacagccaggacagcatcgacctgctggccaacagcggcctgcagttccagaagcacgaggaggagggcatcgacaccctgcacttcgccgagctgctgatgaccagcggcgtggtgctgtgcgacaacgtgaagtggctgagcttccacagcggctacgacttcggctacatggtgaagctgctgaccgacagcagactgcccgaggaggagcacgagttcttccacatcctgaacctgttcttccccagcatctacgacgtgaagtacctgatgaagagctgcaagaacctgaagggcggcctgcaggaggtggccgaccagctggacctgcagagaatcggcagacagcaccaggccggcagcgacagcctgctgaccggcatggccttcttcagaatgaaggagctgttcttcgaggacagcatcgacgacgccaagtactgcggcagactgtacggcctgggcaccggcgtggcccagaagcagaacgaggacgtggacagcgcccaggagaagatgagcatcctggccatcatcaacaacatgcagcagtag

SEQ ID NO: 75826 - DNA, 561 bp, synthetic construct; identical to SEQ ID NO: 75825
  misc_feature 1..561: note = Description of Artificial Sequence: Synthetic coding sequence
  source 1..561: mol_type = other DNA

SEQ ID NO: 75827 - DNA, 561 bp, synthetic construct; identical to SEQ ID NO: 75825
  misc_feature 1..561: note = Description of Artificial Sequence: Synthetic coding sequence
  source 1..561: mol_type = other DNA

SEQ ID NO: 75828 - DNA, 366 bp, synthetic construct
  misc_feature 1..366: note = Description of Artificial Sequence: Synthetic coding sequence
  source 1..366: mol_type = other DNA
atgcccgccgccctggtggagaacagccaggtgatctgcgaggtgtgggccagcaacctggaggaggagatgagaaagatcagagagatcgtgctgagctacagctacatcgccatggacaccgagttccccggcgtggtggtgagacccatcggcgagttcagaagcagcatcgactaccagtaccagctgctgagatgcaacgtggacctgctgaagatcatccagctgggcctgaccttcaccaacgagaagggcgagtaccccagcggcatcaacacctggcagttcaacttcaagttcaacctgaccggctacgacttcggctacatggtgaagctgctgaccgacagcagactgccctag

SEQ ID NO: 75829 - DNA, 561 bp, synthetic construct; identical to SEQ ID NO: 75825
  misc_feature 1..561: note = Description of Artificial Sequence: Synthetic coding sequence
  source 1..561: mol_type = other DNA

SEQ ID NO: 75830 - DNA, 387 bp, synthetic construct
  misc_feature 1..387: note = Description of Artificial Sequence: Synthetic coding sequence
  source 1..387: mol_type = other DNA
atggtgaagctgctgaccgacagcagactgcccgaggaggagcacgagttcttccacatcctgaacctgttcttccccagcatctacgacgtgaagtacctgatgaagagctgcaagaacctgaagggcggcctgcaggaggtggccgaccagctggacctgcagagaatcggcagacagcaccaggccggcagcgacagcctgctgaccggcatggccttcttcagaatgaaggagctgttcttcgaggacagcatcgacgacgccaagtactgcggcagactgtacggcctgggcaccggcgtggcccagaagcagaacgaggacgtggacagcgcccaggagaagatgagcatcctggccatcatcaacaacatgcagcagtag

SEQ ID NO: 75831 - DNA, 810 bp, synthetic construct
  misc_feature 1..810: note = Description of Artificial Sequence: Synthetic coding sequence
  source 1..810: mol_type = other DNA
atgagaaagatcagagagatcgtgctgagctacagctacatcgccatggacaccgagttccccggcgtggtggtgagacccatcggcgagttcagaagcagcatcgactaccagtaccagctgctgagatgcaacgtggacctgctgaagatcatccagctgggcctgaccttcaccaacgagaagggcgagtaccccagcggcatcaacacctggcagttcaacttcaagttcaacctgaccgaggacatgtacagccaggacagcatcgacctgctggccaacagcggcctgcagttccagaagcacgaggaggagggcatcgacaccctgcacttcgccgagctgctgatgaccagcggcgtggtgctgtgcgacaacgtgaagtggctgagcttccacagcggctacgacttcggctacatggtgaagctgctgaccgacagcagactgcccgaggaggagcacgagttcttccacatcctgaacctgttcttccccagcatctacgacgtgaagtacctgatgaagagctgcaagaacctgaagggcggcctgcaggaggtggccgaccagctggacctgcagagaatcggcagacagcaccaggccggcagcgacagcctgctgaccggcatggccttcttcagaatgaaggagctgttcttcgaggacagcatcgacgacgccaagtactgcggcagactgtacggcctgggcaccggcgtggcccagaagcagaacgaggacgtggacagcgcccaggagaagatgagcatcctggccatcatcaacaacatgcagcagtag

SEQ ID NO: 75832 - DNA, 4338 bp, synthetic construct
  misc_feature 1..4338: note = Description of Artificial Sequence: Synthetic coding sequence
  source 1..4338: mol_type = other DNA
atgcagggcccccccctgctgaccgccgcccacctgctgtgcgtgtgcaccgccgccctggccgtggcccccggccccagattcctggtgaccgcccccggcatcatcagacccggcggcaacgtgaccatcggcgtggagctgctggagcactgccccagccaggtgaccgtgaaggccgagctgctgaagaccgccagcaacctgaccgtgagcgtgctggaggccgagggcgtgttcgagaagggcagcttcaagaccctgaccctgcccagcctgcccctgaacagcgccgacgagatctacgagctgagagtgaccggcagaacccaggacgagatcctgttcagcaacagcaccagactgagcttcgagaccaagagaatcagcgtgttcatccagaccgacaaggccctgtacaagcccaagcaggaggtgaagttcagaatcgtgaccctgttcagcgacttcaagccctacaagaccagcctgaacatcctgatcaaggaccccaagagcaacctgatccagcagtggctgagccagcagagcgacctgggcgtgatcagcaagaccttccagctgagcagccaccccatcctgggcgactggagcatccaggtgcaggtgaacgaccagacctactaccagagcttccaggtgagcgagtacgtgctgcccaagttcgaggtgaccctgcagacccccctgtactgcagcatgaacagcaagcacctgaacggcaccatcaccgccaagtacacctacggcaagcccgtgaagggcgacgtgaccctgaccttcctgcccctgagcttctggggcaagaagaagaacatcaccaagaccttcaagatcaacggcagcgccaacttcagcttcaacgacgaggagatgaagaacgtgatggacagcagcaacggcctgagcgagtacctggacctgagcagccccggccccgtggagatcctgaccaccgtgaccgagagcgtgaccggcatcagcagaaacgtgagcaccaacgtgttcttcaagcagcacgactacatcatcgagttcttcgactacaccaccgtgctgaagcccagcctgaacttcaccgccaccgtgaaggtgaccagagccgacggcaaccagctgaccctggaggagagaagaaacaacgtggtgatcaccgtgacccagagaaactacaccgagtactggagcggcagcaacagcggcaaccagaagatggaggccgtgcagaagatcaactacaccgtgccccagagcggcaccttcaagatcgagttccccatcctggaggacagcagcgagctgcagctgaaggcctacttcctgggcagcaagagcagcatggccgtgcacagcctgttcaagagccccagcaagacctacatccagctgaagaccagagacgagaacatcaaggtgggcagccccttcgagctggtggtgagcggcaacaagagactgaaggagctgagctacatggtggtgagcagaggccagctggtggccgtgggcaagcagaacagcaccatgttcagcctgacccccgagaacagctggacccccaaggcctgcgtgatcgtgtactacatcgaggacgacggcgagatcatcagcgacgtgctgaagatccccgtgcagctggtgttcaagaacaagatcaagctgtactggagcaaggtgaaggccgagcccagcgagaaggtgagcctgagaatcagcgtgacccagcccgacagcatcgtgggcatcgtggccgtggacaagagcgtgaacctgatgaacgccagcaacgacatcaccatggagaacgtggtgcacgagctggagctgtacaacaccggctactacctgggcatgttcatgaacagcttcgccgtgttccaggagtgcggcctgtgggtgctgaccgacgccaacctgaccaaggactacatcgacggcgtgtacgacaacgccgagtacgccgagagattcatggaggagaacgagggccacatcgtggacatccacgacttcagcctgggcagcagcccccacgtgagaaagcacttccccgagacctggatctggctggacaccaacatgggctacagaatctaccaggagttcgaggtgaccgtgcccgacagcatcaccagctgggtggccaccggcttcgtgatcagcgaggacctgggcctgggcctgaccaccacccccgtggagctgcaggccttccagcccttcttcatcttcctgaacctgccctacagcgtgatcagaggcgaggagttcgccctggagatcaccatcttcaactacctgaaggacgccaccgaggtgaaggtgatcatcgagaagagcgacaagttcgacatcctgatgaccagcaacgagatcaacgccaccggccaccagcagaccctgctggtgcccagcgaggacggcgccaccgtgctgttccccatcagacccacccacctgggcgagatccccatcaccgtgaccgccctgagccccaccgccagcgacgccgtgacccagatgatcctggtgaaggccgagggcatcgagaagagctacagccagagcatcctgctggacctgaccgacaacagactgcagagcaccctgaagaccctgagcttcagcttcccccccaacaccgtgaccggcagcgagagagtgcagatcaccgccatcggcgacgtgctgggccccagcatcaacggcctggccagcctgatcagaatgccctacggctgcggcgagcagaacatgatcaacttcgcccccaacatctacatcctggactacctgaccaagaagaagcagctgaccgacaacctgaaggagaaggccctgagcttcatgagacagggctaccagagagagctgctgtaccagagagaggacggcagcttcagcgccttcggcaactacgaccccagcggcagcacctggctgagcgccttcgtgctgagatgcttcctggaggccgacccctacatcgacatcgaccagaacgtgctgcacagaacctacacctggctgaagggccaccagaagagcaacggcgagttctgggaccccggcagagtgatccacagcgagctgcagggcggcaacaagagccccgtgaccctgaccgcctacatcgtgaccagcctgctgggctacagaaagtaccagcccaacatcgacgtgcaggagagcatccacttcctggagagcgagttcagcagaggcatcagcgacaactacaccctggccctgatcacctacgccctgagcagcgtgggcagccccaaggccaaggaggccctgaacatgctgacctggagagccgagcaggagggcggcatgcagttctgggtgagcagcgagagcaagctgagcgacagctggcagcccagaagcctggacatcgaggtggccgcctacgccctgctgagccacttcctgcagttccagaccagcgagggcatccccatcatgagatggctgagcagacagagaaacagcctgggcggcttcgccagcacccaggacaccaccgtggccctgaaggccctgagcgagttcgccgccctgatgaacaccgagagaaccaacatccaggtgaccgtgaccggccccagcagccccagccccgtgaagttcctgatcgacacccacaacagactgctgctgcagaccgccgagctggccgtggtgcagcccaccgccgtgaacatcagcgccaacggcttcggcttcgccatctgccagctgaacgtggtgtacaacgtgaaggccagcggcagcagcagaagaagaagaagcatccagaaccaggaggccttcgacctggacgtggccgtgaaggagaacaaggacgacctgaaccacgtggacctgaacgtgtgcaccagcttcagcggccccggcagaagcggcatggccctgatggaggtgaacctgctgagcggcttcatggtgcccagcgaggccatcagcctgagcgagaccgtgaagaaggtggagtacgaccacggcaagctgaacctgtacctggacagcgtgaacgagacccagttctgcgtgaacatccccgccgtgagaaacttcaaggtgagcaacacccaggacgccagcgtgagcatcgtggactactacgagcccagaagacaggccgtgagaagctacaacagcgaggtgaagctgagcagctgcgacctgtgcagcgacgtgcagggctgcagaccctgcgaggacggcgccagcggcagccaccaccacagcagcgtgatcttcatcttctgcttcaagctgctgtacttcatggagctgtggctgtag

SEQ ID NO: 75833 - DNA, 4107 bp, synthetic construct
  misc_feature 1..4107: note = Description of Artificial Sequence: Synthetic coding sequence
  source 1..4107: mol_type = other DNA
atgcagggcccccccctgctgaccgccgcccacctgctgtgcgtgtgcaccgccgccctggccgtggcccccggccccagattcctggtgaccgcccccggcatcatcagacccggcggcaacgtgaccatcggcgtggagctgctggagcactgccccagccaggtgaccgtgaaggccgagctgctgaagaccgccagcaacctgaccgtgagcgtgctggaggccgagggcgtgttcgagaagggcagcttcaagaccctgaccctgcccagcgaccccaagagcaacctgatccagcagtggctgagccagcagagcgacctgggcgtgatcagcaagaccttccagctgagcagccaccccatcctgggcgactggagcatccaggtgcaggtgaacgaccagacctactaccagagcttccaggtgagcgagtacgtgctgcccaagttcgaggtgaccctgcagacccccctgtactgcagcatgaacagcaagcacctgaacggcaccatcaccgccaagtacacctacggcaagcccgtgaagggcgacgtgaccctgaccttcctgcccctgagcttctggggcaagaagaagaacatcaccaagaccttcaagatcaacggcagcgccaacttcagcttcaacgacgaggagatgaagaacgtgatggacagcagcaacggcctgagcgagtacctggacctgagcagccccggccccgtggagatcctgaccaccgtgaccgagagcgtgaccggcatcagcagaaacgtgagcaccaacgtgttcttcaagcagcacgactacatcatcgagttcttcgactacaccaccgtgctgaagcccagcctgaacttcaccgccaccgtgaaggtgaccagagccgacggcaaccagctgaccctggaggagagaagaaacaacgtggtgatcaccgtgacccagagaaactacaccgagtactggagcggcagcaacagcggcaaccagaagatggaggccgtgcagaagatcaactacaccgtgccccagagcggcaccttcaagatcgagttccccatcctggaggacagcagcgagctgcagctgaaggcctacttcctgggcagcaagagcagcatggccgtgcacagcctgttcaagagccccagcaagacctacatccagctgaagaccagagacgagaacatcaaggtgggcagccccttcgagctggtggtgagcggcaacaagagactgaaggagctgagctacatggtggtgagcagaggccagctggtggccgtgggcaagcagaacagcaccatgttcagcctgacccccgagaacagctggacccccaaggcctgcgtgatcgtgtactacatcgaggacgacggcgagatcatcagcgacgtgctgaagatccccgtgcagctggtgttcaagaacaagatcaagctgtactggagcaaggtgaaggccgagcccagcgagaaggtgagcctgagaatcagcgtgacccagcccgacagcatcgtgggcatcgtggccgtggacaagagcgtgaacctgatgaacgccagcaacgacatcaccatggagaacgtggtgcacgagctggagctgtacaacaccggctactacctgggcatgttcatgaacagcttcgccgtgttccaggagtgcggcctgtgggtgctgaccgacgccaacctgaccaaggactacatcgacggcgtgtacgacaacgccgagtacgccgagagattcatggaggagaacgagggccacatcgtggacatccacgacttcagcctgggcagcagcccccacgtgagaaagcacttccccgagacctggatctggctggacaccaacatgggctacagaatctaccaggagttcgaggtgaccgtgcccgacagcatcaccagctgggtggccaccggcttcgtgatcagcgaggacctgggcctgggcctgaccaccacccccgtggagctgcaggccttccagcccttcttcatcttcctgaacctgccctacagcgtgatcagaggcgaggagttcgccctggagatcaccatcttcaactacctgaaggacgccaccgaggtgaaggtgatcatcgagaagagcgacaagttcgacatcctgatgaccagcaacgagatcaacgccaccggccaccagcagaccctgctggtgcccagcgaggacggcgccaccgtgctgttccccatcagacccacccacctgggcgagatccccatcaccgtgaccgccctgagccccaccgccagcgacgccgtgacccagatgatcctggtgaaggccgagggcatcgagaagagctacagccagagcatcctgctggacctgaccgacaacagactgcagagcaccctgaagaccctgagcttcagcttcccccccaacaccgtgaccggcagcgagagagtgcagatcaccgccatcggcgacgtgctgggccccagcatcaacggcctggccagcctgatcagaatgccctacggctgcggcgagcagaacatgatcaacttcgcccccaacatctacatcctggactacctgaccaagaagaagcagctgaccgacaacctgaaggagaaggccctgagcttcatgagacagggctaccagagagagctgctgtaccagagagaggacggcagcttcagcgccttcggcaactacgaccccagcggcagcacctggctgagcgccttcgtgctgagatgcttcctggaggccgacccctacatcgacatcgaccagaacgtgctgcacagaacctacacctggctgaagggccaccagaagagcaacggcgagttctgggaccccggcagagtgatccacagcgagctgcagggcggcaacaagagccccgtgaccctgaccgcctacatcgtgaccagcctgctgggctacagaaagtaccagcccaacatcgacgtgcaggagagcatccacttcctggagagcgagttcagcagaggcatcagcgacaactacaccctggccctgatcacctacgccctgagcagcgtgggcagccccaaggccaaggaggccctgaacatgctgacctggagagccgagcaggagggcggcatgcagttctgggtgagcagcgagagcaagctgagcgacagctggcagcccagaagcctggacatcgaggtggccgcctacgccctgctgagccacttcctgcagttccagaccagcgagggcatccccatcatgagatggctgagcagacagagaaacagcctgggcggcttcgccagcacccaggacaccaccgtggccctgaaggccctgagcgagttcgccgccctgatgaacaccgagagaaccaacatccaggtgaccgtgaccggccccagcagccccagccccgtgaagttcctgatcgacacccacaacagactgctgctgcagaccgccgagctggccgtggtgcagcccaccgccgtgaacatcagcgccaacggcttcggcttcgccatctgccagctgaacgtggtgtacaacgtgaaggccagcggcagcagcagaagaagaagaagcatccagaaccaggaggccttcgacctggacgtggccgtgaaggagaacaaggacgacctgaaccacgtggacctgaacgtgtgcaccagcttcagcggccccggcagaagcggcatggccctgatggaggtgaacctgctgagcggcttcatggtgcccagcgaggccatcagcctgagcgagaccgtgaagaaggtggagtacgaccacggcaagctgaacctgtacctggacagcgtgaacgagacccagttctgcgtgaacatccccgccgtgagaaacttcaaggtgagcaacacccaggacgccagcgtgagcatcgtggactactacgagcccagaagacaggccgtgagaagctacaacagcgaggtgaagctgagcagctgcgacctgtgcagcgacgtgcagggctgcagaccctgcgaggacggcgccagcggcagccaccaccacagcagcgtgatcttcatcttctgcttcaagctgctgtacttcatggagctgtggctgtag

SEQ ID NO: 75834 - DNA, 4287 bp, synthetic construct
  misc_feature 1..4287: note = Description of Artificial Sequence: Synthetic coding sequence
  source 1..4287: mol_type = other DNA
atgcagggcccccccctgctgaccgccgcccacctgctgtgcgtgtgcaccgccgccctggccgtggcccccggccccagattcctggtgaccgcccccggcatcatcagacccggcggcaacgtgaccatcggcgtggagctgctggagcactgccccagccaggtgaccgtgaaggccgagctgctgaagaccgccagcaacctgaccgtgagcgtgctggaggccgagggcgtgttcgagaagggcagcttcaagaccctgaccctgcccagcctgcccctgaacagcgccgacgagatctacgagctgagagtgaccggcagaacccaggacgagatcctgttcagcaacagcaccagactgagcttcgagaccaagagaatcagcgtgttcatccagaccgacaaggccctgtacaagcccaagcaggaggtgaagttcagaatcgtgaccctgttcagcgacttcaagccctacaagaccagcctgaacatcctgatcaaggaccccaagagcaacctgatccagcagtggctgagccagcagagcgacctgggcgtgatcagcaagaccttccagctgagcagccaccccatcctgggcgactggagcatccaggtgcaggtgaacgaccagacctactaccagagcttccaggtgagcgagtacgtgctgcccaagttcgaggtgaccctgcagacccccctgtactgcagcatgaacagcaagcacctgaacggcaccatcaccgccaagtacacctacggcaagcccgtgaagggcgacgtgaccctgaccttcctgcccctgagcttctggggcaagaagaagaacatcaccaagaccttcaagatcaacggcagcgccaacttcagcttcaacgacgaggagatgaagaacgtgatggacagcagcaacggcctgagcgagtacctggacctgagcagccccggccccgtggagatcctgaccaccgtgaccgagagcgtgaccggcatcagcagaaacgtgagcaccaacgtgttcttcaagcagcacgactacatcatcgagttcttcgactacaccaccgtgctgaagcccagcctgaacttcaccgccaccgtgaaggtgaccagagccgacggcaaccagctgaccctggaggagagaagaaacaacgtggtgatcaccgtgacccagagaaactacaccgagtactggagcggcagcaacagcggcaaccagaagatggaggccgtgcagaagatcaactacaccgtgccccagagcggcaccttcaagatcgagttccccatcctggaggacagcagcgagctgcagctgaaggcctacttcctgggcagcaagagcagcatggccgtgcacagcctgttcaagagccccagcaagacctacatccagctgaagaccagagacgagaacatcaaggtgggcagccccttcgagctggtggtgagcggcaacaagagactgaaggagctgagctacatggtggtgagcagaggccagctggtggccgtgggcaagcagaacagcaccatgttcagcctgacccccgagaacagctggacccccaaggcctgcgtgatcgtgtactacatcgaggacgacggcgagatcatcagcgacgtgctgaagatccccgtgcagctggtgttcaagaacaagatcaagctgtactggagcaaggtgaaggccgagcccagcgagaaggtgagcctgagaatcagcgtgacccagcccgacagcatcgtgggcatcgtggccgtggacaagagcgtgaacctgatgaacgccagcaacgacatcaccatggagaacgtggtgcacgagctggagctgtacaacaccggctactacctgggcatgttcatgaacagcttcgccgtgttccaggagtgcggcctgtgggtgctgaccgacgccaacctgaccaaggactacatcgacggcgtgtacgacaacgccgagtacgccgagagattcatggaggagaacgagggccacatcgtggacatccacgacttcagcctgggcagcagcccccacgtgagaaagcacttccccgagacctggatctggctggacaccaacatgggctacagaatctaccaggagttcgaggtgaccgtgcccgacagcatcaccagctgggtggccaccggcttcgtgatcagcgaggacctgggcctgggcctgaccaccacccccgtggagctgcaggccttccagcccttcttcatcttcctgaacctgccctacagcgtgatcagaggcgaggagttcgccctggagatcaccatcttcaactacctgaaggacgccaccgaggtgaaggtgatcatcgagaagagcgacaagttcgacatcctgatgaccagcaacgagatcaacgccaccggccaccagcagaccctgctggtgcccagcgaggacggcgccaccgtgctgttccccatcagacccacccacctgggcgagatccccatcaccgtgaccgccctgagccccaccgccagcgacgccgtgacccagatgatcctggtgaaggccgagggcatcgagaagagctacagccagagcatcctgctggacctgaccgacaacagactgcagagcaccctgaagaccctgagcttcagcttcccccccaacaccgtgaccggcagcgagagagtgcagatcaccgccatcggcgacgtgctgggccccagcatcaacggcctggccagcctgatcagaatgccctacggctgcggcgagcagaacatgatcaacttcgcccccaacatctacatcctggactacctgaccaagaagaagcagctgaccgacaacctgaaggagaaggccctgagcttcatgagacagggctaccagagagagctgctgtaccagagagaggacggcagcttcagcgccttcggcaactacgaccccagcggcagcacctggctgagcgccttcgtgctgagatgcttcctggaggccgacccctacatcgacatcgaccagaacgtgctgcacagaacctacacctggctgaagggccaccagaagagcaacggcgagttctgggaccccggcagagtgatccacagcgagctgcagggcggcaacaagagccccgtgaccctgaccgcctacatcgtgaccagcctgctgggctacagaaagtaccagcccaacatcgacgtgcaggagagcatccacttcctggagagcgagttcagcagaggcatcagcgacaactacaccctggccctgatcacctacgccctgagcagcgtgggcagccccaaggccaaggaggccctgaacatgctgacctggagagccgagcaggagggcggcatgcagttctgggtgagcagcgagagcaagctgagcgacagctggcagcccagaagcctggacatcgaggtggccgcctacgccctgctgagccacttcctgcagttccagaccagcgagggcatccccatcatgagatggctgagcagacagagaaacagcctgggcggcttcgccagcacccaggacaccaccgtggccctgaaggccctgagcgagttcgccgccctgatgaacaccgagagaaccaacatccaggtgaccgtgaccggccccagcagccccagccccctggccgtggtgcagcccaccgccgtgaacatcagcgccaacggcttcggcttcgccatctgccagctgaacgtggtgtacaacgtgaaggccagcggcagcagcagaagaagaagaagcatccagaaccaggaggccttcgacctggacgtggccgtgaaggagaacaaggacgacctgaaccacgtggacctgaacgtgtgcaccagcttcagcggccccggcagaagcggcatggccctgatggaggtgaacctgctgagcggcttcatggtgcccagcgaggccatcagcctgagcgagaccgtgaagaaggtggagtacgaccacggcaagctgaacctgtacctggacagcgtgaacgagacccagttctgcgtgaacatccccgccgtgagaaacttcaaggtgagcaacacccaggacgccagcgtgagcatcgtggactactacgagcccagaagacaggccgtgagaagctacaacagcgaggtgaagctgagcagctgcgacctgtgcagcgacgtgcagggctgcagaccctgcgaggacggcgccagcggcagccaccaccacagcagcgtgatcttcatcttctgcttcaagctgctgtacttcatggagctgtggctgtag

SEQ ID NO: 75835 - DNA, 762 bp, synthetic construct
  misc_feature 1..762: note = Description of Artificial Sequence: Synthetic coding sequence
  source 1..762: mol_type = other DNA
atgggcgagttcaacgagaagaagaccacctgcggcaccgtgtgcctgaagtacctgctgttcacctacaactgctgcttctggctggccggcctggccgtgatggccgtgggcatctggaccctggccctgaagagcgactacatcagcctgctggccagcggcacctacctggccaccgcctacatcctggtggtggccggcaccgtggtgatggtgaccggcgtgctgggctgctgcgccaccttcaaggagagaagaaacctgctgagactgtacttcatcctgctgctgatcatcttcctgctggagatcatcgccggcatcctggcctacgcctactaccagcagctgaacaccgagctgaaggagaacctgaaggacaccatgaccaagagataccaccagcccggccacgaggccgtgaccagcgccgtggaccagctgcagcaggagttccactgctgcggcagcaacaacagccaggactggagagacagcgagtggatcagaagccaggaggccggcggcagagtggtgcccgacagctgctgcaagaccgtggtggccctgtgcggccagagagaccacgccagcaacatctacaaggtggagggcggctgcatcaccaagctggagaccttcatccaggagcacctgagagtgatcggcgccgtgggcatcggcatcgcctgcgtgcaggtgttcggcatgatcttcacctgctgcctgtacagaagcctgaagctggagcactactag

SEQ ID NO: 75836 - DNA, 762 bp, synthetic construct; identical to SEQ ID NO: 75835
  misc_feature 1..762: note = Description of Artificial Sequence: Synthetic coding sequence
  source 1..762: mol_type = other DNA

SEQ ID NO: 75837 - DNA, 762 bp, synthetic construct; identical to SEQ ID NO: 75835
  misc_feature 1..762: note = Description of Artificial Sequence: Synthetic coding sequence
  source 1..762: mol_type = other DNA

SEQ ID NO: 75838 - DNA, 543 bp, synthetic construct
  misc_feature 1..543: note = Description of Artificial Sequence: Synthetic coding sequence
  source 1..543: mol_type = other DNA
atgggcgagttcaacgagaagaagaccacctgcggcaccgtgtgcctgaagtacctgctgttcacctacaactgctgcttctggctggccggcctggccgtgatggccgtgggcatctggaccctggccctgaagagcgactacatcagcctgctggccagcggcacctacctggccaccgcctacatcctggtggtggccggcaccgtggtgatggtgaccggcgtgctgggctgctgcgccaccttcaaggagagaagaaacctgctgagactgtacttcatcctgctgctgatcatcttcctgctggagatcatcgccggcatcctggcctacgcctactaccagcagctgaacaccgagctgaaggagaacctgaaggacaccatgaccaagagataccaccagcccggccacgaggccgtgaccagcgccgtggaccagctgcagcaggagttccactgctgcggcagcaacaacagccaggactggagagacagcgagtggatcagaagccaggaggccggcggcagagtggtgtag

SEQ ID NO: 75839 - DNA, 240 bp, synthetic construct
  misc_feature 1..240: note = Description of Artificial Sequence: Synthetic coding sequence
  source 1..240: mol_type = other DNA
atgggcgagttcaacgagaagaagaccacctgcggcaccgtgtgcctgaagtacctgctgttcacctacaactgctgcttctggctggccggcctggccgtgatggccgtgggcatctggaccctggccctgaagagcgactacatcagcctgctggccagcggcacctacctggccaccgcctacatcctggtggtggccggcaccgtggtgatggtgaccggcgtgctgggctgctag

SEQ ID NO: 75840 - DNA, 279 bp, synthetic construct
  misc_feature 1..279: note = Description of Artificial Sequence: Synthetic coding sequence
  source 1..279: mol_type = other DNA
atgggcgagttcaacgagaagaagaccacctgcggcaccgtgtgcctgaagtacctgctgttcacctacaactgctgcttctggctggccggcctggccgtgatggccgtgggcatctggaccctggccctgaagagcgactacatcagcctgctggccagcggcacctacctggccaccgcctacatcctggtggtggccggcaccgtggtgatggtgaccggcgtgctgggctgctgcgccaccttcaaggagagaagaaacctgctgagactgtag

SEQ ID NO: 75841 - DNA, 198 bp, synthetic construct
  misc_feature 1..198: note = Description of Artificial Sequence: Synthetic coding sequence
  source 1..198: mol_type = other DNA
atgggcgagttcaacgagaagaagaccacctgcggcaccgtgtgcctgaagtacctgctgttcacctacaactgctgcttctggctggccggcctggccgtgatggccgtgggcatctggaccctggccctgaagagcgactacatcagcctgctggccagcggcacctacctggccaccgcctacatcctggtgtag

SEQ ID NO: 75842 - DNA, 531 bp, synthetic construct
  misc_feature 1..531: note = Description of Artificial Sequence: Synthetic coding sequence
  source 1..531: mol_type = other DNA
atgggcgagttcaacgagaagaagaccacctgcggcaccgtgtgcctgaagtacctgctgttcacctacaactgctgcttctggctggccggcctggccgtgatggccgtgggcatctggaccctggccctgaagagcgactacatcagcctgctggccagcggcacctacctggccaccgcctacatcctggtggtggccggcaccgtggtgatggtgaccggcgtgctgggctgctgcgccaccttcaaggagagaagaaacctgctgagactgtacttcatcctgctgctgatcatcttcctgctggagatcatcgccggcatcctggcctacgcctactaccagcagctgaacaccgagctgaaggagaacctgaaggacaccatgaccaagagataccaccagcccggccacgaggccgtgaccagcgccgtggaccagctgcagcaggagttccactgctgcggcagcaacaacagccaggactggagagacagcgagtggatcagaagccaggaggccggctag

SEQ ID NO: 75843 - DNA, 543 bp, synthetic construct; identical to SEQ ID NO: 75838
  misc_feature 1..543: note = Description of Artificial Sequence: Synthetic coding sequence
  source 1..543: mol_type = other DNA

SEQ ID NO: 75844 - DNA, 273 bp, synthetic construct
  misc_feature 1..273: note = Description of Artificial Sequence: Synthetic coding sequence
  source 1..273: mol_type = other DNA
atgggcgagttcaacgagaagaagaccacctgcggcaccgtgtgcctgaagtacctgctgttcacctacaactgctgcttctggctggccggcctggccgtgatggccgtgggcatctggaccctggccctgaagagcgactacatcagcctgctggccagcggcacctacctggccaccgcctacatcctggtggtggccggcaccgtggtgatggtgaccggcgtgctgggctgctgcgccaccttcaaggagagaagaaacctgctgtag

SEQ ID NO: 75845 - DNA, 513 bp, synthetic construct
  misc_feature 1..513: note = Description of Artificial Sequence: Synthetic coding sequence
  source 1..513: mol_type = other DNA
atgggcgagttcaacgagaagaagaccacctgcggcaccgtgtgcctgaagtacctgctgttcacctacaactgctgcttctggctggccggcctggccgtgatggccgtgggcatctggaccctggccctgaagagcgactacatcagcctgctggccagcggcacctacctggccaccgcctacatcctggtggtggccggcaccgtggtgatggtgaccggcgtgctgggctgctgcgccaccttcaaggagagaagaaacctgctgagactgtacttcatcctgctgctgatcatcttcctgctggagatcatcgccggcatcctggcctacgcctactaccagcagctgaacaccgagctgaaggagaacctgaaggacaccatgaccaagagataccaccagcccggccacgaggccgtgaccagcgccgtggaccagctgcagcaggagttccactgctgcggcagcaacaacagccaggactggagagacagcgagtggatctag

SEQ ID NO: 75846 - DNA, 762 bp, synthetic construct; identical to SEQ ID NO: 75835
  misc_feature 1..762: note = Description of Artificial Sequence: Synthetic coding sequence
  source 1..762: mol_type = other DNA

SEQ ID NO: 75847 - DNA, 3471 bp, synthetic construct
  misc_feature 1..3471: note = Description of Artificial Sequence: Synthetic coding sequence
  source 1..3471: mol_type = other DNA
atgagcaagctgagaatggtgctgctggaggacagcggcagcgccgacttcagaagacacttcgtgaacctgagccccttcaccatcaccgtggtgctgctgctgagcgcctgcttcgtgaccagcagcctgggcggcaccgacaaggagctgagactggtggacggcgagaacaagtgcagcggcagagtggaggtgaaggtgcaggaggagtggggcaccgtgtgcaacaacggctggagcatggaggccgtgagcgtgatctgcaaccagctgggctgccccaccgccatcaaggcccccggctgggccaacagcagcgccggcagcggcagaatctggatggaccacgtgagctgcagaggcaacgagagcgccctgtgggactgcaagcacgacggctggggcaagcacagcaactgcacccaccagcaggacgccggcgtgacctgcagcgacggcagcaacctggagatgagactgaccagaggcggcaacatgtgcagcggcagaatcgagatcaagttccagggcagatggggcaccgtgtgcgacgacaacttcaacatcgaccacgccagcgtgatctgcagacagctggagtgcggcagcgccgtgagcttcagcggcagcagcaacttcggcgagggcagcggccccatctggttcgacgacctgatctgcaacggcaacgagagcgccctgtggaactgcaagcaccagggctggggcaagcacaactgcgaccacgccgaggacgccggcgtgatctgcagcaagggcgccgacctgagcctgagactggtggacggcgtgaccgagtgcagcggcagactggaggtgagattccagggcgagtggggcaccatctgcgacgacggctgggacagctacgacgccgccgtggcctgcaagcagctgggctgccccaccgccgtgaccgccatcggcagagtgaacgccagcaagggcttcggccacatctggctggacagcgtgagctgccagggccacgagcccgccatctggcagtgcaagcaccacgagtggggcaagcactactgcaaccacaacgaggacgccggcgtgacctgcagcgacggcagcgacctggagctgagactgagaggcggcggcagcagatgcgccggcaccgtggaggtggagatccagagactgctgggcaaggtgtgcgacagaggctggggcctgaaggaggccgacgtggtgtgcagacagctgggctgcggcagcgccctgaagaccagctaccaggtgtacagcaagatccaggccaccaacacctggctgttcctgagcagctgcaacggcaacgagaccagcctgtgggactgcaagaactggcagtggggcggcctgacctgcgaccactacgaggaggccaagatcacctgcagcgcccacagagagcccagactggtgggcggcgacatcccctgcagcggcagagtggaggtgaagcacggcgacacctggggcagcatctgcgacagcgacttcagcctggaggccgccagcgtgctgtgcagagagctgcagtgcggcaccgtggtgagcatcctgggcggcgcccacttcggcgagggcaacggccagatctgggccgaggagttccagtgcgagggccacgagagccacctgagcctgtgccccgtggcccccagacccgagggcacctgcagccacagcagagacgtgggcgtggtgtgcagcagatacaccgagatcagactggtgaacggcaagaccccctgcgagggcagagtggagctgaagaccctgggcgcctggggcagcctgtgcaacagccactgggacatcgaggacgcccacgtgctgtgccagcagctgaagtgcggcgtggccctgagcacccccggcggcgccagattcggcaagggcaacggccagatctggagacacatgttccactgcaccggcaccgagcagcacatgggcgactgccccgtgaccgccctgggcgccagcctgtgccccagcgagcaggtggccagcgtgatctgcagcggcaaccagagccagaccctgagcagctgcaacagcagcagcctgggccccaccagacccaccatccccgaggagagcgccgtggcctgcatcgagagcggccagctgagactggtgaacggcggcggcagatgcgccggcagagtggagatctaccacgagggcagctggggcaccatctgcgacgacagctgggacctgagcgacgcccacgtggtgtgcagacagctgggctgcggcgaggccatcaacgccaccggcagcgcccacttcggcgagggcaccggccccatctggctggacgagatgaagtgcaacggcaaggagagcagaatctggcagtgccacagccacggctggggccagcagaactgcagacacaaggaggacgccggcgtgatctgcagcgagttcatgagcctgagactgaccagcgaggccagcagagaggcctgcgccggcagactggaggtgttctacaacggcgcctggggcaccgtgggcaagagcagcatgagcgagaccaccgtgggcgtggtgtgcagacagctgggctgcgccgacaagggcaagatcaaccccgccagcctggacaaggccatgagcatccccatgtgggtggacaacgtgcagtgccccaagggccccgacaccctgtggcagtgccccagcagcccctgggagaagagactggccagccccagcgaggagacctggatcacctgcgacaacaagatcagactgcaggagggccccaccagctgcagcggcagagtggagatctggcacggcggcagctggggcaccgtgtgcgacgacagctgggacctggacgacgcccaggtggtgtgccagcagctgggctgcggccccgccctgaaggccttcaaggaggccgagttcggccagggcaccggccccatctggctgaacgaggtgaagtgcaagggcaacgagagcagcctgtgggactgccccgccagaagatggggccacagcgagtgcggccacaaggaggacgccgccgtgaactgcaccgacatcagcgtgcagaagaccccccagaaggccaccaccggcagaagcagcagacagagcagcttcatcgccgtgggcatcctgggcgtggtgctgctggccatcttcgtggccctgttcttcctgaccaagaagagaagacagagacagagactggccgtgagcagcagaggcgagaacctggtgcaccagatccagtacagagagatgaacagctgcctgaacgccgacgacctggacctgatgaacagcagcgagaacagccacgagagcgccgacttcagcgccgccgagctgatcagcgtgagcaagttcctgcccatcagcggcatggagaaggaggccatcctgagccacaccgagaaggagaacggcaacctgtag

SEQ ID NO: 75848 - DNA, 3465 bp, synthetic construct
  misc_feature 1..3465: note = Description of Artificial Sequence: Synthetic coding sequence
  source 1..3465: mol_type = other DNA
atgagcaagctgagaatggtgctgctggaggacagcggcagcgccgacttcagaagacacttcgtgaacctgagccccttcaccatcaccgtggtgctgctgctgagcgcctgcttcgtgaccagcagcctgggcggcaccgacaaggagctgagactggtggacggcgagaacaagtgcagcggcagagtggaggtgaaggtgcaggaggagtggggcaccgtgtgcaacaacggctggagcatggaggccgtgagcgtgatctgcaaccagctgggctgccccaccgccatcaaggcccccggctgggccaacagcagcgccggcagcggcagaatctggatggaccacgtgagctgcagaggcaacgagagcgccctgtgggactgcaagcacgacggctggggcaagcacagcaactgcacccaccagcaggacgccggcgtgacctgcagcgacggcagcaacctggagatgagactgaccagaggcggcaacatgtgcagcggcagaatcgagatcaagttccagggcagatggggcaccgtgtgcgacgacaacttcaacatcgaccacgccagcgtgatctgcagacagctggagtgcggcagcgccgtgagcttcagcggcagcagcaacttcggcgagggcagcggccccatctggttcgacgacctgatctgcaacggcaacgagagcgccctgtggaactgcaagcaccagggctggggcaagcacaactgcgaccacgccgaggacgccggcgtgatctgcagcaagggcgccgacctgagcctgagactggtggacggcgtgaccgagtgcagcggcagactggaggtgagattccagggcgagtggggcaccatctgcgacgacggctgggacagctacgacgccgccgtggcctgcaagcagctgggctgccccaccgccgtgaccgccatcggcagagtgaacgccagcaagggcttcggccacatctggctggacagcgtgagctgccagggccacgagcccgccatctggcagtgcaagcaccacgagtggggcaagcactactgcaaccacaacgaggacgccggcgtgacctgcagcgacggcagcgacctggagctgagactgagaggcggcggcagcagatgcgccggcaccgtggaggtggagatccagagactgctgggcaaggtgtgcgacagaggctggggcctgaaggaggccgacgtggtgtgcagacagctgggctgcggcagcgccctgaagaccagctaccaggtgtacagcaagatccaggccaccaacacctggctgttcctgagcagctgcaacggcaacgagaccagcctgtgggactgcaagaactggcagtggggcggcctgacctgcgaccactacgaggaggccaagatcacctgcagcgcccacagagagcccagactggtgggcggcgacatcccctgcagcggcagagtggaggtgaagcacggcgacacctggggcagcatctgcgacagcgacttcagcctggaggccgccagcgtgctgtgcagagagctgcagtgcggcaccgtggtgagcatcctgggcggcgcccacttcggcgagggcaacggccagatctgggccgaggagttccagtgcgagggccacgagagccacctgagcctgtgccccgtggcccccagacccgagggcacctgcagccacagcagagacgtgggcgtggtgtgcagcagcaagacccagaagaccagcctgatcggcagccacaccgtgaagggcaccggcctgggcagccacagctgcctgttcctgaagccctgcctgctgcccggctacaccgagatcagactggtgaacggcaagaccccctgcgagggcagagtggagctgaagaccctgggcgcctggggcagcctgtgcaacagccactgggacatcgaggacgcccacgtgctgtgccagcagctgaagtgcggcgtggccctgagcacccccggcggcgccagattcggcaagggcaacggccagatctggagacacatgttccactgcaccggcaccgagcagcacatgggcgactgccccgtgaccgccctgggcgccagcctgtgccccagcgagcaggtggccagcgtgatctgcagcggcaaccagagccagaccctgagcagctgcaacagcagcagcctgggccccaccagacccaccatccccgaggagagcgccgtggcctgcatcgagagcggccagctgagactggtgaacggcggcggcagatgcgccggcagagtggagatctaccacgagggcagctggggcaccatctgcgacgacagctgggacctgagcgacgcccacgtggtgtgcagacagctgggctgcggcgaggccatcaacgccaccggcagcgcccacttcggcgagggcaccggccccatctggctggacgagatgaagtgcaacggcaaggagagcagaatctggcagtgccacagccacggctggggccagcagaactgcagacacaaggaggacgccggcgtgatctgcagcgagttcatgagcctgagactgaccagcgaggccagcagagaggcctgcgccggcagactggaggtgttctacaacggcgcctggggcaccgtgggcaagagcagcatgagcgagaccaccgtgggcgtggtgtgcagacagctgggctgcgccgacaagggcaagatcaaccccgccagcctggacaaggccatgagcatccccatgtgggtggacaacgtgcagtgccccaagggccccgacaccctgtggcagtgccccagcagcccctgggagaagagactggccagccccagcgaggagacctggatcacctgcgacaacaagatcagactgcaggagggccccaccagctgcagcggcagagtggagatctggcacggcggcagctggggcaccgtgtgcgacgacagctgggacctggacgacgcccaggtggtgtgccagcagctgggctgcggccccgccctgaaggccttcaaggaggccgagttcggccagggcaccggccccatctggctgaacgaggtgaagtgcaagggcaacgagagcagcctgtgggactgccccgccagaagatggggccacagcgagtgcggccacaaggaggacgccgccgtgaactgcaccgacatcagcgtgcagaagaccccccagaaggccaccaccggcagaagcagcagacagagcagcttcatcgccgtgggcatcctgggcgtggtgctgctggccatcttcgtggccctgttcttcctgaccaagaagagaagacagagacagagactggccgtgagcagcagaggcgagaacctggtgcaccagatccagtacagagagatgaacagctgcctgaacgccgacgacctggacctgatgaacagcagcggcggccacagcgagccccactag

SEQ ID NO: 75849 - DNA, 3366 bp, synthetic construct
  misc_feature 1..3366: note = Description of Artificial Sequence: Synthetic coding sequence
  source 1..3366: mol_type = other DNA
atgagcaagctgagaatggtgctgctggaggacagcggcagcgccgacttcagaagacacttcgtgaacctgagccccttcaccatcaccgtggtgctgctgctgagcgcctgcttcgtgaccagcagcctgggcggcaccgacaaggagctgagactggtggacggcgagaacaagtgcagcggcagagtggaggtgaaggtgcaggaggagtggggcaccgtgtgcaacaacggctggagcatggaggccgtgagcgtgatctgcaaccagctgggctgccccaccgccatcaaggcccccggctgggccaacagcagcgccggcagcggcagaatctggatggaccacgtgagctgcagaggcaacgagagcgccctgtgggactgcaagcacgacggctggggcaagcacagcaactgcacccaccagcaggacgccggcgtgacctgcagcgacggcagcaacctggagatgagactgaccagaggcggcaacatgtgcagcggcagaatcgagatcaagttccagggcagatggggcaccgtgtgcgacgacaacttcaacatcgaccacgccagcgtgatctgcagacagctggagtgcggcagcgccgtgagcttcagcggcagcagcaacttcggcgagggcagcggccccatctggttcgacgacctgatctgcaacggcaacgagagcgccctgtggaactgcaagcaccagggctggggcaagcacaactgcgaccacgccgaggacgccggcgtgatctgcagcaagggcgccgacctgagcctgagactggtggacggcgtgaccgagtgcagcggcagactggaggtgagattccagggcgagtggggcaccatctgcgacgacggctgggacagctacgacgccgccgtggcctgcaagcagctgggctgccccaccgccgtgaccgccatcggcagagtgaacgccagcaagggcttcggccacatctggctggacagcgtgagctgccagggccacgagcccgccatctggcagtgcaagcaccacgagtggggcaagcactactgcaaccacaacgaggacgccggcgtgacctgcagcgacggcagcgacctggagctgagactgagaggcggcggcagcagatgcgccggcaccgtggaggtggagatccagagactgctgggcaaggtgtgcgacagaggctggggcctgaaggaggccgacgtggtgtgcagacagctgggctgcggcagcgccctgaagaccagctaccaggtgtacagcaagatccaggccaccaacacctggctgttcctgagcagctgcaacggcaacgagaccagcctgtgggactgcaagaactggcagtggggcggcctgacctgcgaccactacgaggaggccaagatcacctgcagcgcccacagagagcccagactggtgggcggcgacatcccctgcagcggcagagtggaggtgaagcacggcgacacctggggcagcatctgcgacagcgacttcagcctggaggccgccagcgtgctgtgcagagagctgcagtgcggcaccgtggtgagcatcctgggcggcgcccacttcggcgagggcaacggccagatctgggccgaggagttccagtgcgagggccacgagagccacctgagcctgtgccccgtggcccccagacccgagggcacctgcagccacagcagagacgtgggcgtggtgtgcagcagatacaccgagatcagactggtgaacggcaagaccccctgcgagggcagagtggagctgaagaccctgggcgcctggggcagcctgtgcaacagccactgggacatcgaggacgcccacgtgctgtgccagcagctgaagtgcggcgtggccctgagcacccccggcggcgccagattcggcaagggcaacggccagatctggagacacatgttccactgcaccggcaccgagcagcacatgggcgactgccccgtgaccgccctgggcgccagcctgtgccccagcgagcaggtggccagcgtgatctgcagcggcaaccagagccagaccctgagcagctgcaacagcagcagcctgggccccaccagacccaccatccccgaggagagcgccgtggcctgcatcgagagcggccagctgagactggtgaacggcggcggcagatgcgccggcagagtggagatctaccacgagggcagctggggcaccatctgcgacgacagctgggacctgagcgacgcccacgtggtgtgcagacagctgggctgcggcgaggccatcaacgccaccggcagcgcccacttcggcgagggcaccggccccatctggctggacgagatgaagtgcaacggcaaggagagcagaatctggcagtgccacagccacggctggggccagcagaactgcagacacaaggaggacgccggcgtgatctgcagcgagttcatgagcctgagactgaccagcgaggccagcagagaggcctgcgccggcagactggaggtgttctacaacggcgcctggggcaccgtgggcaagagcagcatgagcgagaccaccgtgggcgtggtgtgcagacagctgggctgcgccgacaagggcaagatcaaccccgccagcctggacaaggccatgagcatccccatgtgggtggacaacgtgcagtgccccaagggccccgacaccctgtggcagtgccccagcagcccctgggagaagagactggccagccccagcgaggagacctggatcacctgcgacaacaagatcagactgcaggagggccccaccagctgcagcggcagagtggagatctggcacggcggcagctggggcaccgtgtgcgacgacagctgggacctggacgacgcccaggtggtgtgccagcagctgggctgcggccccgccctgaaggccttcaaggaggccgagttcggccagggcaccggccccatctggctgaacgaggtgaagtgcaagggcaacgagagcagcctgtgggactgccccgccagaagatggggccacagcgagtgcggccacaaggaggacgccgccgtgaactgcaccgacatcagcgtgcagaagaccccccagaaggccaccaccggcagaagcagcagacagagcagcttcatcgccgtgggcatcctgggcgtggtgctgctggccatcttcgtggccctgttcttcctgaccaagaagagaagacagagacagagactggccgtgagcagcagaggcgagaacctggtgcaccagatccagtacagagagatgaacagctgcctgaacgccgacgacctggacctgatgaacagcagcggcggccacagcgagccccactag

SEQ ID NO: 75850 - DNA, 555 bp, synthetic construct
  misc_feature 1..555: note = Description of Artificial Sequence: Synthetic coding sequence
  source 1..555: mol_type = other DNA
atgagcagactgagcagaagcctgctgtgggccgccacctgcctgggcgtgctgtgcgtgctgagcgccgacaagaacaccacccagcaccccaacgtgaccaccctggcccccatcagcaacgtgaccagcgcccccgtgaccagcctgcccctggtgaccacccccgcccccgagacctgcgagggcagaaacagctgcgtgagctgcttcaacgtgagcgtggtgaacaccacctgcttctggatcgagtgcaaggacgagagctactgcagccacaacagcaccgtgagcgactgccaggtgggcaacaccaccgacttctgcagcgccaagcccaccgtgcagcccagccccagcaccaccagcaagaccgtgaccaccagcggcaccaccaacaacaccgtgacccccaccagccagcccgtgagaaagagcaccttcgacgccgccagcttcatcggcggcatcgtgctggtgctgggcgtgcaggccgtgatcttcttcctgtacaagttctgcaagagcaaggagagaaactaccacaccctgtag

SEQ ID NO: 75851 - DNA, 594 bp, synthetic construct
  misc_feature 1..594: note = Description of Artificial Sequence: Synthetic coding sequence
  source 1..594: mol_type = other DNA
atgagcagactgagcagaagcctgctgtgggccgccacctgcctgggcgtgctgtgcgtgctgagcgccgacaagaacaccacccagcaccccaacgtgaccaccctggcccccatcagcaacgtgaccagcgcccccgtgaccagcctgcccctggtgaccacccccgcccccgagacctgcgagggcagaaacagctgcgtgagctgcttcaacgtgagcgtggtgaacaccacctgcttctggatcgagtgcaaggacgagagctactgcagccacaacagcaccgtgagcgactgccaggtgggcaacaccaccgacttctgcagcgtgagcaccgccacccccgtgcccaccgccaacagcaccgccaagcccaccgtgcagcccagccccagcaccaccagcaagaccgtgaccaccagcggcaccaccaacaacaccgtgacccccaccagccagcccgtgagaaagagcaccttcgacgccgccagcttcatcggcggcatcgtgctggtgctgggcgtgcaggccgtgatcttcttcctgtacaagttctgcaagagcaaggagagaaactaccacaccctgtag

SEQ ID NO: 75852 - DNA, 537 bp, synthetic construct
  misc_feature 1..537: note = Description of Artificial Sequence: Synthetic coding sequence
  source 1..537: mol_type = other DNA
atgagcagactgagcagaagcctgctgtgggccgccacctgcctgggcgtgctgtgcgtgctgagcgccgacaagaacaccacccagcaccccaacgtgaccaccctggcccccatcagcaacgtgaccagcgcccccgtgaccagcctgcccctggtgaccacccccgcccccgagacctgcgagggcagaaacagctgcgtgagctgcttcaacgtgagcgtggtgaacaccacctgcttctggatcgagtgcaaggacgagagctactgcagccacaacagcaccgtgagcgactgccaggtgggcaacaccaccgacttctgcagcgtgagcaccgccacccccgtgcccaccgccaacagcaccggcaccaccaacaacaccgtgacccccaccagccagcccgtgagaaagagcaccttcgacgccgccagcttcatcggcggcatcgtgctggtgctgggcgtgcaggccgtgatcttcttcctgtacaagttctgcaagagcaaggagagaaactaccacaccctgtag

SEQ ID NO: 75853 - DNA, 498 bp, synthetic construct
  misc_feature 1..498: note = Description of Artificial Sequence: Synthetic coding sequence
  source 1..498: mol_type = other DNA
atgagcagactgagcagaagcctgctgtgggccgccacctgcctgggcgtgctgtgcgtgctgagcgccgacaagaacaccacccagcaccccaacgtgaccaccctggcccccatcagcaacgtgaccagcgcccccgtgaccagcctgcccctggtgaccacccccgcccccgagacctgcgagggcagaaacagctgcgtgagctgcttcaacgtgagcgtggtgaacaccacctgcttctggatcgagtgcaaggacgagagctactgcagccacaacagcaccgtgagcgactgccaggtgggcaacaccaccgacttctgcagcggcaccaccaacaacaccgtgacccccaccagccagcccgtgagaaagagcaccttcgacgccgccagcttcatcggcggcatcgtgctggtgctgggcgtgcaggccgtgatcttcttcctgtacaagttctgcaagagcaaggagagaaactaccacaccctgtag

SEQ ID NO: 75854 - DNA, 570 bp, synthetic construct
  misc_feature 1..570: note = Description of Artificial Sequence: Synthetic coding sequence
  source 1..570: mol_type = other DNA
atgagcagactgagcagaagcctgctgtgggccgccacctgcctgggcgtgctgtgcgtgctgagcgccgacaagaacaccacccagcaccccaacgtgaccaccctggcccccatcagcaacgtgaccagcgcccccgtgaccagcctgcccctggtgaccacccccgcccccgagacctgcgagggcagaaacagctgcgtgagctgcttcaacgtgagcgtggtgaacaccacctgcttctggatcgagtgcaaggacgagagctactgcagccacaacagcaccgtgagcgactgccaggtgggcaacaccaccgacttctgcagcgtgagcaccgccacccccgtgcccaccgccaacagcaccgccaagcccaccgtgcagcccagccccagcaccaccagcaagaccgtgaccaccagcggcaccaccaacaacaccgtgacccccaccagccagcccgtgagaaagagcaccttcgacgccgccagcttcatcggcggcatcgtgctggtgctggagatcagatgccacaccagaaactacatccccgacctgaagaagtag

SEQ ID NO: 75855 - DNA, 474 bp, synthetic construct
  misc_feature 1..474: note = Description of Artificial Sequence: Synthetic coding sequence
  source 1..474: mol_type = other DNA
atgagcagactgagcagaagcctgctgtgggccgccacctgcctgggcgtgctgtgcgtgctgagcgccgacaagaacaccacccagcaccccaacgtgaccaccctggcccccatcagcaacgtgaccagcgcccccgtgaccagcctgcccctggtgaccacccccgcccccgagacctgcgagggcagaaacagctgcgtgagctgcttcaacgtgagcgtggtgaacaccacctgcttctggatcgagtgcaaggacgagagctactgcagccacaacagcaccgtgagcgactgccaggtgggcaacaccaccgacttctgcagcgtgagcaccgccacccccgtgcccaccgccaacagcaccgccaagcccaccgtgcagcccagccccagcaccaccagcaagaccgtgaccaccagcgagatcagatgccacaccagaaactacatccccgacctgaagaagtag

SEQ ID NO: 75856 - DNA, 747 bp, synthetic construct
  misc_feature 1..747: note = Description of Artificial Sequence: Synthetic coding sequence
  source 1..747: mol_type = other DNA
atgagcgccgtgctgctgctggccctgctgggcttcatcctgcccctgcccggcgtgcaggccctgctgtgccagttcggcaccgtgcagcacgtgtggaaggtgagcgacctgcccagacagtggacccccaagaacaccagctgcgacagcggcctgggctgccaggacaccctgatgctgatcgagagcggcccccaggtgagcctggtgctgagcaagggctgcaccgaggccaaggaccaggagcccagagtgaccgagcacagaatgggccccggcctgagcctgatcagctacaccttcgtgtgcagacaggaggacttctgcaacaacctggtgaacagcctgcccctgtgggccccccagccccccgccgaccccggcagcctgagatgccccgtgtgcctgagcatggagggctgcctggagggcaccaccgaggagatctgccccaagggcaccacccactgctacgacggcctgctgagactgagaggcggcggcatcttcagcaacctgagagtgcagggctgcatgccccagcccgtgtgcaacctgctgaacggcacccaggagatcggccccgtgggcatgaccgagaactgcgacatgaaggacttcctgcagctgaagcccgtgggcctgctggaggagcacaacgtgggcgagaaggagagaggccagggccagcaccagtgcgtgcagctggactggcagaagagagccgccaccggcatcttctag

SEQ ID NO: 75857 - DNA, 438 bp, synthetic construct
  misc_feature 1..438: note = Description of Artificial Sequence: Synthetic coding sequence
  source 1..438: mol_type = other DNA
atgagcgccgtgctgctgctggccctgctgggcttcatcctgcccctgcccggcgtgcaggccctgctgtgccagttcggcaccgtgcagcacgtgtggaaggtgagcgacctgcccagacagtggacccccaagaacaccagctgcgacagcggcctgggctgccaggacaccctgatgctgatcgagagcggcccccaggtgagcctggtgctgagcaagggctgcaccgaggccaaggaccaggagcccagagtgaccgagcacagaatgggccccggcctgagcctgatcagctacaccttcgtgtgcagacaggaggacttctgcaacaacctggtgaacagcctgcccctgtgggccccccagccccccgccgaccccatgatgggcgccgccgagggccccttcggcaaggccgagcaggtggacagctag

SEQ ID NO: 75858 - DNA, 438 bp, synthetic construct; identical to SEQ ID NO: 75857
  misc_feature 1..438: note = Description of Artificial Sequence: Synthetic coding sequence
  source 1..438: mol_type = other DNA

SEQ ID NO: 75859 - DNA, 1671 bp, synthetic construct
  misc_feature 1..1671: note = Description of Artificial Sequence: Synthetic coding sequence
  source 1..1671: mol_type = other DNA
atgcccccccccagactgctgttcttcctgctgttcctgacccccatggaggtgagacccgaggagcccctggtggtgaaggtggaggagggcgacaacgccgtgctgcagtgcctgaagggcaccagcgacggccccacccagcagctgacctggagcagagagagccccctgaagcccttcctgaagctgagcctgggcctgcccggcctgggcatccacatgagacccctggccatctggctgttcatcttcaacgtgagccagcagatgggcggcttctacctgtgccagcccggcccccccagcgagaaggcctggcagcccggctggaccgtgaacgtggagggcagcggcgagctgttcagatggaacgtgagcgacctgggcggcctgggctgcggcctgaagaacagaagcagcgagggccccagcagccccagcggcaagctgatgagccccaagctgtacgtgtgggccaaggacagacccgagatctgggagggcgagcccccctgcctgccccccagagacagcctgaaccagagcctgagccaggacctgaccatggcccccggcagcaccctgtggctgagctgcggcgtgccccccgacagcgtgagcagaggccccctgagctggacccacgtgcaccccaagggccccaagagcctgctgagcctggagctgaaggacgacagacccgccagagacatgtgggtgatggagaccggcctgctgctgcccagagccaccgcccaggacgccggcaagtactactgccacagaggcaacctgaccatgagcttccacctggagatcaccgccagacccgtgctgtggcactggctgctgagaaccggcggctggaaggtgagcgccgtgaccctggcctacctgatcttctgcctgtgcagcctggtgggcatcctgcacctgcagagagccctggtgctgagaagaaagagaaagagaatgaccgaccccaccagaagattcttcaaggtgacccccccccccggcagcggcccccagaaccagtacggcaacgtgctgagcctgcccacccccaccagcggcctgggcagagcccagagatgggccgccggcctgggcggcaccgcccccagctacggcaaccccagcagcgacgtgcaggccgacggcgccctgggcagcagaagcccccccggcgtgggccccgaggaggaggagggcgagggctacgaggagcccgacagcgaggaggacagcgagttctacgagaacgacagcaacctgggccaggaccagctgagccaggacggcagcggctacgagaaccccgaggacgagcccctgggccccgaggacgaggacagcttcagcaacgccgagagctacgagaacgaggacgaggagctgacccagcccgtggccagaaccatggacttcctgagcccccacggcagcgcctgggaccccagcagagaggccaccagcctgggcagccagagctacgaggacatgagaggcatcctgtacgccgccccccagctgagaagcatcagaggccagcccggccccaaccacgaggaggacgccgacagctacgagaacatggacaaccccgacggccccgaccccgcctggggcggcggcggcagaatgggcacctggagcaccagatag

SEQ ID NO: 75860 - DNA, 1092 bp, synthetic construct
  misc_feature 1..1092: note = Description of Artificial Sequence: Synthetic coding sequence
  source 1..1092: mol_type = other DNA
atggaggtgagacccgaggagcccctggtggtgaaggtggaggagggcgacaacgccgtgctgcagtgcctgaagggcaccagcgacggccccacccagcagctgacctggagcagagagagccccctgaagcccttcctgaagctgagcctgggcctgcccggcctgggcatccacatgagacccctgggcaagtactactgccacagaggcaacctgaccatgagcttccacctggagatcaccgccagacccgtgctgtggcactggctgctgagaaccggcggctggaaggtgagcgccgtgaccctggcctacctgatcttctgcctgtgcagcctggtgggcatcctgcacctgcagagagccctggtgctgagaagaaagagaaagagaatgaccgaccccaccagaagattcttcaaggtgacccccccccccggcagcggcccccagaaccagtacggcaacgtgctgagcctgcccacccccaccagcggcctgggcagagcccagagatgggccgccggcctgggcggcaccgcccccagctacggcaaccccagcagcgacgtgcaggccgacggcgccctgggcagcagaagcccccccggcgtgggccccgaggaggaggagggcgagggctacgaggagcccgacagcgaggaggacagcgagttctacgagaacgacagcaacctgggccaggaccagctgagccaggacggcagcggctacgagaaccccgaggacgagcccctgggccccgaggacgaggacagcttcagcaacgccgagagctacgagaacgaggacgaggagctgacccagcccgtggccagaaccatggacttcctgagcccccacggcagcgcctgggaccccagcagagaggccaccagcctgggcagccagagctacgaggacatgagaggcatcctgtacgccgccccccagctgagaagcatcagaggccagcccggccccaaccacgaggaggacgccgacagctacgagaacatggacaaccccgacggccccgaccccgcctggggcggcggcggcagaatgggcacctggagcaccagatag

SEQ ID NO: 75861 - DNA, 1218 bp, synthetic construct
  misc_feature 1..1218: note = Description of Artificial Sequence: Synthetic coding sequence
  source 1..1218: mol_type = other DNA
atgagccccaagctgtacgtgtgggccaaggacagacccgagatctgggagggcgagcccccctgcctgccccccagagacagcctgaaccagagcctgagccaggacctgaccatggcccccggcagcaccctgtggctgagctgcggcgtgccccccgacagcgtgagcagaggccccctgagctggacccacgtgcaccccaagggccccaagagcctgctgagcctggagctgaaggacgacagacccgccagagacatgtgggtgatggagaccggcctgctgctgcccagagccaccgcccaggacgccggcaagtactactgccacagaggcaacctgaccatgagcttccacctggagatcaccgccagacccgtgctgtggcactggctgctgagaaccggcggctggaaggtgagcgccgtgaccctggcctacctgatcttctgcctgtgcagcctggtgggcatcctgcacctgcagagagccctggtgctgagaagaaagagaaagagaatgaccgaccccaccagaagattcttcaaggtgacccccccccccggcagcggcccccagaaccagtacggcaacgtgctgagcctgcccacccccaccagcggcctgggcagagcccagagatgggccgccggcctgggcggcaccgcccccagctacggcaaccccagcagcgacgtgcaggccgacggcgccctgggcagcagaagcccccccggcgtgggccccgaggaggaggagggcgagggctacgaggagcccgacagcgaggaggacagcgagttctacgagaacgacagcaacctgggccaggaccagctgagccaggacggcagcggctacgagaaccccgaggacgagcccctgggccccgaggacgaggacagcttcagcaacgccgagagctacgagaacgaggacgaggagctgacccagcccgtggccagaaccatggacttcctgagcccccacggcagcgcctgggaccccagcagagaggccaccagcctgggcagccagagctacgaggacatgagaggcatcctgtacgccgccccccagctgagaagcatcagaggccagcccggccccaaccacgaggaggacgccgacagctacgagaacatggacaaccccgacggccccgaccccgcctggggcggcggcggcagaatgggcacctggagcaccagatag

SEQ ID NO: 75862 - DNA, 1674 bp, synthetic construct
  misc_feature 1..1674: note = Description of Artificial Sequence: Synthetic coding sequence
  source 1..1674: mol_type = other DNA
atgcccccccccagactgctgttcttcctgctgttcctgacccccatggaggtgagacccgaggagcccctggtggtgaaggtggaggagggcgacaacgccgtgctgcagtgcctgaagggcaccagcgacggccccacccagcagctgacctggagcagagagagccccctgaagcccttcctgaagctgagcctgggcctgcccggcctgggcatccacatgagacccctggccatctggctgttcatcttcaacgtgagccagcagatgggcggcttctacctgtgccagcccggcccccccagcgagaaggcctggcagcccggctggaccgtgaacgtggagggcagcggcgagctgttcagatggaacgtgagcgacctgggcggcctgggctgcggcctgaagaacagaagcagcgagggccccagcagccccagcggcaagctgatgagccccaagctgtacgtgtgggccaaggacagacccgagatctgggagggcgagcccccctgcctgccccccagagacagcctgaaccagagcctgagccaggacctgaccatggcccccggcagcaccctgtggctgagctgcggcgtgccccccgacagcgtgagcagaggccccctgagctggacccacgtgcaccccaagggccccaagagcctgctgagcctggagctgaaggacgacagacccgccagagacatgtgggtgatggagaccggcctgctgctgcccagagccaccgcccaggacgccggcaagtactactgccacagaggcaacctgaccatgagcttccacctggagatcaccgccagacccgtgctgtggcactggctgctgagaaccggcggctggaaggtgagcgccgtgaccctggcctacctgatcttctgcctgtgcagcctggtgggcatcctgcacctgcagagagccctggtgctgagaagaaagagaaagagaatgaccgaccccaccagaagattcttcaaggtgacccccccccccggcagcggcccccagaaccagtacggcaacgtgctgagcctgcccacccccaccagcggcctgggcagagcccagagatgggccgccggcctgggcggcaccgcccccagctacggcaaccccagcagcgacgtgcaggccgacggcgccctgggcagcagaagcccccccggcgtgggccccgaggaggaggagggcgagggctacgaggagcccgacagcgaggaggacagcgagttctacgagaacgacagcaacctgggccaggaccagctgagccaggacggcagcggctacgagaaccccgaggacgagcccctgggccccgaggacgaggacagcttcagcaacgccgagagctacgagaacgaggacgaggagctgacccagcccgtggccagaaccatggacttcctgagcccccacggcagcgcctgggaccccagcagagaggccaccagcctggccggcagccagagctacgaggacatgagaggcatcctgtacgccgccccccagctgagaagcatcagaggccagcccggccccaaccacgaggaggacgccgacagctacgagaacatggacaaccccgacggccccgaccccgcctggggcggcggcggcagaatgggcacctggagcaccagatag

SEQ ID NO: 75863 - DNA, 984 bp, synthetic construct
  misc_feature 1..984: note = Description of Artificial Sequence: Synthetic coding sequence
  source 1..984: mol_type = other DNA
atgctgttcctgctgctgcccctgctggccgtgctgcccggcgacggcaacgccgacggcctgaaggagcccctgagcttccacgtgacctggatcgccagcttctacaaccacagctggaagcagaacctggtgagcggctggctgagcgacctgcagacccacacctgggacagcaacagcagcaccatcgtgttcctgtgcccctggagcagaggcaacttcagcaacgaggagtggaaggagctggagaccctgttcagaatcagaaccatcagaagcttcgagggcatcagaagatacgcccacgagctgcagttcgagtaccccttcgagatccaggtgaccggcggctgcgagctgcacagcggcaaggtgagcggcagcttcctgcagctggcctaccagggcagcgacttcgtgagcttccagaacaacagctggctgccctaccccgtggccggcaacatggccaagcacttctgcaaggtgctgaaccagaaccagcacgagaacgacatcacccacaacctgctgagcgacacctgccccagattcatcctgggcctgctggacgccggcaaggcccacctgcagagacaggtgaagcccgaggcctggctgagccacggccccagccccggccccggccacctgcagctggtgtgccacgtgagcggcttctaccccaagcccgtgtgggtgatgtggatgagaggcgagcaggagcagcagggcacccagagaggcgacatcctgcccagcgccgacggcacctggtacctgagagccaccctggaggtggccgccggcgaggccgccgacctgagctgcagagtgaagcacagcagcctggagggccaggacatcgtgctgtactgggagcaccacagcagcgtgggcttcatcatcctggccgtgatcgtgcccctgctgctgctgatcggcctggccctgtggttcagaaagagatgcttctgctag

SEQ ID NO: 75864 - DNA, 1002 bp, synthetic construct
  misc_feature 1..1002: note = Description of Artificial Sequence: Synthetic coding sequence
  source 1..1002: mol_type = other DNA
atgctgctgctgcccttccagctgctggccgtgctgttccccggcggcaacagcgagcacgccttccagggccccaccagcttccacgtgatccagaccagcagcttcaccaacagcacctgggcccagacccagggcagcggctggctggacgacctgcagatccacggctgggacagcgacagcggcaccgccatcttcctgaagccctggagcaagggcaacttcagcgacaaggaggtggccgagctggaggagatcttcagagtgtacatcttcggcttcgccagagaggtgcaggacttcgccggcgacttccagatgaagtaccccttcgagatccagggcatcgccggctgcgagctgcacagcggcggcgccatcgtgagcttcctgagaggcgccctgggcggcctggacttcctgagcgtgaagaacgccagctgcgtgcccagccccgagggcggcagcagagcccagaagttctgcgccctgatcatccagtaccagggcatcatggagaccgtgagaatcctgctgtacgagacctgccccagatacctgctgggcgtgctgaacgccggcaaggccgacctgcagagacaggtgaagcccgaggcctggctgagcagcggccccagccccggccccggcagactgcagctggtgtgccacgtgagcggcttctaccccaagcccgtgtgggtgatgtggatgagaggcgagcaggagcagcagggcacccagctgggcgacatcctgcccaacgccaactggacctggtacctgagagccaccctggacgtggccgacggcgaggccgccggcctgagctgcagagtgaagcacagcagcctggagggccaggacatcatcctgtactggagaaaccccaccagcatcggcagcatcgtgctggccatcatcgtgcccagcctgctgctgctgctgtgcctggccctgtggtacatgagaagaagaagctaccagaacatcccctag

SEQ ID NO: 75865 - DNA, 741 bp, synthetic construct
  misc_feature 1..741: note = Description of Artificial Sequence: Synthetic coding sequence
  source 1..741: mol_type = other DNA
tgaagcagcttcaccaacagcacctgggcccagacccagggcagcggctggctggacgacctgcagatccacggctgggacagcgacagcggcaccgccatcttcctgaagccctggagcaagggcaacttcagcgacaaggaggtggccgagctggaggagatcttcagagtgtacatcttcggcttcgccagagaggtgcaggacttcgccggcgacttccagatgaagtaccccttcgagatccagggcatcgccggctgcgagctgcacagcggcggcgccatcgtgagcttcctgagaggcgccctgggcggcctggacttcctgagcgtgaagaacgccagctgcgtgcccagccccgagggcggcagcagagcccagaagttctgcgccctgatcatccagtaccagggcatcatggagaccgtgagaatcctgctgtacgagacctgccccagatacctgctgggcgtgctgaacgccggcaaggccgacctgcagagacaggtgaagcccgaggcctggctgagcagcggccccagccccggccccggcagactgcagctggtgtgccacgtgagcggcttctaccccaagcccgtgtgggtgatgtggatgagaggcaaccccaccagcatcggcagcatcgtgctggccatcatcgtgcccagcctgctgctgctgctgtgcctggccctgtggtacatgagaagaagaagctaccagaacatcccctag

SEQ ID NO: 75866 - DNA, 1041 bp, synthetic construct
  misc_feature 1..1041: note = Description of Artificial Sequence: Synthetic coding sequence
  source 1..1041: mol_type = other DNA
atgctgttcctgcagttcctgctgctggccctgctgctgcccggcggcgacaacgccgacgccagccaggagcacgtgagcttccacgtgatccagatcttcagcttcgtgaaccagagctgggccagaggccagggcagcggctggctggacgagctgcagacccacggctgggacagcgagagcggcaccatcatcttcctgcacaactggagcaagggcaacttcagcaacgaggagctgagcgacctggagctgctgttcagattctacctgttcggcctgaccagagagatccaggaccacgccagccaggactacagcaagtaccccttcgaggtgcaggtgaaggccggctgcgagctgcacagcggcaagagccccgagggcttcttccaggtggccttcaacggcctggacctgctgagcttccagaacaccacctgggtgcccagccccggctgcggcagcctggcccagagcgtgtgccacctgctgaaccaccagtacgagggcgtgaccgagaccgtgtacaacctgatcagaagcacctgccccagattcctgctgggcctgctggacgccggcaagatgtacgtgcacagacaggtgagacccgaggcctggctgagcagcagacccagcctgggcagcggccagctgctgctggtgtgccacgccagcggcttctaccccaagcccgtgtgggtgacctggatgagaaacgagcaggagcagctgggcaccaagcacggcgacatcctgcccaacgccgacggcacctggtacctgcaggtgatcctggaggtggccagcgaggagcccgccggcctgagctgcagagtgagacacagcagcctgggcggccaggacatcatcctgtactgggcccacatcagaaccagctgcgagaccctgccccccgacagccccatcgtgctgagaacccagcagcccagaagcctggtgcagtacagcgacgccatccccagcaccctgcacctgaactgcttcagcttctgcatcatcaacatctgctag

SEQ ID NO: 75867 - DNA, 1002 bp, synthetic construct
  misc_feature 1..1002: note = Description of Artificial Sequence: Synthetic coding sequence
  source 1..1002: mol_type = other DNA
atgctgttcctgcagttcctgctgctggccctgctgctgcccggcggcgacaacgccgacgccagccaggagcacgtgagcttccacgtgatccagatcttcagcttcgtgaaccagagctgggccagaggccagggcagcggctggctggacgagctgcagacccacggctgggacagcgagagcggcaccatcatcttcctgcacaactggagcaagggcaacttcagcaacgaggagctgagcgacctggagctgctgttcagattctacctgttcggcctgaccagagagatccaggaccacgccagccaggactacagcaagtaccccttcgaggtgcaggtgaaggccggctgcgagctgcacagcggcaagagccccgagggcttcttccaggtggccttcaacggcctggacctgctgagcttccagaacaccacctgggtgcccagccccggctgcggcagcctggcccagagcgtgtgccacctgctgaaccaccagtacgagggcgtgaccgagaccgtgtacaacctgatcagaagcacctgccccagattcctgctgggcctgctggacgccggcaagatgtacgtgcacagacaggtgagacccgaggcctggctgagcagcagacccagcctgggcagcggccagctgctgctggtgtgccacgccagcggcttctaccccaagcccgtgtgggtgacctggatgagaaacgagcaggagcagctgggcaccaagcacggcgacatcctgcccaacgccgacggcacctggtacctgcaggtgatcctggaggtggccagcgaggagcccgccggcctgagctgcagagtgagacacagcagcctgggcggccaggacatcatcctgtactggggccaccacttcagcatgaactggatcgccctggtggtgatcgtgcccctggtgatcctgatcgtgctggtgctgtggttcaagaagcactgcagctaccaggacatcctgtag

SEQ ID NO: 75868 - DNA, 846 bp, synthetic construct
  misc_feature 1..846: note = Description of Artificial Sequence: Synthetic coding sequence
  source 1..846: mol_type = other DNA
tgattcctgcacaactggagcaagggcaacttcagcaacgaggagctgagcgacctggagctgctgttcagattctacctgttcggcctgaccagagagatccaggaccacgccagccaggactacagcaagtaccccttcgaggtgcaggtgaaggccggctgcgagctgcacagcggcaagagccccgagggcttcttccaggtggccttcaacggcctggacctgctgagcttccagaacaccacctgggtgcccagccccggctgcggcagcctggcccagagcgtgtgccacctgctgaaccaccagtacgagggcgtgaccgagaccgtgtacaacctgatcagaagcacctgccccagattcctgctgggcctgctggacgccggcaagatgtacgtgcacagacaggtgagacccgaggcctggctgagcagcagacccagcctgggcagcggccagctgctgctggtgtgccacgccagcggcttctaccccaagcccgtgtgggtgacctggatgagaaacgagcaggagcagctgggcaccaagcacggcgacatcctgcccaacgccgacggcacctggtacctgcaggtgatcctggaggtggccagcgaggagcccgccggcctgagctgcagagtgagacacagcagcctgggcggccaggacatcatcctgtactgggcccacatcagaaccagctgcgagaccctgccccccgacagccccatcgtgctgagaacccagcagcccagaagcctggtgcagtacagcgacgccatccccagcaccctgcacctgaactgcttcagcttctgcatcatcaacatctgctag

SEQ ID NO: 75869 - DNA, 411 bp, synthetic construct
  misc_feature 1..411: note = Description of Artificial Sequence: Synthetic coding sequence
  source 1..411: mol_type = other DNA
atgtacgtgcacagacaggtgagacccgaggcctggctgagcagcagacccagcctgggcagcggccagctgctgctggtgtgccacgccagcggcttctaccccaagcccgtgtgggtgacctggatgagaaacgagcaggagcagctgggcaccaagcacggcgacatcctgcccaacgccgacggcacctggtacctgcaggtgatcctggaggtggccagcgaggagcccgccggcctgagctgcagagtgagacacagcagcctgggcggccaggacatcatcctgtactggggccaccacttcagcatgaactggatcgccctggtggtgatcgtgcccctggtgatcctgatcgtgctggtgctgtggttcaagaagcactgcagctaccaggacatcctgtag

SEQ ID NO: 75870 - DNA, 1008 bp, synthetic construct
  misc_feature 1..1008: note = Description of Artificial Sequence: Synthetic coding sequence
  source 1..1008: mol_type = other DNA
atgggctgcctgctgttcctgctgctgtgggccctgctgcaggcctggggcagcgccgaggtgccccagagactgttccccctgagatgcctgcagatcagcagcttcgccaacagcagctggaccagaaccgacggcctggcctggctgggcgagctgcagacccacagctggagcaacgacagcgacaccgtgagaagcctgaagccctggagccagggcaccttcagcgaccagcagtgggagaccctgcagcacatcttcagagtgtacagaagcagcttcaccagagacgtgaaggagttcgccaagatgctgagactgagctaccccctggagctgcaggtgagcgccggctgcgaggtgcaccccggcaacgccagcaacaacttcttccacgtggccttccagggcaaggacatcctgagcttccagggcaccagctgggagcccacccaggaggcccccctgtgggtgaacctggccatccaggtgctgaaccaggacaagtggaccagagagaccgtgcagtggctgctgaacggcacctgcccccagttcgtgagcggcctgctggagagcggcaagagcgagctgaagaagcaggtgaagcccaaggcctggctgagcagaggccccagccccggccccggcagactgctgctggtgtgccacgtgagcggcttctaccccaagcccgtgtgggtgaagtggatgagaggcgagcaggagcagcagggcacccagcccggcgacatcctgcccaacgccgacgagacctggtacctgagagccaccctggacgtggtggccggcgaggccgccggcctgagctgcagagtgaagcacagcagcctggagggccaggacatcgtgctgtactggggcggcagctacaccagcatgggcctgatcgccctggccgtgctggcctgcctgctgttcctgctgatcgtgggcttcaccagcagattcaagagacagaccagctaccagggcgtgctgtag

SEQ ID NO: 75871 - DNA, 435 bp, synthetic construct
  misc_feature 1..435: note = Description of Artificial Sequence: Synthetic coding sequence
  source 1..435: mol_type = other DNA
atgctgctgctgttcctgctgttcgagggcctgtgctgccccggcgagaacaccgccgtgaagcccgaggcctggctgagctgcggccccagccccggccccggcagactgcagctggtgtgccacgtgagcggcttctaccccaagcccgtgtgggtgatgtggatgagaggcggctacagcatcttcctgatcctgatctgcctgaccgtgatcgtgaccctggtgatcctggtggtggtggacagcagactgaagaagcagagcagcaacaagaacatcctgagcccccacacccccagccccgtgttcctgatgggcgccaacacccaggacaccaagaacagcagacaccagttctgcctggcccaggtgagctggatcaagaacagagtgctgaagaagtggaagaccagactgaaccagctgtggtag

SEQ ID NO: 75872 - DNA, 696 bp, synthetic construct
  misc_feature 1..696: note = Description of Artificial Sequence: Synthetic coding sequence
  source 1..696: mol_type = other DNA
atgctgctgctgttcctgctgttcgagggcctgtgctgccccggcgagaacaccgccgccccccaggccctgcagagctaccacctggccgccgaggagcagctgagcttcagaatgctgcagaccagcagcttcgccaaccacagctgggcccacagcgagggcagcggctggctgggcgacctgcagacccacggctgggacaccgtgctgggcaccatcagattcctgaagccctggagccacggcaacttcagcaagcaggagctgaagaacctgcagagcctgttccagctgtacttccacagcttcatccagatcgtgcaggccagcgccggccagttccagctggagctgaagcccgaggcctggctgagctgcggccccagccccggccccggcagactgcagctggtgtgccacgtgagcggcttctaccccaagcccgtgtgggtgatgtggatgagaggcggctacagcatcttcctgatcctgatctgcctgaccgtgatcgtgaccctggtgatcctggtggtggtggacagcagactgaagaagcagagccccgtgttcctgatgggcgccaacacccaggacaccaagaacagcagacaccagttctgcctggcccaggtgagctggatcaagaacagagtgctgaagaagtggaagaccagactgaaccagctgtggtag

SEQ ID NO: 75873 - DNA, 861 bp, synthetic construct
  misc_feature 1..861: note = Description of Artificial Sequence: Synthetic coding sequence
  source 1..861: mol_type = other DNA
atgctgctgctgttcctgctgttcgagggcctgtgctgccccggcgagaacaccgccgccccccaggccctgcagagctaccacctggccgccgaggagcagctgagcttcagaatgctgcagaccagcagcttcgccaaccacagctgggcccacagcgagggcagcggctggctgggcgacctgcagacccacggctgggacaccgtgctgggcaccatcagattcctgaagccctggagccacggcaacttcagcaagcaggagctgaagaacctgcagagcctgttccagctgtacttccacagcttcatccagatcgtgcaggccagcgccggccagttccagctggagctgaagcccgaggcctggctgagctgcggccccagccccggccccggcagactgcagctggtgtgccacgtgagcggcttctaccccaagcccgtgtgggtgatgtggatgagaggcgagcaggagcagagaggcacccagagaggcgacgtgctgcccaacgccgacgagacctggtacctgagagccaccctggacgtggccgccggcgaggccgccggcctgagctgcagagtgaagcacagcagcctgggcggccacgacctgatcatccactggggcggctacagcatcttcctgatcctgatctgcctgaccgtgatcgtgaccctggtgatcctggtggtggtggacagcagactgaagaagcagagccccgtgttcctgatgggcgccaacacccaggacaccaagaacagcagacaccagttctgcctggcccaggtgagctggatcaagaacagagtgctgaagaagtggaagaccagactgaaccagctgtggtag

SEQ ID NO: 75874 - DNA, 399 bp, synthetic construct
  misc_feature 1..399: note = Description of Artificial Sequence: Synthetic coding sequence
  source 1..399: mol_type = other DNA
atgctgctgctgttcctgctgttcgagggcctgtgctgccccggcgagaacaccgccgtgaagcccgaggcctggctgagctgcggccccagccccggccccggcagactgcagctggtgtgccacgtgagcggcttctaccccaagcccgtgtgggtgatgtggatgagaggcggctacagcatcttcctgatcctgatctgcctgaccgtgatcgtgaccctggtgatcctggtggtggtggacagcagactgaagaagcagagccccgtgttcctgatgggcgccaacacccaggacaccaagaacagcagacaccagttctgcctggcccaggtgagctggatcaagaacagagtgctgaagaagtggaagaccagactgaaccagctgtggtag

SEQ ID NO: 75875 - DNA, 1131 bp, synthetic construct
  misc_feature 1..1131: note = Description of Artificial Sequence: Synthetic coding sequence
  source 1..1131: mol_type = other DNA
atgctgctgctgttcctgctgttcgagggcctgtgctgccccggcgagaacaccgccgccccccaggccctgcagagctaccacctggccgccgaggagcagctgagcttcagaatgctgcagaccagcagcttcgccaaccacagctgggcccacagcgagggcagcggctggctgggcgacctgcagacccacggctgggacaccgtgctgggcaccatcagattcctgaagccctggagccacggcaacttcagcaagcaggagctgaagaacctgcagagcctgttccagctgtacttccacagcttcatccagatcgtgcaggccagcgccggccagttccagctggagtaccccttcgagatccagatcctggccggctgcagaatgaacgccccccagatcttcctgaacatggcctaccagggcagcgacttcctgagcttccagggcatcagctgggagcccagccccggcgccggcatcagagcccagaacatctgcaaggtgctgaacagatacctggacatcaaggagatcctgcagagcctgctgggccacacctgccccagattcctggccggcctgatggaggccggcgagagcgagctgaagagaaaggtgaagcccgaggcctggctgagctgcggccccagccccggccccggcagactgcagctggtgtgccacgtgagcggcttctaccccaagcccgtgtgggtgatgtggatgagaggcgagcaggagcagagaggcacccagagaggcgacgtgctgcccaacgccgacgagacctggtacctgagagccaccctggacgtggccgccggcgaggccgccggcctgagctgcagagtgaagcacagcagcctgggcggccacgacctgatcatccactggggcggctacagcatcttcctgatcctgatctgcctgaccgtgatcgtgaccctggtgatcctggtggtggtggacagcagactgaagaagcagagccccgtgttcctgatgggcgccaacacccaggacaccaagaacagcagacaccagttctgcctggcccaggtgagctggatcaagaacagagtgctgaagaagtggaagaccagactgaaccagctgtggtag

SEQ ID NO: 75876 - DNA, 873 bp, synthetic construct
  misc_feature 1..873: note = Description of Artificial Sequence: Synthetic coding sequence
  source 1..873: mol_type = other DNA
atgctgctgctgttcctgctgttcgagggcctgtgctgccccggcgagaacaccgccgccccccaggccctgcagagctaccacctggccgccgaggagcagctgagcttcagaatgctgcagaccagcagcttcgccaaccacagctgggcccacagcgagggcagcggctggctgggcgacctgcagacccacggctgggacaccgtgctgggcaccatcagattcctgaagccctggagccacggcaacttcagcaagcaggagctgaagaacctgcagagcctgttccagctgtacttccacagcttcatccagatcgtgcaggccagcgccggccagttccagctggagtaccccttcgagatccagatcctggccggctgcagaatgaacgccccccagatcttcctgaacatggcctaccagggcagcgacttcctgagcttccagggcatcagctgggagcccagccccggcgccggcatcagagcccagaacatctgcaaggtgctgaacagatacctggacatcaaggagatcctgcagagcctgctgggccacacctgccccagattcctggccggcctgatggaggccggcgagagcgagctgaagagaaaggtgaagcccgaggcctggctgagctgcggccccagccccggccccggcagactgcagctggtgtgccacgtgagcggcttctaccccaagcccgtgtgggtgatgtggatgagaggcgagcaggagcagagaggcacccagagaggcgacgtgctgcccaacgccgacgagacctggtggatcttccacctgagccaccccgacctgttcgactgcgacagctaccccggccacatcggctgcagctag

SEQ ID NO: 75877 - DNA, 183 bp, synthetic construct
  misc_feature 1..183: note = Description of Artificial Sequence: Synthetic coding sequence
  source 1..183: mol_type = other DNA
tgagtgagcggcttctaccccaagcccgtgtgggtgatgtggatgagaggcgagcaggagcagagaggcacccagagaggcgacgtgctgcccaacgccgacgagacctggtggatcttccacctgagccaccccgacctgttcgactgcgacagctaccccggccacatcggctgcagctag

SEQ ID NO: 75878 - DNA, 966 bp, synthetic construct
  misc_feature 1..966: note = Description of Artificial Sequence: Synthetic coding sequence
  source 1..966: mol_type = other DNA
atgctgctgctgttcctgctgttcgagggcctgtgctgccccggcgagaacaccgccgccccccaggccctgcagagctaccacctggccgccgaggagcagctgagcttcagaatgctgcagaccagcagcttcgccaaccacagctgggcccacagcgagggcagcggctggctgggcgacctgcagacccacggctgggacaccgtgctgggcaccatcagattcctgaagccctggagccacggcaacttcagcaagcaggagctgaagaacctgcagagcctgttccagctgtacttccacagcttcatccagatcgtgcaggccagcgccggccagttccagctggagtaccccttcgagatccagatcctggccggctgcagaatgaacgccccccagatcttcctgaacatggcctaccagggcagcgacttcctgagcttccagggcatcagctgggagcccagccccggcgccggcatcagagcccagaacatctgcaaggtgctgaacagatacctggacatcaaggagatcctgcagagcctgctgggccacacctgccccagattcctggccggcctgatggaggccggcgagagcgagctgaagagaaaggtgaagcccgaggcctggctgagctgcggccccagccccggccccggcagactgcagctggtgtgccacgtgagcggcttctaccccaagcccgtgtgggtgatgtggatgagaggcggctacagcatcttcctgatcctgatctgcctgaccgtgatcgtgaccctggtgatcctggtggtggtggacagcagactgaagaagcagagccccgtgttcctgatgggcgccaacacccaggacaccaagaacagcagacaccagttctgcctggcccaggtgagctggatcaagaacagagtgctgaagaagtggaagaccagactgaaccagctgtggtag

SEQ ID NO: 75879 - DNA, 306 bp, synthetic construct
  misc_feature 1..306: note = Description of Artificial Sequence: Synthetic coding sequence
  source 1..306: mol_type = other DNA
atgctgctgctgttcctgctgttcgagggcctgtgctgccccggcgagaacaccgccgtgaagcccgaggcctggctgagctgcggccccagccccggccccggcagactgcagctggtgtgccacgtgagcggcttctaccccaagcccgtgtgggtgatgtggatgagaggcgagcaggagcagagaggcacccagagaggcgacgtgctgcccaacgccgacgagacctggtggatcttccacctgagccaccccgacctgttcgactgcgacagctaccccggccacatcggctgcagctag

SEQ ID NO: 75880 - DNA, 897 bp, synthetic construct
  misc_feature 1..897: note = Description of Artificial Sequence: Synthetic coding sequence
  source 1..897: mol_type = other DNA
atgctgctgctgttcctgctgttcgagggcctgtgctgccccggcgagaacaccgccgccccccaggccctgcagagctaccacctggccgccgaggagcagctgagcttcagaatgctgcagaccagcagcttcgccaaccacagctgggcccacagcgagggcagcggctggctgggcgacctgcagacccacggctgggacaccgtgctgggcaccatcagattcctgaagccctggagccacggcaacttcagcaagcaggagctgaagaacctgcagagcctgttccagctgtacttccacagcttcatccagatcgtgcaggccagcgccggccagttccagctggagctgaagcccgaggcctggctgagctgcggccccagccccggccccggcagactgcagctggtgtgccacgtgagcggcttctaccccaagcccgtgtgggtgatgtggatgagaggcgagcaggagcagagaggcacccagagaggcgacgtgctgcccaacgccgacgagacctggtacctgagagccaccctggacgtggccgccggcgaggccgccggcctgagctgcagagtgaagcacagcagcctgggcggccacgacctgatcatccactggggcggctacagcatcttcctgatcctgatctgcctgaccgtgatcgtgaccctggtgatcctggtggtggtggacagcagactgaagaagcagagcagcaacaagaacatcctgagcccccacacccccagccccgtgttcctgatgggcgccaacacccaggacaccaagaacagcagacaccagttctgcctggcccaggtgagctggatcaagaacagagtgctgaagaagtggaagaccagactgaaccagctgtggtag

SEQ ID NO: 75881 - DNA, 564 bp, synthetic construct
  misc_feature 1..564: note = Description of Artificial Sequence: Synthetic coding sequence
  source 1..564: mol_type = other DNA
atgctgctgctgttcctgctgttcgagggcctgtgctgccccggcgagaacaccgccgtgaagcccgaggcctggctgagctgcggccccagccccggccccggcagactgcagctggtgtgccacgtgagcggcttctaccccaagcccgtgtgggtgatgtggatgagaggcgagcaggagcagagaggcacccagagaggcgacgtgctgcccaacgccgacgagacctggtacctgagagccaccctggacgtggccgccggcgaggccgccggcctgagctgcagagtgaagcacagcagcctgggcggccacgacctgatcatccactggggcggctacagcatcttcctgatcctgatctgcctgaccgtgatcgtgaccctggtgatcctggtggtggtggacagcagactgaagaagcagagccccgtgttcctgatgggcgccaacacccaggacaccaagaacagcagacaccagttctgcctggcccaggtgagctggatcaagaacagagtgctgaagaagtggaagaccagactgaaccagctgtggtag

SEQ ID NO: 75882 - DNA, 1167 bp, synthetic construct
  misc_feature 1..1167: note = Description of Artificial Sequence: Synthetic coding sequence
  source 1..1167: mol_type = other DNA
atgctgctgctgttcctgctgttcgagggcctgtgctgccccggcgagaacaccgccgccccccaggccctgcagagctaccacctggccgccgaggagcagctgagcttcagaatgctgcagaccagcagcttcgccaaccacagctgggcccacagcgagggcagcggctggctgggcgacctgcagacccacggctgggacaccgtgctgggcaccatcagattcctgaagccctggagccacggcaacttcagcaagcaggagctgaagaacctgcagagcctgttccagctgtacttccacagcttcatccagatcgtgcaggccagcgccggccagttccagctggagtaccccttcgagatccagatcctggccggctgcagaatgaacgccccccagatcttcctgaacatggcctaccagggcagcgacttcctgagcttccagggcatcagctgggagcccagccccggcgccggcatcagagcccagaacatctgcaaggtgctgaacagatacctggacatcaaggagatcctgcagagcctgctgggccacacctgccccagattcctggccggcctgatggaggccggcgagagcgagctgaagagaaaggtgaagcccgaggcctggctgagctgcggccccagccccggccccggcagactgcagctggtgtgccacgtgagcggcttctaccccaagcccgtgtgggtgatgtggatgagaggcgagcaggagcagagaggcacccagagaggcgacgtgctgcccaacgccgacgagacctggtacctgagagccaccctggacgtggccgccggcgaggccgccggcctgagctgcagagtgaagcacagcagcctgggcggccacgacctgatcatccactggggcggctacagcatcttcctgatcctgatctgcctgaccgtgatcgtgaccctggtgatcctggtggtggtggacagcagactgaagaagcagagcagcaacaagaacatcctgagcccccacacccccagccccgtgttcctgatgggcgccaacacccaggacaccaagaacagcagacaccagttctgcctggcccaggtgagctggatcaagaacagagtgctgaagaagtggaagaccagactgaaccagctgtggtag

SEQ ID NO: 75883 - DNA, 1023 bp, synthetic construct
  misc_feature 1..1023: note = Description of Artificial Sequence: Synthetic coding sequence
  source 1..1023: mol_type = other DNA
atgatcaagagcagagtgaagagatacagaagaagaagaggcagccagagagccccccaggccctgcagagctaccacctggccgccgaggagcagctgagcttcagaatgctgcagaccagcagcttcgccaaccacagctgggcccacagcgagggcagcggctggctgggcgacctgcagacccacggctgggacaccgtgctgggcaccatcagattcctgaagccctggagccacggcaacttcagcaagcaggagctgaagaacctgcagagcctgttccagctgtacttccacagcttcatccagatcgtgcaggccagcgccggccagttccagctggagtaccccttcgagatccagatcctggccggctgcagaatgaacgccccccagatcttcctgaacatggcctaccagggcagcgacttcctgagcttccagggcatcagctgggagcccagccccggcgccggcatcagagcccagaacatctgcaaggtgctgaacagatacctggacatcaaggagatcctgcagagcctgctgggccacacctgccccagattcctggccggcctgatggaggccggcgagagcgagctgaagagaaaggtgaagcccgaggcctggctgagctgcggccccagccccggccccggcagactgcagctggtgtgccacgtgagcggcttctaccccaagcccgtgtgggtgatgtggatgagaggcgagcaggagcagagaggcacccagagaggcgacgtgctgcccaacgccgacgagacctggtacctgagagccaccctggacgtggccgccggcgaggccgccggcctgagctgcagagtgaagcacagcagcctgggcggccacgacctgatcatccactggggcgagaagcagctgagactgtgctgggagatcatgaagatcgccctgggcctgctgagcgtgggcctgagaaagtgggtgggcatgctgggcaccagaagagtgaagctgggccagagcaagtag

SEQ ID NO: 75884 - DNA, 870 bp, synthetic construct
  misc_feature 1..870: note = Description of Artificial Sequence: Synthetic coding sequence
  source 1..870: mol_type = other DNA
atgctgctgctgttcctgctgttcgagggcctgtgctgccccggcgagaacaccgccgaccccttcgagatccagatcctggccggctgcagaatgaacgccccccagatcttcctgaacatggcctaccagggcagcgacttcctgagcttccagggcatcagctgggagcccagccccggcgccggcatcagagcccagaacatctgcaaggtgctgaacagatacctggacatcaaggagatcctgcagagcctgctgggccacacctgccccagattcctggccggcctgatggaggccggcgagagcgagctgaagagaaaggtgaagcccgaggcctggctgagctgcggccccagccccggccccggcagactgcagctggtgtgccacgtgagcggcttctaccccaagcccgtgtgggtgatgtggatgagaggcgagcaggagcagagaggcacccagagaggcgacgtgctgcccaacgccgacgagacctggtacctgagagccaccctggacgtggccgccggcgaggccgccggcctgagctgcagagtgaagcacagcagcctgggcggccacgacctgatcatccactggggcggctacagcatcttcctgatcctgatctgcctgaccgtgatcgtgaccctggtgatcctggtggtggtggacagcagactgaagaagcagagcagcaacaagaacatcctgagcccccacacccccagccccgtgttcctgatgggcgccaacacccaggacaccaagaacagcagacaccagttctgcctggcccaggtgagctggatcaagaacagagtgctgaagaagtggaagaccagactgaaccagctgtggtag

SEQ ID NO: 75885 - DNA, 600 bp, synthetic construct
  misc_feature 1..600: note = Description of Artificial Sequence: Synthetic coding sequence
  source 1..600: mol_type = other DNA
atgctgctgctgttcctgctgttcgagggcctgtgctgccccggcgagaacaccgccgtgaagcccgaggcctggctgagctgcggccccagccccggccccggcagactgcagctggtgtgccacgtgagcggcttctaccccaagcccgtgtgggtgatgtggatgagaggcgagcaggagcagagaggcacccagagaggcgacgtgctgcccaacgccgacgagacctggtacctgagagccaccctggacgtggccgccggcgaggccgccggcctgagctgcagagtgaagcacagcagcctgggcggccacgacctgatcatccactggggcggctacagcatcttcctgatcctgatctgcctgaccgtgatcgtgaccctggtgatcctggtggtggtggacagcagactgaagaagcagagcagcaacaagaacatcctgagcccccacacccccagccccgtgttcctgatgggcgccaacacccaggacaccaagaacagcagacaccagttctgcctggcccaggtgagctggatcaagaacagagtgctgaagaagtggaagaccagactgaaccagctgtggtag

SEQ ID NO: 75886 - DNA, 1047 bp, synthetic construct
  misc_feature 1..1047: note = Description of Artificial Sequence: Synthetic coding sequence
  source 1..1047: mol_type = other DNA
atgctgtgcccctggagaaccgccaacctgggcctgctgctgatcctgaccatcttcctggtggccgaggccgagggcgccgcccagcccaacaacagcctgatgctgcagaccagcaaggagaaccacgccctggccagcagcagcctgtgcatggacgagaagcagatcacccagaactacagcaaggtgctggccgaggtgaacaccagctggcccgtgaagatggccaccaacgccgtgctgtgctgcccccccatcgccctgagaaacctgatcatcatcacctgggagatcatcctgagaggccagcccagctgcaccaaggcctacaagaaggagaccaacgagaccaaggagaccaactgcaccgacgagagaatcacctgggtgagcagacccgaccagaacagcgacctgcagatcagaaccgtggccatcacccacgacggctactacagatgcatcatggtgacccccgacggcaacttccacagaggctaccacctgcaggtgctggtgacccccgaggtgaccctgttccagaacagaaacagaaccgccgtgtgcaaggccgtggccggcaagcccgccgcccacatcagctggatccccgagggcgactgcgccaccaagcaggagtactggagcaacggcaccgtgaccgtgaagagcacctgccactgggaggtgcacaacgtgagcaccgtgacctgccacgtgagccacctgaccggcaacaagagcctgtacatcgagctgctgcccgtgcccggcgccaagaagagcgccaagctgtacatcccctacatcatcctgaccatcatcatcctgaccatcgtgggcttcatctggctgctgaaggtgaacggctgcagaaagtacaagctgaacaagaccgagagcacccccgtggtggaggaggacgagatgcagccctacgccagctacaccgagaagaacaaccccctgtacgacaccaccaacaaggtgaaggccagcgaggccctgcagagcgaggtggacaccgacctgcacaccctgtag

SEQ ID NO: 75887 - DNA, 567 bp, synthetic construct
  misc_feature 1..567: note = Description of Artificial Sequence: Synthetic coding sequence
  source 1..567: mol_type = other DNA
atgctgtgcccctggagaaccgccaacctgggcctgctgctgatcctgaccatcttcctggtggccgaggccgagggcgccgcccagcccaacaacagcctgatgctgcagaccagcaaggagaaccacgccctggccagcagcagcctgtgcatggacgagaagcagatcacccagaactacagcaaggtgctggccgaggtgaacaccagctggcccgtgaagatggccaccaacgccgtgctgtgctgcccccccatcgccctgagaaacctgatcatcatcacctgggagatcatcctgagaggccagcccagctgcaccaaggcctacaagaaggagaccaacgagaccaaggagaccaactgcaccgacgagagaatcacctgggtgagcagacccgaccagaacagcgacctgcagatcagaaccgtggccatcacccacgacggctactacagatgcatcatggtgacccccgacggcaacttccacagaggctaccacctgcaggtgctgggcaaggagcaccacatcctgagatacttcaccagccccgacctgtag

SEQ ID NO: 75888 - DNA, 978 bp, synthetic construct
  misc_feature 1..978: note = Description of Artificial Sequence: Synthetic coding sequence
  source 1..978: mol_type = other DNA
atgctgtgcccctggagaaccgccaacctgggcctgctgctgatcctgaccatcttcctggtggccgccagcagcagcctgtgcatggacgagaagcagatcacccagaactacagcaaggtgctggccgaggtgaacaccagctggcccgtgaagatggccaccaacgccgtgctgtgctgcccccccatcgccctgagaaacctgatcatcatcacctgggagatcatcctgagaggccagcccagctgcaccaaggcctacaagaaggagaccaacgagaccaaggagaccaactgcaccgacgagagaatcacctgggtgagcagacccgaccagaacagcgacctgcagatcagaaccgtggccatcacccacgacggctactacagatgcatcatggtgacccccgacggcaacttccacagaggctaccacctgcaggtgctggtgacccccgaggtgaccctgttccagaacagaaacagaaccgccgtgtgcaaggccgtggccggcaagcccgccgcccacatcagctggatccccgagggcgactgcgccaccaagcaggagtactggagcaacggcaccgtgaccgtgaagagcacctgccactgggaggtgcacaacgtgagcaccgtgacctgccacgtgagccacctgaccggcaacaagagcctgtacatcgagctgctgcccgtgcccggcgccaagaagagcgccaagctgtacatcccctacatcatcctgaccatcatcatcctgaccatcgtgggcttcatctggctgctgaaggtgaacggctgcagaaagtacaagctgaacaagaccgagagcacccccgtggtggaggaggacgagatgcagccctacgccagctacaccgagaagaacaaccccctgtacgacaccaccaacaaggtgaaggccagcgaggccctgcagagcgaggtggacaccgacctgcacaccctgtag

SEQ ID NO: 75889 - DNA, 498 bp, synthetic construct
  misc_feature 1..498: note = Description of Artificial Sequence: Synthetic coding sequence
  source 1..498: mol_type = other DNA
atgctgtgcccctggagaaccgccaacctgggcctgctgctgatcctgaccatcttcctggtggccgccagcagcagcctgtgcatggacgagaagcagatcacccagaactacagcaaggtgctggccgaggtgaacaccagctggcccgtgaagatggccaccaacgccgtgctgtgctgcccccccatcgccctgagaaacctgatcatcatcacctgggagatcatcctgagaggccagcccagctgcaccaaggcctacaagaaggagaccaacgagaccaaggagaccaactgcaccgacgagagaatcacctgggtgagcagacccgaccagaacagcgacctgcagatcagaaccgtggccatcacccacgacggctactacagatgcatcatggtgacccccgacggcaacttccacagaggctaccacctgcaggtgctgggcaaggagcaccacatcctgagatacttcaccagccccgacctgtag

SEQ ID NO: 75890 - DNA, 987 bp, synthetic construct
  misc_feature 1..987: note = Description of Artificial Sequence: Synthetic coding sequence
  source 1..987: mol_type = other DNA
atgaccgtggagaaggaggcccccgacgcccacttcaccgtggacaagcagaacatcagcctgtggcccagagagcccccccccaagagcggccccagcctggtgcccggcaagacccccaccgtgagagccgccctgatctgcctgaccctggtgctggtggccagcgtgctgctgcaggccgtgctgtaccccagattcatgggcaccatcagcgacgtgaagaccaacgtgcagctgctgaagggcagagtggacaacatcagcaccctggacagcgagatcaagaagaacagcgacggcatggaggccgccggcgtgcagatccagatggtgaacgagagcctgggctacgtgagaagccagttcctgaagctgaagaccagcgtggagaaggccaacgcccagatccagatcctgaccagaagctgggaggaggtgagcaccctgaacgcccagatccccgagctgaagagcgacctggagaaggccagcgccctgaacaccaagatcagagccctgcagggcagcctggagaacatgagcaagctgctgaagagacagaacgacatcctgcaggtggtgagccagggctggaagtacttcaagggcaacttctactacttcagcctgatccccaagacctggtacagcgccgagcagttctgcgtgagcagaaacagccacctgaccagcgtgaccagcgagagcgagcaggagttcctgtacaagaccgccggcggcctgatctactggatcggcctgaccaaggccggcatggagggcgactggagctgggtggacgacacccccttcaacaaggtgcagagcgtgagattctggatccccggcgagcccaacaacgccggcaacaacgagcactgcggcaacatcaaggcccccagcctgcaggcctggaacgacgccccctgcgacaagaccttcctgttcatctgcaagagaccctacgtgcccagcgagccctag

SEQ ID NO: 75891 - DNA, 4497 bp, synthetic construct
  misc_feature 1..4497: note = Description of Artificial Sequence: Synthetic coding sequence
  source 1..4497: mol_type = other DNA
atggacggcgccagcgccgagcaggacggcctgcaggaggacagaagccacagcggccccagcagcctgcccgaggcccccctgaagccccccggccccctggtgccccccgaccagcaggacaaggtgcagtgcgccgaggtgaacagagccagcaccgagggcgagagccccgacggccccggccagggcggcctgtgccagaacggccccaccccccccttccccgacccccccagcagcctggaccccaccaccagccccgtgggccccgacgccagccccggcgtggccggcttccacgacaacctgagaaagagccagggcaccagcgccgagggcagcgtgagaaaggaggccctgcagagcctgagactgagcctgcccatgcaggagacccagctgtgcagcaccgacagccccctgcccctggagaaggaggagcaggtgagactgcaggccagaaagtggctggaggagcagctgaagcagtacagagtgaagagacagcaggagagaagcagccagcccgccaccaagaccagactgttcagcaccctggaccccgagctgatgctgaaccccgagaacctgcccagagccagcaccctggccatgaccaaggagtacagcttcctgagaaccagcgtgcccagaggccccaaggtgggcagcctgggcctgcccgcccaccccagagagaagaagaccagcaagagcagcaagatcagaagcctggccgactacagaaccgaggacagcaacgccggcaacagcggcggcaacgtgcccgcccccgacagcaccaagggcagcctgaagcagaacagaagcagcgccgccagcgtggtgagcgagatcagcctgagccccgacaccgacgacagactggagaacaccagcctggccggcgacagcgtgagcgaggtggacggcaacgacagcgacagcagcagctacagcagcgccagcaccagaggcacctacggcatcctgagcaagaccgtgggcacccaggacaccccctacatggtgaacggccaggagatccccgccgacaccctgggccagttccccagcatcaaggacgtgctgcaggccgccgccgccgagcaccaggaccagggccaggaggtgaacggcgaggtgagaagcagaagagacagcatctgcagcagcgtgagcctggagagcagcgccgccgagacccaggaggagatgctgcaggtgctgaaggagaagatgagactggagggccagctggaggccctgagcctggaggccagccaggccctgaaggagaaggccgagctgcaggcccagctggccgccctgagcaccaagctgcaggcccaggtggagtgcagccacagcagccagcagagacaggacagcctgagcagcgaggtggacaccctgaagcagagctgctgggacctggagagagccatgaccgacctgcagaacatgctggaggccaagaacgccagcctggccagcagcaacaacgacctgcaggtggccgaggagcagtaccagagactgatggccaaggtggaggacatgcagagaagcatgctgagcaaggacaacaccgtgcacgacctgagacagcagatgaccgccctgcagagccagctgcagcaggtgcagctggagagaaccaccctgaccagcaagctgaaggccagccaggccgagatcagcagcctgcagagcgtgagacagtggtaccagcagcagctggccctggcccaggaggccagagtgagactgcagggcgagatggcccacatccaggtgggccagatgacccaggccggcctgctggagcacctgaagctggagaacgtgagcctgagccagcagctgaccgagacccagcacagaagcatgaaggagaagggcagaatcgccgcccagctgcagggcatcgaggccgacatgctggaccaggaggccgccttcatgcagatccaggaggccaagaccatggtggaggaggacctgcagagaagactggaggagttcgagggcgagagagagagactgcagagaatggccgacagcgccgccagcctggagcagcagctggagcaggtgaagctgaccctgctgcagagagaccagcagctggaggccctgcagcaggagcacctggacctgatgaagcagctgaccctgacccaggaggccctgcagagcagagagcagagcctggacgccctgcagacccactacgacgagctgcaggccagactgggcgagctgcagggcgaggccgccagcagagaggacaccatctgcctgctgcagaacgagaagatcatcctggaggccgccctgcaggccgccaagagcggcaaggaggagctggacagaggcgccagaagactggaggagggcaccgaggagaccagcgagaccctggagaagctgagagaggagctggccatcaagagcggccaggtggagcacctgcagcaggagaccgccgccctgaagaagcagatgcagaagatcaaggagcagttcctgcagcagaaggtgatggtggaggcctacagaagagacgccaccagcaaggaccagctgatcagcgagctgaaggccaccagaaagagactggacagcgagctgaaggagctgagacaggagctgatgcaggtgcacggcgagaagagaaccgccgaggccgagctgagcagactgcacagagaggtggcccaggtgagacagcacatggccgacctggagggccacctgcagagcgcccagaaggagagagacgagatggagacccacctgcagagcctgcagttcgacaaggagcagatggtggccgtgaccgaggccaacgaggccctgaagaagcagatcgaggagctgcagcaggaggccagaaaggccatcaccgagcagaagcagaagatgagaagactgggcagcgacctgaccagcgcccagaaggagatgaagaccaagcacaaggcctacgagaacgccgtgggcatcctgagcagaagactgcaggaggccctggccgccaaggaggccgccgacgccgagctgggccagctgagagcccagggcggcagcagcgacagcagcctggccctgcacgagagaatccaggccctggaggccgagctgcaggccgtgagccacagcaagaccctgctggagaaggagctgcaggaggtgatcgccctgaccagccaggagctggaggagagcagagagaaggtgctggagctggaggacgagctgcaggagagcagaggcttcagaaagaagatcaagagactggaggagagcaacaagaagctggccctggagctggagcacgagaagggcaagctgaccggcctgggccagagcaacgccgccctgagagagcacaacagcatcctggagaccgccctggccaagagagaggccgacctggtgcagctgaacctgcaggtgcaggccgtgctgcagagaaaggaggaggaggacagacagatgaagcacctggtgcaggccctgcaggccagcctggagaaggagaaggagaaggtgaacagcctgaaggagcaggtggccgccgccaaggtggaggccggccacaacagaagacacttcaaggccgccagcctggagctgagcgaggtgaagaaggagctgcaggccaaggagcacctggtgcagaagctgcaggccgaggccgacgacctgcagatcagagagggcaagcacagccaggagatcgcccagttccaggccgagctggccgaggccagagcccagctgcagctgctgcagaagcagctggacgagcagctgagcaagcagcccgtgggcaaccaggagatggagaacctgaagtgggaggtggaccagaaggagagagagatccagagcctgaagcagcagctggacctgaccgagcagcagggcagaaaggagctggagggcctgcagcagctgctgcagaacgtgaagagcgagctggagatggcccaggaggacctgagcatgacccagaaggacaagttcatgctgcaggccaaggtgagcgagctgaagaacaacatgaagaccctgctgcagcagaaccagcagctgaagctggacctgagaagaggcgccgccaagaccagaaaggagcccaagggcgaggccagcagcagcaaccccgccacccccatcaagatccccgactgccccgtgcccgccagcctgctggaggagctgctgagacccccccccgccgtgagcaaggagcccctgaagaacctgaacagctgcctgcagcagctgaagcaggagatggacagcctgcagagacagatggaggagcacgccctgaccgtgcacgagagcctgagcagctggacccccctggagcccgccaccgccagccccgtgccccccggcggccacgccggccccagaggcgacccccagagacacagccagagcagagccagcaaggagggccccggcgagtag

SEQ ID NO: 75892 - DNA, 807 bp, synthetic construct
  misc_feature 1..807: note = Description of Artificial Sequence: Synthetic coding sequence
  source 1..807: mol_type = other DNA
atgagcgacagcaaggagcccagactgcagcagctgggcctgctggtgagcaaggtgcccagcagcatcagccaggagcagagcagacaggacgccatctaccagaacctgacccagctgaaggccgccgtgggcgagctgagcgagaagagcaagctgcaggagatctaccaggagctgacccagctgaaggccgccgtgggcgagctgcccgagaagagcaagctgcaggagatctaccaggagctgaccagactgaaggccgccgtgggcgagctgcccgagaagagcaagcagcaggagatctaccaggagctgacccagctgaaggccgccgtggagagactgtgccacccctgcccctgggagtggaccttcttccagggcaactgctacttcatgagcaacagccagagaaactggcacgacagcatcaccgcctgcaaggaggtgggcgcccagctggtggtgatcaagagcgccgaggagcagaacttcctgcagctgcagagcagcagaagcaacagattcacctggatgggcctgagcgacctgaaccaggagggcacctggcagtgggtggacggcagccccctgctgcccagcttcaagcagtactggaacagaggcgagcccaacaacgtgggcgaggaggactgcgccgagttcagcggcaacggctggaacgacgacaagtgcaacctggccaagttctggatctgcaagaagagcgccgccagctgcagcagagacgaggagcagttcctgagccccgcccccgccacccccaaccccccccccgcctag

SEQ ID NO: 75893 - DNA, 1143 bp, synthetic construct
  misc_feature 1..1143: note = Description of Artificial Sequence: Synthetic coding sequence
  source 1..1143: mol_type = other DNA
atgagcgacagcaaggagcccagactgcagcagctgggcctgctggaggaggagcagctgagaggcctgggcttcagacagaccagaggctacaagagcctggccgtgagcaaggtgcccagcagcatcagccaggagcagagcagacaggacgccatctaccagaacctgacccagctgaaggccgccgtgggcgagctgagcgagaagagcaagctgcaggagatctaccaggagctgacccagctgaaggccgccgtgggcgagctgcccgagaagagcaagctgcaggagatctaccaggagctgaccagactgaaggccgccgtgggcgagctgcccgagaagagcaagctgcaggagatctaccaggagctgacctggctgaaggccgccgtgggcgagctgcccgagaagagcaagatgcaggagatctaccaggagctgaccagactgaaggccgccgtgggcgagctgcccgagaagagcaagcagcaggagatctaccaggagctgaccagactgaaggccgccgtgggcgagctgcccgagaagagcaagcagcaggagatctaccaggagctgaccagactgaaggccgccgtgggcgagctgcccgagaagagcaagcagcaggagatctaccaggagctgacccagctgaaggccgccgtggagagactgtgccacccctgcccctgggagtggaccttcttccagggcaactgctacttcatgagcaacagccagagaaactggcacgacagcatcaccgcctgcaaggaggtgggcgcccagctggtggtgatcaagagcgccgaggagcagaacttcctgcagctgcagagcagcagaagcaacagattcacctggatgggcctgagcgacctgaaccaggagggcacctggcagtgggtggacggcagccccctgctgcccagcttcaagcagtactggaacagaggcgagcccaacaacgtgggcgaggaggactgcgccgagttcagcggcaacggctggaacgacgacaagtgcaacctggccaagttctggatctgcaagaagagcgccgccagctgcagcagagacgaggagcagttcctgagccccgcccccgccacccccaaccccccccccgcctag

SEQ ID NO: 75894 - DNA, 1215 bp, synthetic construct
  misc_feature 1..1215: note = Description of Artificial Sequence: Synthetic coding sequence
  source 1..1215: mol_type = other DNA
atgagcgacagcaaggagcccagactgcagcagctgggcctgctggaggaggagcagctgagaggcctgggcttcagacagaccagaggctacaagagcctggccggctgcctgggccacggccccctggtgctgcagctgctgagcttcaccctgctggccggcctgctggtgcaggtgagcaaggtgcccagcagcatcagccaggagcagagcagacaggacgccatctaccagaacctgacccagctgaaggccgccgtgggcgagctgagcgagaagagcaagctgcaggagatctaccaggagctgacccagctgaaggccgccgtgggcgagctgcccgagaagagcaagctgcaggagatctaccaggagctgaccagactgaaggccgccgtgggcgagctgcccgagaagagcaagctgcaggagatctaccaggagctgacctggctgaaggccgccgtgggcgagctgcccgagaagagcaagatgcaggagatctaccaggagctgaccagactgaaggccgccgtgggcgagctgcccgagaagagcaagcagcaggagatctaccaggagctgaccagactgaaggccgccgtgggcgagctgcccgagaagagcaagcagcaggagatctaccaggagctgaccagactgaaggccgccgtgggcgagctgcccgagaagagcaagcagcaggagatctaccaggagctgacccagctgaaggccgccgtggagagactgtgccacccctgcccctgggagtggaccttcttccagggcaactgctacttcatgagcaacagccagagaaactggcacgacagcatcaccgcctgcaaggaggtgggcgcccagctggtggtgatcaagagcgccgaggagcagaacttcctgcagctgcagagcagcagaagcaacagattcacctggatgggcctgagcgacctgaaccaggagggcacctggcagtgggtggacggcagccccctgctgcccagcttcaagcagtactggaacagaggcgagcccaacaacgtgggcgaggaggactgcgccgagttcagcggcaacggctggaacgacgacaagtgcaacctggccaagttctggatctgcaagaagagcgccgccagctgcagcagagacgaggagcagttcctgagccccgcccccgccacccccaaccccccccccgcctag

SEQ ID NO: 75895 - DNA, 1197 bp, synthetic construct
  misc_feature 1..1197: note = Description of Artificial Sequence: Synthetic coding sequence
  source 1..1197: mol_type = other DNA
atgagcgacagcaaggagcccagactgcagcagctgggcctgctggaggaggagcagctgagaggcctgggcttcagacagaccagaggctacaagagcctggccggctgcctgggccacggccccctggtgctgcagctgctgagcttcaccctgctggccggcctgctggtgcaggtgagcaaggtgcccagcagcatcagccaggagcagagcagacaggacgccatctaccagaacctgacccagctgaaggccgccgtgggcgagctgagcgagaagagcaagctgcaggagatctaccaggagctgacccagctgaaggccgccgtgggcgagctgcccgagaagagcaagctgcaggagatctaccaggagctgaccagactgaaggccgccgtgggcgagctgcccgagaagagcaagctgcaggagatctaccaggagctgacctggctgaaggccgccgtgggcgagctgcccgagaagagcaagatgcaggagatctaccaggagctgaccagactgaaggccgccgtgggcgagctgcccgagaagagcaagcagcaggagatctaccaggagctgaccagactgaaggccgccgtgggcgagctgcccgagaagagcaagcagcaggagatctaccaggagctgaccagactgaaggccgccgtgggcgagctgcccgagaagagcaagcagcaggagatctaccaggagctgacccagctgaaggccgccgtggagagactgtgccacccctgcccctgggagtggaccttcttccagggcaactgctacttcatgagcaacagccagagaaactggcacgacagcatcaccgcctgcaaggaggtgggcgcccagctggtggtgatcaagagcgccgaggagcagagcagcagaagcaacagattcacctggatgggcctgagcgacctgaaccaggagggcacctggcagtgggtggacggcagccccctgctgcccagcttcaagcagtactggaacagaggcgagcccaacaacgtgggcgaggaggactgcgccgagttcagcggcaacggctggaacgacgacaagtgcaacctggccaagttctggatctgcaagaagagcgccgccagctgcagcagagacgaggagcagttcctgagccccgcccccgccacccccaaccccccccccgcctag

SEQ ID NO: 75896 - DNA, 507 bp, synthetic construct
  misc_feature 1..507: note = Description of Artificial Sequence: Synthetic coding sequence
  source 1..507: mol_type = other DNA
atgagcgacagcaaggagcccagactgcagcagctgggcctgctggaggaggagcagctgagaggcctgggcttcagacagaccagaggctacaagagcctggccggctgcctgggccacggccccctggtgctgcagctgctgagcttcaccctgctggccggcctgctggtgcaggtgagcaaggtgcccagcagcatcagccaggagcagagcagaagcaacagattcacctggatgggcctgagcgacctgaaccaggagggcacctggcagtgggtggacggcagccccctgctgcccagcttcaagcagtactggaacagaggcgagcccaacaacgtgggcgaggaggactgcgccgagttcagcggcaacggctggaacgacgacaagtgcaacctggccaagttctggatctgcaagaagagcgccgccagctgcagcagagacgaggagcagttcctgagccccgcccccgccacccccaaccccccccccgcctag

SEQ ID NO: 75897 - DNA, 939 bp, synthetic construct
  misc_feature 1..939: note = Description of Artificial Sequence: Synthetic coding sequence
  source 1..939: mol_type = other DNA
atgagcgacagcaaggagcccagactgcagcagctgggcctgctggaggaggagcagctgagaggcctgggcttcagacagaccagaggctacaagagcctggccggctgcctgggccacggccccctggtgctgcagctgctgagcttcaccctgctggccggcctgctggtgcaggtgagcaaggtgcccagcagcatcagccaggagcagagcagacaggacgccatctaccagaacctgacccagctgaaggccgccgtgggcgagctgagcgagaagagcaagctgcaggagatctaccaggagctgacccagctgaaggccgccgtgggcgagctgcccgagaagagcaagctgcaggagatctaccaggagctgaccagactgaaggccgccgtgggcgagctgcccgagaagagcaagctgcaggagatctaccaggagctgacctggctgaaggccgccgtggagagactgtgccacccctgcccctgggagtggaccttcttccagggcaactgctacttcatgagcaacagccagagaaactggcacgacagcatcaccgcctgcaaggaggtgggcgcccagctggtggtgatcaagagcgccgaggagcagaacttcctgcagctgcagagcagcagaagcaacagattcacctggatgggcctgagcgacctgaaccaggagggcacctggcagtgggtggacggcagccccctgctgcccagcttcaagcagtactggaacagaggcgagcccaacaacgtgggcgaggaggactgcgccgagttcagcggcaacggctggaacgacgacaagtgcaacctggccaagttctggatctgcaagaagagcgccgccagctgcagcagagacgaggagcagttcctgagccccgcccccgccacccccaaccccccccccgcctag

SEQ ID NO: 75898 - DNA, 105 bp, synthetic construct
  misc_feature 1..105: note = Description of Artificial Sequence: Synthetic coding sequence
  source 1..105: mol_type = other DNA
atgagcgacagcaaggagcccagactgcagcagctgggcctgctggaggaggagcagctgagaggcctgggcttcagacagaccagaagaaaccagaagtgctag

SEQ ID NO: 75899 - DNA, 855 bp, synthetic construct
  misc_feature 1..855: note = Description of Artificial Sequence: Synthetic coding sequence
  source 1..855: mol_type = other DNA
atgagcgacagcaaggagcccagactgcagcagctgggcctgctgggctgcctgggccacggccccctggtgctgcagctgctgagcttcaccctgctggccggcctgctggtgcaggtgctgggccccgtgagcaaggtgcccagcagcatcagccaggagcagagcagacaggacgccatctaccagaacctgacccagctgaaggccgccgtgggcgagctgagcgagaagagcaagctgcaggagatctaccaggagctgacccagctgaaggccgccgtgggcgagctgcccgagaagagcaagctgcaggagatctaccaggagctgaccagactgaaggccgccgtgggcgagctgcccgagaagagcaagctgcaggagatctaccaggagctgacctggctgaaggccgccgtgggcgagctgcccgagaagagcaagatgcaggagatctaccaggagctgaccagactgaaggccgccgtgggcgagctgcccgagaagagcaagcagcaggagatctaccaggagctgaccagactgaaggccgccgtgggcgagctgcccgagaagagcaagcagcaggagatctaccaggagctgaccagactgaaggccgccgtgggcgagctgcccgagaagagcaagcagcaggagatctaccaggagctgacccagctgaaggccgccgtggagagactgtgccacccctgcccctgggagtggaccttcttccagggcaactgctacttcatgagcaacagccagagaaactggcacgacagcatcaccgcctgcaaggaggtgggcgcccagctggtggtgatcaagagcgccgaggagcagtag

SEQ ID NO: 75900 - DNA, 939 bp, synthetic construct; identical to SEQ ID NO: 75897
  misc_feature 1..939: note = Description of Artificial Sequence: Synthetic coding sequence
  source 1..939: mol_type = other DNA

SEQ ID NO: 75901 - DNA, 1011 bp, synthetic construct
  misc_feature 1..1011: note = Description of Artificial Sequence: Synthetic coding sequence
  source 1..1011: mol_type = other DNA
atggactaccccaccctgctgctggccctgctgcacgtgtacagagccctgtgcgaggaggtgctgtggcacaccagcgtgcccttcgccgagaacatgagcctggagtgcgtgtaccccagcatgggcatcctgacccaggtggagtggttcaagatcggcacccagcaggacagcatcgccatcttcagccccacccacggcatggtgatcagaaagccctacgccgagagagtgtacttcctgaacagcaccatggccagcaacaacatgaccctgttcttcagaaacgccagcgaggacgacgtgggctactacagctgcagcctgtacacctacccccagggcacctggcagaaggtgatccaggtggtgcagagcgacagcttcgaggccgccgtgcccagcaacagccacatcgtgagcgagcccggcaagaacgtgaccctgacctgccagccccagatgacctggcccgtgcaggccgtgagatgggagaagatccagcccagacagatcgacctgctgacctactgcaacctggtgcacggcagaaacttcaccagcaagttccccagacagatcgtgagcaactgcagccacggcagatggagcgtgatcgtgatccccgacgtgaccgtgagcgacagcggcctgtacagatgctacctgcaggccagcgccggcgagaacgagaccttcgtgatgagactgaccgtggccgagggcaagaccgacaaccagtacaccctgttcgtggccggcggcaccgtgctgctgctgctgttcgtgatcagcatcaccaccatcatcgtgatcttcctgaacagaagaagaagaagagagagaagagacctgttcaccgagagctgggacacccagaaggcccccaacaactacagaagccccatcagcaccagccagcccaccaaccagagcatggacgacaccagagaggacatctacgtgaactaccccaccttcagcagaagacccaagaccagagtgtag

SEQ ID NO: 75902 - DNA, 822 bp, synthetic construct
  misc_feature 1..822: note = Description of Artificial Sequence: Synthetic coding sequence
  source 1..822: mol_type = other DNA
atgctgggccaggtggtgaccctgatcctgctgctgctgctgaaggtgtaccagggcaagggctgccagggcagcgccgaccacgtggtgagcatcagcggcgtgcccctgcagctgcagcccaacagcatccagaccaaggtggacagcatcgcctggaagaagctgctgcccagccagaacggcttccaccacatcctgaagtgggagaacggcagcctgcccagcaacaccagcaacgacagattcagcttcatcgtgaagaacctgagcctgctgatcaaggccgcccagcagcaggacagcggcctgtactgcctggaggtgaccagcatcagcggcaaggtgcagaccgccaccttccaggtgttcgtgttcgagttcagattctggcccttcctggtgatcatcgtgatcctgagcgccctgttcctgggcaccctggcctgcttctgcgtgtggagaagaaagagaaaggagaagcagagcgagaccagccccaaggagttcctgaccatctacgaggacgtgaaggacctgaagaccagaagaaaccacgagcaggagcagaccttccccggcggcggcagcaccatctacagcatgatccagagccagagcagcgcccccaccagccaggagcccgcctacaccctgtacagcctgatccagcccagcagaaagagcggcagcagaaagagaaaccacagccccagcttcaacagcaccatctacgaggtgatcggcaagagccagcccaaggcccagaaccccgccagactgagcagaaaggagctggagaacttcgacgtgtacagctag

SEQ ID NO: 75903 - DNA, 990 bp, synthetic construct
  misc_feature 1..990: note = Description of Artificial Sequence: Synthetic coding sequence
  source 1..990: mol_type = other DNA
atgctgggccaggtggtgaccctgatcctgctgctgctgctgaaggtgtaccagggcaagggctgccagggcagcgccgaccacgtggtgagcatcagcggcgtgcccctgcagctgcagcccaacagcatccagaccaaggtggacagcatcgcctggaagaagctgctgcccagccagaacggcttccaccacatcctgaagtgggagaacggcagcctgcccagcaacaccagcaacgacagattcagcttcatcgtgaagaacctgagcctgctgatcaaggccgcccagcagcaggacagcggcctgtactgcctggaggtgaccagcatcagcggcaaggtgcagaccgccaccttccaggtgttcgtgttcgacaaggtggagaagcccagactgcagggccagggcaagatcctggacagaggcagatgccaggtggccctgagctgcctggtgagcagagacggcaacgtgagctacgcctggtacagaggcagcaagctgatccagaccgccggcaacctgacctacctggacgaggaggtggacatcaacggcacccacacctacacctgcaacgtgagcaaccccgtgagctgggagagccacaccctgaacctgacccaggactgccagaacgcccaccaggagttcagattctggcccttcctggtgatcatcgtgatcctgagcgccctgttcctgggcaccctggcctgcttctgcgtgtggagaagaaagagaaaggagaagcagagcgagaccagccccaaggagttcctgaccatctacgaggacgtgaaggacctgaagaccagaagaaaccacgagcaggagcagaccttccccggcggcggcagcaccatctacagcatgatccagagccagagcagcgcccccaccagccaggagcccgcctacaccctgtacagcctgatccagcccagcagaaagggcgacagattctacagcttcagcggctag

SEQ ID NO: 75904 - DNA, 1113 bp, synthetic construct
  misc_feature 1..1113: note = Description of Artificial Sequence: Synthetic coding sequence
  source 1..1113: mol_type = other DNA
atgctgggccaggtggtgaccctgatcctgctgctgctgctgaaggtgtaccagggcaagggctgccagggcagcgccgaccacgtggtgagcatcagcggcgtgcccctgcagctgcagcccaacagcatccagaccaaggtggacagcatcgcctggaagaagctgctgcccagccagaacggcttccaccacatcctgaagtgggagaacggcagcctgcccagcaacaccagcaacgacagattcagcttcatcgtgaagaacctgagcctgctgatcaaggccgcccagcagcaggacagcggcctgtactgcctggaggtgaccagcatcagcggcaaggtgcagaccgccaccttccaggtgttcgtgttcgagagcctgctgcccgacaaggtggagaagcccagactgcagggccagggcaagatcctggacagaggcagatgccaggtggccctgagctgcctggtgagcagagacggcaacgtgagctacgcctggtacagaggcagcaagctgatccagaccgccggcaacctgacctacctggacgaggaggtggacatcaacggcacccacacctacacctgcaacgtgagcaaccccgtgagctgggagagccacaccctgaacctgacccaggactgccagaacgcccaccaggagttcagattctggcccttcctggtgatcatcgtgatcctgagcgccctgttcctgggcaccctggcctgcttctgcgtgtggagaagaaagagaaaggagaagcagagcgagaccagccccaaggagttcctgaccatctacgaggacgtgaaggacctgaagaccagaagaaaccacgagcaggagcagaccttccccggcggcggcagcaccatctacagcatgatccagagccagagcagcgcccccaccagccaggagcccgcctacaccctgtacagcctgatccagcccagcagaaagagcggcagcagaaagagaaaccacagccccagcttcaacagcaccatctacgaggtgatcggcaagagccagcccaaggcccagaaccccgccagactgagcagaaaggagctggagaacttcgacgtgtacagctag

SEQ ID NO: 75905 - DNA, 1098 bp, synthetic construct
  misc_feature 1..1098: note = Description of Artificial Sequence: Synthetic coding sequence
  source 1..1098: mol_type = other DNA
atgctgggccaggtggtgaccctgatcctgctgctgctgctgaaggtgtaccagggcaagggctgccagggcagcgccgaccacgtggtgagcatcagcggcgtgcccctgcagctgcagcccaacagcatccagaccaaggtggacagcatcgcctggaagaagctgctgcccagccagaacggcttccaccacatcctgaagtgggagaacggcagcctgcccagcaacaccagcaacgacagattcagcttcatcgtgaagaacctgagcctgctgatcaaggccgcccagcagcaggacagcggcctgtactgcctggaggtgaccagcatcagcggcaaggtgcagaccgccaccttccaggtgttcgtgttcgacaaggtggagaagcccagactgcagggccagggcaagatcctggacagaggcagatgccaggtggccctgagctgcctggtgagcagagacggcaacgtgagctacgcctggtacagaggcagcaagctgatccagaccgccggcaacctgacctacctggacgaggaggtggacatcaacggcacccacacctacacctgcaacgtgagcaaccccgtgagctgggagagccacaccctgaacctgacccaggactgccagaacgcccaccaggagttcagattctggcccttcctggtgatcatcgtgatcctgagcgccctgttcctgggcaccctggcctgcttctgcgtgtggagaagaaagagaaaggagaagcagagcgagaccagccccaaggagttcctgaccatctacgaggacgtgaaggacctgaagaccagaagaaaccacgagcaggagcagaccttccccggcggcggcagcaccatctacagcatgatccagagccagagcagcgcccccaccagccaggagcccgcctacaccctgtacagcctgatccagcccagcagaaagagcggcagcagaaagagaaaccacagccccagcttcaacagcaccatctacgaggtgatcggcaagagccagcccaaggcccagaaccccgccagactgagcagaaaggagctggagaacttcgacgtgtacagctag

SEQ ID NO: 75906 - DNA, 495 bp, synthetic construct
  misc_feature 1..495: note = Description of Artificial Sequence: Synthetic coding sequence
  source 1..495: mol_type = other DNA
atgaagtggaaggccctgttcaccgccgccatcctgcaggcccagctgcccatcaccgaggcccagagcttcggcctgctggaccccaagctgtgctacctgctggacggcatcctgttcatctacggcgtgatcctgaccgccctgttcctgagagtgaagttcagcagaagcgccgacgcccccgcctaccagcagggccagaaccagctgtacaacgagctgaacctgggcagaagagaggagtacgacgtgctggacaagagaagaggcagagaccccgagatgggcggcaagccccagagaagaaagaacccccaggagggcctgtacaacgagctgcagaaggacaagatggccgaggcctacagcgagatcggcatgaagggcgagagaagaagaggcaagggccacgacggcctgtaccagggcctgagcaccgccaccaaggacacctacgacgccctgcacatgcaggccctgccccccagatag

SEQ ID NO: 75907 - DNA, 492 bp, synthetic construct
  misc_feature 1..492: note = Description of Artificial Sequence: Synthetic coding sequence
  source 1..492: mol_type = other DNA
atgaagtggaaggccctgttcaccgccgccatcctgcaggcccagctgcccatcaccgaggcccagagcttcggcctgctggaccccaagctgtgctacctgctggacggcatcctgttcatctacggcgtgatcctgaccgccctgttcctgagagtgaagttcagcagaagcgccgacgcccccgcctaccagcagggccagaaccagctgtacaacgagctgaacctgggcagaagagaggagtacgacgtgctggacaagagaagaggcagagaccccgagatgggcggcaagcccagaagaaagaacccccaggagggcctgtacaacgagctgcagaaggacaagatggccgaggcctacagcgagatcggcatgaagggcgagagaagaagaggcaagggccacgacggcctgtaccagggcctgagcaccgccaccaaggacacctacgacgccctgcacatgcaggccctgccccccagatag

SEQ ID NO: 75908 - DNA, 2274 bp, synthetic construct
  misc_feature 1..2274: note = Description of Artificial Sequence: Synthetic coding sequence
  source 1..2274: mol_type = other DNA
atgctgctgagactgctgctggcctgggccgccgccggccccaccctgggccaggacccctgggccgccgagcccagagccgcctgcggccccagcagctgctacgccctgttccccagaagaagaaccttcctggaggcctggagagcctgcagagagctgggcggcgacctggccacccccagaacccccgaggaggcccagagagtggacagcctggtgggcgccggccccgccagcagactgctgtggatcggcctgcagagacaggccagacagtgccagctgcagagacccctgagaggcttcacctggaccaccggcgaccaggacaccgccttcaccaactgggcccagcccgccagcggcggcccctgccccgcccagagatgcgtggccctggaggccagcggcgagcacagatggctggagggcagctgcaccctggccgtggacggctacctgtgccagttcggcttcgagggcgcctgccccgccctgcaggacgaggccggccaggccggccccgccgtgtacaccacccccttccacctggtgagcaccgagttcgagtggctgcccttcggcagcgtggccgccgtgcagtgccaggccggcagaggcgccagcctgctgtgcgtgaagcagcccgagggcggcgtgggctggagcagagccggccccctgtgcctgggcaccggctgcagccccgacaacggcggctgcgagcacgagtgcgtggaggaggtggacggccacgtgagctgcagatgcaccgagggcttcagactggccgccgacggcagaagctgcgaggacccctgcgcccaggccccctgcgagcagcagtgcgagcccggcggcccccagggctacagctgccactgcagactgggcttcagacccgccgaggacgacccccacagatgcgtggacaccgacgagtgccagatcgccggcgtgtgccagcagatgtgcgtgaactacgtgggcggcttcgagtgctactgcagcgagggccacgagctggaggccgacggcatcagctgcagccccgccggcgccatgggcgcccaggccagccaggacctgggcgacgagctgctggacgacggcgaggacgaggaggacgaggacgaggcctggaaggccttcaacggcggctggaccgagatgcccggcatcctgtggatggagcccacccagccccccgacttcgccctggcctacagacccagcttccccgaggacagagagccccagatcccctaccccgagcccacctggcccccccccctgagcgcccccagagtgccctaccacagcagcgtgctgagcgtgaccagacccgtggtggtgagcgccacccaccccaccctgcccagcgcccaccagccccccgtgatccccgccacccaccccgccctgagcagagaccaccagatccccgtgatcgccgccaactaccccgacctgcccagcgcctaccagcccggcatcctgagcgtgagccacagcgcccagccccccgcccaccagccccccatgatcagcaccaagtaccccgagctgttccccgcccaccagagccccatgttccccgacaccagagtggccggcacccagaccaccacccacctgcccggcatcccccccaaccacgcccccctggtgaccaccctgggcgcccagctgcccccccaggcccccgacgccctggtgctgagaacccaggccacccagctgcccatcatccccaccgcccagcccagcctgaccaccaccagcagaagccccgtgagccccgcccaccagatcagcgtgcccgccgccacccagcccgccgccctgcccaccctgctgcccagccagagccccaccaaccagaccagccccatcagccccacccacccccacagcaaggccccccagatccccagagaggacggccccagccccaagctggccctgtggctgcccagccccgcccccaccgccgcccccaccgccctgggcgaggccggcctggccgagcacagccagagagacgacagatggctgctggtggccctgctggtgcccacctgcgtgttcctggtggtgctgctggccctgggcatcgtgtactgcaccagatgcggcccccacgcccccaacaagagaatcaccgactgctacagatgggtgatccacgccggcagcaagagccccaccgagcccatgccccccagaggcagcctgaccggcgtgcagacctgcagaaccagcgtgtag

SEQ ID NO: 75909 - DNA, 951 bp, synthetic construct
  misc_feature 1..951: note = Description of Artificial Sequence: Synthetic coding sequence
  source 1..951: mol_type = other DNA
atgctgagaagaagaggcagccccggcatgggcgtgcacgtgggcgccgccctgggcgccctgtggttctgcctgaccggcgccctggaggtgcaggtgcccgaggaccccgtggtggccctggtgggcaccgacgccaccctgtgctgcagcttcagccccgagcccggcttcagcctggcccagctgaacctgatctggcagctgaccgacaccaagcagctggtgcacagcttcgccgagggccaggaccagggcagcgcctacgccaacagaaccgccctgttccccgacctgctggcccagggcaacgccagcctgagactgcagagagtgagagtggccgacgagggcagcttcacctgcttcgtgagcatcagagacttcggcagcgccgccgtgagcctgcaggtggccgccccctacagcaagcccagcatgaccctggagcccaacaaggacctgagacccggcgacaccgtgaccatcacctgcagcagctacagaggctaccccgaggccgaggtgttctggcaggacggccagggcgtgcccctgaccggcaacgtgaccaccagccagatggccaacgagcagggcctgttcgacgtgcacagcgtgctgagagtggtgctgggcgccaacggcacctacagctgcctggtgagaaaccccgtgctgcagcaggacgcccacggcagcgtgaccatcaccggccagcccatgaccttcccccccgaggccctgtgggtgaccgtgggcctgagcgtgtgcctgatcgccctgctggtggccctggccttcgtgtgctggagaaagatcaagcagagctgcgaggaggagaacgccggcgccgaggaccaggacggcgagggcgagggcagcaagaccgccctgcagcccctgaagcacagcgacagcaaggaggacgacggccaggagatcgcctag

SEQ ID NO: 75910 - DNA, 1605 bp, synthetic construct
  misc_feature 1..1605: note = Description of Artificial Sequence: Synthetic coding sequence
  source 1..1605: mol_type = other DNA
atgctgagaagaagaggcagccccggcatgggcgtgcacgtgggcgccgccctgggcgccctgtggttctgcctgaccggcgccctggaggtgcaggtgcccgaggaccccgtggtggccctggtgggcaccgacgccaccctgtgctgcagcttcagccccgagcccggcttcagcctggcccagctgaacctgatctggcagctgaccgacaccaagcagctggtgcacagcttcgccgagggccaggaccagggcagcgcctacgccaacagaaccgccctgttccccgacctgctggcccagggcaacgccagcctgagactgcagagagtgagagtggccgacgagggcagcttcacctgcttcgtgagcatcagagacttcggcagcgccgccgtgagcctgcaggtggccgccccctacagcaagcccagcatgaccctggagcccaacaaggacctgagacccggcgacaccgtgaccatcacctgcagcagctaccagggctaccccgaggccgaggtgttctggcaggacggccagggcgtgcccctgaccggcaacgtgaccaccagccagatggccaacgagcagggcctgttcgacgtgcacagcatcctgagagtggtgctgggcgccaacggcacctacagctgcctggtgagaaaccccgtgctgcagcaggacgcccacagcagcgtgaccatcaccccccagagaagccccaccggcgccgtggaggtgcaggtgcccgaggaccccgtggtggccctggtgggcaccgacgccaccctgagatgcagcttcagccccgagcccggcttcagcctggcccagctgaacctgatctggcagctgaccgacaccaagcagctggtgcacagcttcaccgagggcagagaccagggcagcgcctacgccaacagaaccgccctgttccccgacctgctggcccagggcaacgccagcctgagactgcagagagtgagagtggccgacgagggcagcttcacctgcttcgtgagcatcagagacttcggcagcgccgccgtgagcctgcaggtggccgccccctacagcaagcccagcatgaccctggagcccaacaaggacctgagacccggcgacaccgtgaccatcacctgcagcagctacagaggctaccccgaggccgaggtgttctggcaggacggccagggcgtgcccctgaccggcaacgtgaccaccagccagatggccaacgagcagggcctgttcgacgtgcacagcgtgctgagagtggtgctgggcgccaacggcacctacagctgcctggtgagaaaccccgtgctgcagcaggacgcccacggcagcgtgaccatcaccggccagcccatgaccttcccccccgaggccctgtgggtgaccgtgggcctgagcgtgtgcctgatcgccctgctggtggccctggccttcgtgtgctggagaaagatcaagcagagctgcgaggaggagaacgccggcgccgaggaccaggacggcgagggcgagggcagcaagaccgccctgcagcccctgaagcacagcgacagcaaggaggacgacggccaggagatcgcctag

SEQ ID NO: 75911 - DNA, 1482 bp, synthetic construct
  misc_feature 1..1482: note = Description of Artificial Sequence: Synthetic coding sequence
  source 1..1482: mol_type = other DNA
atgctgagaagaagaggcagccccggcatgggcgtgcacgtgggcgccgccctgggcgccctgtggttctgcctgaccggcgccctggaggtgcaggtgcccgaggaccccgtggtggccctggtgggcaccgacgccaccctgtgctgcagcttcagccccgagcccggcttcagcctggcccagctgaacctgatctggcagctgaccgacaccaagcagctggtgcacagcttcgccgagggccaggaccagggcagcgcctacgccaacagaaccgccctgttccccgacctgctggcccagggcaacgccagcctgagactgcagagagtgagagtggccgacgagggcagcttcacctgcttcgtgagcatcagagacttcggcagcgccgccgtgagcctgcaggtggccgccccctacagcaagcccagcatgaccctggagcccaacaaggacctgagacccggcgacaccgtgaccatcacctgcagcagctaccagggctaccccgaggccgaggtgttctggcaggacggccagggcgtgcccctgaccggcaacgtgaccaccagccagatggccaacgagcagggcctgttcgacgtgcacagcatcctgagagtggtgctgggcgccaacggcacctacagctgcctggtgagaaaccccgtgctgcagcaggacgcccacagcagcgtgaccatcaccccccagagaagccccaccggcgccgtggaggtgcaggtgcccgaggaccccgtggtggccctggtgggcaccgacgccaccctgagatgcagcttcagccccgagcccggcttcagcctggcccagctgaacctgatctggcagctgaccgacaccaagcagctggtgcacagcttcaccgagggcagagaccagggcagcgcctacgccaacagaaccgccctgttccccgacctgctggcccagggcaacgccagcctgagactgcagagagtgagagtggccgacgagggcagcttcacctgcttcgtgagcatcagagacttcggcagcgccgccgtgagcctgcaggtggccgccccctacagcaagcccagcatgaccctggagcccaacaaggacctgagacccggcgacaccgtgaccatcacctgcagcagctacagaggctaccccgaggccgaggtgttctggcaggacggccagggcgtgcccctgaccggcaacgtgaccaccagccagatggccaacgagcagggcctgttcgacgtgcacagcgtgctgagagtggtgctgggcgccaacggcacctacagctgcctggtgagaaaccccgtgctgcagcaggacgcccacggcagcgtgaccatcaccggccagcccatgaccttcccccccggccccgccagcagcgccgtgcccctgagccccgcccaccccccccacggcagcatgtgctggagccactggttcagcagaggcctgtag

SEQ ID NO: 75912 - DNA, 423 bp, synthetic construct
  misc_feature 1..423: note = Description of Artificial Sequence: Synthetic coding sequence
  source 1..423: mol_type = other DNA
atgctgagaagaagaggcagccccggcatgggcgtgcacgtgggcgccgccctgggcgccctgtggttctgcctgaccggcgccctggaggtgcaggtgcccgaggaccccgtggtggccctggtgggcaccgacgccaccctgtgctgcagcttcagccccgagcccggcttcagcctggcccagctgaacctgatctggcagctgaccgacaccaagcagctggtgcacagcttcgccgagggccaggaccagggcagcgcctacgccaacagaaccgccctgttccccgacctgcacagagccgcctacgacatcccccccagaggccccgtgggcgacagaggcgccgtgtgcctgagccactgcaccgccggcggccccggcttcagagtgctggagaaggaccagaccgagctgtag

SEQ ID NO: 75913 - DNA, 411 bp, synthetic construct
  misc_feature 1..411: note = Description of Artificial Sequence: Synthetic coding sequence
  source 1..411: mol_type = other DNA
atgctgagaagaagaggcagccccggcatgggcgtgcacgtgggcgccgccctgggcgccctgtggttctgcctgaccggcgccctggaggtgcaggtgcccgaggaccccgtggtggccctggtgggcaccgacgccaccctgtgctgcagcttcagccccgagcccggcttcagcctggcccagctgaacctgatctggcagctgaccgacaccaagcagctggtgcacagcttcgccgagggccaggaccagggcagcgcctacgccaacagaaccgccctgttccccgacctgctggcccagggcaacgccagcctgagactgcagagagtgagagtggccgacgagggcagcttcacctgcttcgtgagcatcagagacttcggcagcgccgccgtgagcctgtag

SEQ ID NO: 75914 - DNA, 402 bp, synthetic construct
  misc_feature 1..402: note = Description of Artificial Sequence: Synthetic coding sequence
  source 1..402: mol_type = other DNA
atgctgagaagaagaggcagccccggcatgggcgtgcacgtgggcgccgccctgggcgccctgtggttctgcctgaccggcgccctggaggtgcaggtgcccgaggaccccgtggtggccctggtgggcaccgacgccaccctgtgctgcagcttcagccccgagcccggcttcagcctggcccagctgaacctgatctggcagctgaccgacaccaagcagctggtgcacagcttcgccgagggccaggaccagggcagcgcctacgccaacagaaccgccctgttccccgacctgctggcccagggcaacgccagcctgagactgcagagagtgagagtggccgacgagggcagcttcacctgcttcgtgagcatcagagacttcggcagcgccgcctag

SEQ ID NO: 75915 - DNA, 1602 bp, synthetic construct
  misc_feature 1..1602: note = Description of Artificial Sequence: Synthetic coding sequence
  source 1..1602: mol_type = other DNA
atgctgagaagaagaggcagccccggcatgggcgtgcacgtgggcgccgccctgggcgccctgtggttctgcctgaccggcgccctggaggtgcaggtgcccgaggaccccgtggtggccctggtgggcaccgacgccaccctgtgctgcagcttcagccccgagcccggcttcagcctggcccagctgaacctgatctggcagctgaccgacaccaagcagctggtgcacagcttcgccgagggccaggaccagggcagcgcctacgccaacagaaccgccctgttccccgacctgctggcccagggcaacgccagcctgagactgcagagagtgagagtggccgacgagggcagcttcacctgcttcgtgagcatcagagacttcggcagcgccgccgtgagcctgcaggtggccgccccctacagcaagcccagcatgaccctggagcccaacaaggacctgagacccggcgacaccgtgaccatcacctgcagcagctaccagggctaccccgaggccgaggtgttctggcaggacggccagggcgtgcccctgaccggcaacgtgaccaccagccagatggccaacgagcagggcctgttcgacgtgcacagcatcctgagagtggtgctgggcgccaacggcacctacagctgcctggtgagaaaccccgtgctgcagcaggacgcccacagcagcgtgaccatcaccccccagagaagccccaccggcgccgtggaggtgcaggtgcccgaggaccccgtggtggccctggtgggcaccgacgccaccctgagatgcagcttcagccccgagcccggcttcagcctggcccagctgaacctgatctggcagctgaccgacaccaagcagctggtgcacagcttcaccgagggcagagaccagggcagcgcctacgccaacagaaccgccctgttccccgacctgctggcccagggcaacgccagcctgagactgcagagagtgagagtggccgacgagggcagcttcacctgcttcgtgagcatcagagacttcggcagcgccgccgtgagcctgcaggtggccgccccctacagcaagcccagcatgaccctggagcccaacaaggacctgagacccggcgacaccgtgaccatcacctgcagcagctacagaggctaccccgaggccgaggtgttctggcaggacggccagggcgtgcccctgaccggcaacgtgaccaccagccagatggccaacgagcagggcctgttcgacgtgcacagcgtgctgagagtggtgctgggcgccaacggcacctacagctgcctggtgagaaaccccgtgctgcagcaggacgcccacggcagcgtgaccatcaccggccagcccatgaccttcccccccgaggccctgtgggtgaccgtgggcctgagcgtgtgcctgatcgccctgctggtggccctggccttcgtgtgctggagaaagatcaagcagagctgcgaggaggagaacgccggcgccgaggaccaggacggcgagggcgagggcagcaagaccgccctgcagcccctgaagcacagcgacagcaaggagggcaaggacacctgggcctag

SEQ ID NO: 75916 - DNA, 498 bp, synthetic construct
  misc_feature 1..498: note = Description of Artificial Sequence: Synthetic coding sequence
  source 1..498: mol_type = other DNA
atgctgagaagaagaggcagccccggcatgggcgtgcacgtgggcgccgccctgggcgccctgtggttctgcctgaccggcgccctggaggtgcaggtgcccgaggaccccgtggtggccctggtgggcaccgacgccaccctgtgctgcagcttcagccccgagcccggcttcagcctggcccagctgaacctgatctggcagctgaccgacaccaagcagctggtgcacagcttcgccgagggccaggaccagggcagcgcctacgccaacagaaccgccctgttccccgacctgctggcccagggcaacgccagcctgagactgcagagagtgagagtggccgacgagggcagcttcacctgcttcgtgagcatcagagacttcggcagcgccgccgtgagcctgcaggtggccgccccctacagcaagcccagcatgaccctggagcccaacaaggacctgagacccggcgacaccgtgaccatcacctgctag

SEQ ID NO: 75917 - DNA, 156 bp, synthetic construct
  misc_feature 1..156: note = Description of Artificial Sequence: Synthetic coding sequence
  source 1..156: mol_type = other DNA
atgctgagaagaagaggcagccccggcatgggcgtgcacgtgggcgccgccctgggcgccctgtggttctgcctgaccggcgccctggaggtgcaggtgcccgaggaccccgtggtggccctggtgggcaccgacgccaccctgtgctgcagctag

SEQ ID NO: 75918 - DNA, 663 bp, synthetic construct
  misc_feature 1..663: note = Description of Artificial Sequence: Synthetic coding sequence
  source 1..663: mol_type = other DNA
atgctgagactgctgctggccctgaacctgttccccagcatccaggtgaccggcaacaagatcctggtgaagcagagccccatgctggtggcctacgacaacgccgtgaacctgagctgcaagtacagctacaacctgttcagcagagagttcagagccagcctgcacaagggcctggacagcgccgtggaggtgtgcgtggtgtacggcaactacagccagcagctgcaggtgtacagcaagaccggcttcaactgcgacggcaagctgggcaacgagagcgtgaccttctacctgcagaacctgtacgtgaaccagaccgacatctacttctgcaagatcgaggtgatgtacccccccccctacctggacaacgagaagagcaacggcaccatcatccacgtgaagggcaagcacctgtgccccagccccctgttccccggccccagcaagcccttctgggtgctggtggtggtgggcggcgtgctggcctgctacagcctgctggtgaccgtggccttcatcatcttctgggtgagaagcaagagaagcagactgctgcacagcgactacatgaacatgacccccagaagacccggccccaccagaaagcactaccagccctacgccccccccagagacttcgccgcctacagaagctag

SEQ ID NO: 75919 - DNA, 306 bp, synthetic construct
  misc_feature 1..306: note = Description of Artificial Sequence: Synthetic coding sequence
  source 1..306: mol_type = other DNA
atgctgagactgctgctggccctgaacctgttccccagcatccaggtgaccggcaagcacctgtgccccagccccctgttccccggccccagcaagcccttctgggtgctggtggtggtgggcggcgtgctggcctgctacagcctgctggtgaccgtggccttcatcatcttctgggtgagaagcaagagaagcagactgctgcacagcgactacatgaacatgacccccagaagacccggccccaccagaaagcactaccagccctacgccccccccagagacttcgccgcctacagaagctag

SEQ ID NO: 75920 - DNA, 411 bp, synthetic construct
  misc_feature 1..411: note = Description of Artificial Sequence: Synthetic coding sequence
  source 1..411: mol_type = other DNA
atgctgagactgctgctggccctgaacctgttccccagcatccaggtgaccggcaacaagatcctggtgaagcagagccccatgctggtggcctacgacaacgccgtgaacctgagctacaacgagaagagcaacggcaccatcatccacgtgaagggcaagcacctgtgccccagccccctgttccccggccccagcaagcccttctgggtgctggtggtggtgggcggcgtgctggcctgctacagcctgctggtgaccgtggccttcatcatcttctgggtgagaagcaagagaagcagactgctgcacagcgactacatgaacatgacccccagaagacccggccccaccagaaagcactaccagccctacgccccccccagagacttcgccgcctacagaagctag

SEQ ID NO: 75921 - DNA, 705 bp, synthetic construct
  misc_feature 1..705: note = Description of Artificial Sequence: Synthetic coding sequence
  source 1..705: mol_type = other DNA
atgccctgcggcctgagcgccctgatcatgtgccccaagggcatggtggccgtggtggtggccgtggacgacggcgacagccaggccctggccggcaacaagatcctggtgaagcagagccccatgctggtggcctacgacaacgccgtgaacctgagctgcaagtacagctacaacctgttcagcagagagttcagagccagcctgcacaagggcctggacagcgccgtggaggtgtgcgtggtgtacggcaactacagccagcagctgcaggtgtacagcaagaccggcttcaactgcgacggcaagctgggcaacgagagcgtgaccttctacctgcagaacctgtacgtgaaccagaccgacatctacttctgcaagatcgaggtgatgtacccccccccctacctggacaacgagaagagcaacggcaccatcatccacgtgaagggcaagcacctgtgccccagccccctgttccccggccccagcaagcccttctgggtgctggtggtggtgggcggcgtgctggcctgctacagcctgctggtgaccgtggccttcatcatcttctgggtgagaagcaagagaagcagactgctgcacagcgactacatgaacatgacccccagaagacccggccccaccagaaagcactaccagccctacgccccccccagagacttcgccgcctacagaagctag

SEQ ID NO: 75922 - DNA, 1920 bp, synthetic construct
  misc_feature 1..1920: note = Description of Artificial Sequence: Synthetic coding sequence
  source 1..1920: mol_type = other DNA
atggtggactacatcgtggagtacgactacgacgccgtgcacgacgacgagctgaccatcagagtgggcgagatcatcagaaacgtgaagaagctgcaggaggagggctggctggagggcgagctgaacggcagaagaggcatgttccccgacaacttcgtgaaggagatcaagagagagaccgagttcaaggacgacagcctgcccatcaagagagagagacacggcaacgtggccagcctggtgcagagaatcagcacctacggcctgcccgccggcggcatccagccccacccccagaccaagaacatcaagaagaagaccaagaagagacagtgcaaggtgctgttcgagtacatcccccagaacgaggacgagctggagctgaaggtgggcgacatcatcgacatcaacgaggaggtggaggagggctggtggagcggcaccctgaacaacaagctgggcctgttccccagcaacttcgtgaaggagctggaggtgaccgacgacggcgagacccacgaggcccaggacgacagcgagaccgtgctggccggccccaccagccccatccccagcctgggcaacgtgagcgagaccgccagcggcagcgtgacccagcccaagaagatcagaggcatcggcttcggcgacatcttcaaggagggcagcgtgaagctgagaaccagaaccagcagcagcgagaccgaggagaagaagcccgagaagcccctgatcctgcagagcctgggccccaagacccagagcgtggagatcaccaagaccgacaccgagggcaagatcaaggccaaggagtactgcagaaccctgttcgcctacgagggcaccaacgaggacgagctgaccttcaaggagggcgagatcatccacctgatcagcaaggagaccggcgaggccggctggtggagaggcgagctgaacggcaaggagggcgtgttccccgacaacttcgccgtgcagatcaacgagctggacaaggacttccccaagcccaagaagccccccccccccgccaaggcccccgcccccaagcccgagctgatcgccgccgagaagaagtacttcagcctgaagcccgaggagaaggacgagaagagcaccctggagcagaagcccagcaagcccgccgccccccaggtgccccccaagaagcccaccccccccaccaaggccagcaacctgctgagaagcagcggcaccgtgtaccccaagagacccgagaagcccgtgcccccccccccccccatcgccaagatcaacggcgaggtgagcagcatcagcagcaagttcgagaccgagcccgtgagcaagctgaagctggacagcgagcagctgcccctgagacccaagagcgtggacttcgacagcctgaccgtgagaaccagcaaggagaccgacgtggtgaacttcgacgacatcgccagcagcgagaacctgctgcacctgaccgccaacagacccaagatgcccggcagaagactgcccggcagattcaacggcggccacagccccacccacagccccgagaagatcctgaagctgcccaaggaggaggacagcgccaacctgaagcccagcgagctgaagaaggacacctgctacagccccaagcccagcgtgtacctgagcacccccagcagcgccagcaaggccaacaccaccgccttcctgacccccctggagatcaaggccaaggtggagaccgacgacgtgaagaagaacagcctggacgagctgagagcccagatcatcgagctgctgtgcatcgtggaggccctgaagaaggaccacggcaaggagctggagaagctgagaaaggacctggaggaggagaagaccatgagaagcaacctggagatggagatcgagaagctgaagaaggccgtgctgagcagctag

SEQ ID NO: 75923 - DNA, 717 bp, synthetic construct
  misc_feature 1..717: note = Description of Artificial Sequence: Synthetic coding sequence
  source 1..717: mol_type = other DNA
atgtgcagaagatgcaagcccgagctgagacagaacttccagagcgccagcggcatctgcatctgccactggctgcagatcagaagaaccagaagcagagagggcagagccatgtggctgccccccgccctgctgctgctgagcctgagcggctgcttcagcatccagggccccgagagcgtgagagcccccgagcagggcagcctgaccgtgcagtgccactacaagcagggctgggagacctacatcaagtggtggtgcagaggcgtgagatgggacacctgcaagatcctgatcgagaccagaggcagcgagcagggcgagaagagcgacagagtgagcatcaaggacaaccagaaggacagaaccttcaccgtgaccatggagggcctgagaagagacgacgccgacgtgtactggtgcggcatcgagagaagaggccccgacctgggcacccaggtgaaggtgatcgtggaccccgagggcgccgccagcaccaccgccagcagccccaccaacagcaacatggccgtgttcatcggcagccacaagagaaaccactacatgctgctggtgttcgtgaaggtgcccatcctgctgatcctggtgaccgccatcctgtggctgaagggcagccagagagtgcccgaggagcccggcgagcagcccatctacatgaacttcagcgagcccctgaccaaggacatggccacctag

SEQ ID NO: 75924 - DNA, 606 bp, synthetic construct
  misc_feature 1..606: note = Description of Artificial Sequence: Synthetic coding sequence
  source 1..606: mol_type = other DNA
atgtggctgccccccgccctgctgctgctgagcctgagcggctgcttcagcatccagggccccgagagcgtgagagcccccgagcagggcagcctgaccgtgcagtgccactacaagcagggctgggagacctacatcaagtggtggtgcagaggcgtgagatgggacacctgcaagatcctgatcgagaccagaggcagcgagcagggcgagaagagcgacagagtgagcatcaaggacaaccagaaggacagaaccttcaccgtgaccatggagggcctgagaagagacgacgccgacgtgtactggtgcggcatcgagagaagaggccccgacctgggcacccaggtgaaggtgatcgtggaccccgagggcgccgccagcaccaccgccagcagccccaccaacagcaacatggccgtgttcatcggcagccacaagagaaaccactacatgctgctggtgttcgtgaaggtgcccatcctgctgatcctggtgaccgccatcctgtggctgaagggcagccagagagtgcccgaggagcccggcgagcagcccatctacatgaacttcagcgagcccctgaccaaggacatggccacctag

SEQ ID NO: 75925 - DNA, 735 bp, synthetic construct
  misc_feature 1..735: note = Description of Artificial Sequence: Synthetic coding sequence
  source 1..735: mol_type = other DNA
atgcccctgctgaccctgtacctgctgctgttctggctgagcggctacagcatcgtgacccagatcaccggccccaccaccgtgaacggcctggagagaggcagcctgaccgtgcagtgcgtgtacagaagcggctgggagacctacctgaagtggtggtgcagaggcgccatctggagagactgcaagatcctggtgaagaccagcggcagcgagcaggaggtgaagagagacagagtgagcatcaaggacaaccagaagaacagaaccttcaccgtgaccatggaggacctgatgaagaccgacgccgacacctactggtgcggcatcgagaagaccggcaacgacctgggcgtgaccgtgcaggtgaccatcgaccccgcccccgtgacccaggaggagaccagcagcagccccaccctgaccggccaccacctggacaacagaagcgagggcagccaggccgccaactacagacccgccgcccaccaggcccaggcccccgaggcccagtgcccccccgccccccacctgcaccacatcgccgccgccttcggcggcagactgaccctgggcctggaggacgacgaggtgcccgccgagagcagcagagacgtgcccagagccggcaccgccgcccccggcggcagacccctgctgtgcagacccgaccccgccgccggcagaaacctgcccgccaagggctaccacgaggccttcctgtgccccggctag

SEQ ID NO: 75926 - DNA, 873 bp, synthetic construct
  misc_feature 1..873: note = Description of Artificial Sequence: Synthetic coding sequence
  source 1..873: mol_type = other DNA
atgcccctgctgaccctgtacctgctgctgttctggctgagcggctacagcatcgtgacccagatcaccggccccaccaccgtgaacggcctggagagaggcagcctgaccgtgcagtgcgtgtacagaagcggctgggagacctacctgaagtggtggtgcagaggcgccatctggagagactgcaagatcctggtgaagaccagcggcagcgagcaggaggtgaagagagacagagtgagcatcaaggacaaccagaagaacagaaccttcaccgtgaccatggaggacctgatgaagaccgacgccgacacctactggtgcggcatcgagaagaccggcaacgacctgggcgtgaccgtgcaggtgaccatcgaccccgcccccgtgacccaggaggagaccagcagcagccccaccctgaccggccaccacctggacaacagacacaagctgctgaagctgagcgtgctgctgcccctgatcttcaccatcctgctgctgctgctggtggccgccagcctgctggcctggagaatgatgaagtaccagcagaaggccgccggcatgagccccgagcaggtgctgcagcccctggagggcgacctgtgctacgccgacctgaccctgcagctggccggcaccagcccccagaaggccaccaccaagctgagcagcgcccaggtggaccaggtggaggtggagtacgtgaccatggccagcctgcccaaggaggacatcagctacgccagcctgaccctgggcgccgaggaccaggagcccacctactgcaacatgggccacctgagcagccacctgcccggcagaggccccgaggagcccaccgagtacagcaccatcagcagaccctag

SEQ ID NO: 75927 - DNA, 585 bp, synthetic construct
  misc_feature 1..585: note = Description of Artificial Sequence: Synthetic coding sequence
  source 1..585: mol_type = other DNA
atgtggctgccccagctggacctgatgagagtgatcagcgccaagagccagggctacagcatcgtgacccagatcaccggccccaccaccgtgaacggcctggagagaggcagcctgaccgtgcagtgcgtgtacagaagcggctgggagacctacctgaagtggtggtgcagaggcgccatctggagagactgcaagatcctggtgaagaccagcggcagcgagcaggaggtgaagagagacagagtgagcatcaaggacaaccagaagaacagaaccttcaccgtgaccatggaggacctgatgaagaccgacgccgacacctactggtgcggcatcgagaagaccggcaacgacctgggcgtgaccgtgcaggtgaccatcgaccccgcccccgtgacccaggaggagaccagcagcagccccaccctgaccggccaccacctggacaacagcagcagagacgtgcccagagccggcaccgccgcccccggcggcagacccctgctgtgcagacccgaccccgccgccggcagaaacctgcccgccaagggctaccacgaggccttcctgtgccccggctag

SEQ ID NO: 75928 - DNA, 720 bp, synthetic construct
  misc_feature 1..720: note = Description of Artificial Sequence: Synthetic coding sequence
  source 1..720: mol_type = other DNA
atgtggctgccccagctggacctgatgagagtgatcagcgccaagagccagggctacagcatcgtgacccagatcaccggccccaccaccgtgaacggcctggagagaggcagcctgaccgtgcagtgcgtgtacagaagcggctgggagacctacctgaagtggtggtgcagaggcgccatctggagagactgcaagatcctggtgaagaccagcggcagcgagcaggaggtgaagagagacagagtgagcatcaaggacaaccagaagaacagaaccttcaccgtgaccatggaggacctgatgaagaccgacgccgacacctactggtgcggcatcgagaagaccggcaacgacctgggcgtgaccgtgcaggtgaccatcgaccccgccagcacccccgcccccaccacccccaccagcaccaccttcaccgcccccgtgacccaggaggagaccagcagcagccccaccctgaccggccaccacctggacaacagacacaagctgctgaagctgagcgtgctgctgcccctgatcttcaccatcctgctgctgctgctggtggccgccagcctgctggcctggagaatgatgaagtaccagcagaagggcaccgccgcccccggcggcagacccctgctgtgcagacccgaccccgccgccggcagaaacctgcccgccaagggctaccacgaggccttcctgtgccccggctag

SEQ ID NO: 75929 - DNA, 699 bp, synthetic construct
  misc_feature 1..699: note = Description of Artificial Sequence: Synthetic coding sequence
  source 1..699: mol_type = other DNA
atgctgagagccgccctgcccgccctgctgctgcccctgctgggcctggccgccgccgccgtggccgactgccccagcagcacctggatccagttccaggacagctgctacatcttcctgcaggaggccatcaaggtggagagcatcgaggacgtgagaaaccagtgcaccgaccacggcgccgacatgatcagcatccacaacgaggaggagaacgccttcatcctggacaccctgaagaagcagtggaagggccccgacgacatcctgctgggcatgttctacgacaccgacgacgccagcttcaagtggttcgacaacagcaacatgaccttcgacaagtggaccgaccaggacgacgacgaggacctggtggacacctgcgccttcctgcacatcaagaccggcgagtggaagaagggcaactgcgaggtgagcagcgtggagggcaccctgtgcaagaccgccatcccctacaagagaaagtacctgagcgacaaccacatcctgatcagcgccctggtgatcgccagcaccgtgatcctgaccgtgctgggcgccatcatctggttcctgtacaagaagcacagcgacagcagattcaccaccgtgttcagcaccgccccccagagcccctacaacgaggactgcgtgctggtggtgggcgaggagaacgagtaccccgtgcagttcgactag

SEQ ID NO: 75930 - DNA, 525 bp, synthetic construct
  misc_feature 1..525: note = Description of Artificial Sequence: Synthetic coding sequence
  source 1..525: mol_type = other DNA
atgctgagagccgccctgcccgccctgctgctgcccctgctgggcctggccgccgccgccgtggccgactgccccagcagcacctggatccagttccaggacagctgctacatcttcctgcaggaggccatcaaggtggagagcatcgaggacgtgagaaaccagtgcaccgaccacggcgccgacatgatcagcatccacaacgaggaggagaacgccttcatcctggacaccctgaagaagcagtggaagggccccgacgacatcctgctgggcatgttctacgacaccgacgtgccctacaagagaaagtacctgagcgacaaccacatcctgatcagcgccctggtgatcgccagcaccgtgatcctgaccgtgctgggcgccatcatctggttcctgtacaagaagcacagcgacagcagattcaccaccgtgttcagcaccgccccccagagcccctacaacgaggactgcgtgctggtggtgggcgaggagaacgagtaccccgtgcagttcgactag

SEQ ID NO: 75931 - DNA, 849 bp, synthetic construct
  misc_feature 1..849: note = Description of Artificial Sequence: Synthetic coding sequence
  source 1..849: mol_type = other DNA
atgagcggcggctggatggcccaggtgggcgcctggagaaccggcgccctgggcctggccctgctgctgctgctgggcctgggcctgggcctggaggccgccgccagccccctgagcacccccaccagcgcccaggccgccggccccagcagcggcagctgcccccccaccaagttccagtgcagaaccagcggcctgtgcgtgcccctgacctggagatgcgacagagacctggactgcagcgacggcagcgacgaggaggagtgcagaatcgagccctgcacccagaagggccagtgcccccccccccccggcctgccctgcccctgcaccggcgtgagcgactgcagcggcggcaccgacaagaagctgagaaactgcagcagactggcctgcctggccggcgagctgagatgcaccctgagcgacgactgcatccccctgacctggagatgcgacggccaccccgactgccccgacagcagcgacgagctgggctgcggcaccaacgagatcctgcccgagggcgacgccaccaccatgggcccccccgtgaccctggagagcgtgaccagcctgagaaacgccaccaccatgggcccccccgtgaccctggagagcgtgcccagcgtgggcaacgccaccagcagcagcgccggcgaccagagcggcagccccaccgcctacggcgtgatcgccgccgccgccgtgctgagcgccagcctggtgaccgccaccctgctgctgctgagctggctgagagcccaggagagactgagacccctgggcctgctggtggccatgaaggagagcctgctgctgagcgagcagaagaccagcctgccctag

SEQ ID NO: 75932 - DNA, 606 bp, synthetic construct
  misc_feature 1..606: note = Description of Artificial Sequence: Synthetic coding sequence
  source 1..606: mol_type = other DNA
aacgagatcctgcccgagggcgacgccaccaccatgggcccccccgtgaccctggagagcgtgaccagcctgagaaacgccaccaccatgggcccccccgtgaccctggagagcgtgcccagcgtgggcaacgccatcctgctgtgcagaagacccgtgtggaagcccaactgcctgtggggctactgcagctgctgcggcgcccagtgcaagcccggccacagacaccccccccccttcgtgctggcccccagccccggcgcccccccccccaccggcgtgaccggcggccacgagggcgtgcccgccgccgtgagaaccgaggacctggccgccctgagaaccagcacctgccaccacagacacagcgccctgggcgtggccggccaggaggagagcagcgacgccgacggctaccccggcacccccgccctgagagacctgagcagcagcggccacgtggagcccagaaccagagcccccgccgaggtggccctggagatcgagggcccctggaccctgcccatggagatcagaggcgccagaatgggcaacctgccccagcccgagctgagaggctggccccaggccgcccccagaggctag

SEQ ID NO: 75933 - DNA, 723 bp, synthetic construct
  misc_feature 1..723: note = Description of Artificial Sequence: Synthetic coding sequence
  source 1..723: mol_type = other DNA
atgagcggcggctggatggcccaggtgggcgcctggagaaccggcgccctgggcctggccctgctgctgctgctgggcctgggcctgggcctggaggccgccgccagccccctgagcacccccaccagcgcccaggccgccggcatcgagccctgcacccagaagggccagtgcccccccccccccggcctgccctgcccctgcaccggcgtgagcgactgcagcggcggcaccgacaagaagctgagaaactgcagcagactggcctgcctggccggcgagctgagatgcaccctgagcgacgactgcatccccctgacctggagatgcgacggccaccccgactgccccgacagcagcgacgagctgggctgcggcaccaacgagatcctgcccgagggcgacgccaccaccatgggcccccccgtgaccctggagagcgtgaccagcctgagaaacgccaccaccatgggcccccccgtgaccctggagagcgtgcccagcgtgggcaacgccaccagcagcagcgccggcgaccagagcggcagccccaccgcctacggcgtgatcgccgccgccgccgtgctgagcgccagcctggtgaccgccaccctgctgctgctgagctggctgagagcccaggagagactgagacccctgggcctgctggtggccatgaaggagagcctgctgctgagcgagcagaagaccagcctgccctag

SEQ ID NO: 75934 - DNA, 1095 bp, synthetic construct
  misc_feature 1..1095: note = Description of Artificial Sequence: Synthetic coding sequence
  source 1..1095: mol_type = other DNA
atgcccctgctgctgctgctgcccctgctgtgggccggcgccctggccatggaccccaacttctggctgcaggtgcaggagagcgtgaccgtgcaggagggcctgtgcgtgctggtgccctgcaccttcttccaccccatcccctactacgacaagaacagccccgtgcacggctactggttcagagagggcgccatcatcagcagagacagccccgtggccaccaacaagctggaccaggaggtgcaggaggagacccagggcagattcagactgctgggcgaccccagcagaaacaactgcagcctgagcatcgtggacgccagaagaagagacaacggcagctacttcttcagaatggagagaggcagcaccaagtacagctacaagagcccccagctgagcgtgcacgtgaccgacctgacccacagacccaagatcctgatccccggcaccctggagcccggccacagcaagaacctgacctgcagcgtgagctgggcctgcgagcagggcaccccccccatcttcagctggctgagcgccgcccccaccagcctgggccccagaaccacccacagcagcgtgctgatcatcacccccagaccccaggaccacggcaccaacctgacctgccaggtgaagttcgccggcgccggcgtgaccaccgagagaaccatccagctgaacgtgacctacgtgccccagaaccccaccaccggcatcttccccggcgacggcagcggcaagcaggagaccagagccggcgtggtgcacggcgccatcggcggcgccggcgtgaccgccctgctggccctgtgcctgtgcctgatcttcttcatcgtgaagacccacagaagaaaggccgccagaaccgccgtgggcagaaacgacacccaccccaccaccggcagcgccagccccaagcaccagaagaagagcaagctgcacggccccaccgagaccagcagctgcagcggcgccgcccccaccgtggagatggacgaggagctgcactacgccagcctgaacttccacggcatgaaccccagcaaggacaccagcaccgagtacagcgaggtgagaacccagtag

SEQ ID NO: 75935 - DNA, 933 bp, synthetic construct
  misc_feature 1..933: note = Description of Artificial Sequence: Synthetic coding sequence
  source 1..933: mol_type = other DNA
atgcccctgctgctgctgctgcccctgctgtgggccggcgccctggccatggaccccaacttctggctgcaggtgcaggagagcgtgaccgtgcaggagggcctgtgcgtgctggtgccctgcaccttcttccaccccatcccctactacgacaagaacagccccgtgcacggctactggttcagagagggcgccatcatcagcagagacagccccgtggccaccaacaagctggaccaggaggtgcaggaggagacccagggcagattcagactgctgggcgaccccagcagaaacaactgcagcctgagcatcgtggacgccagaagaagagacaacggcagctacttcttcagaatggagagaggcagcaccaagtacagctacaagagcccccagctgagcgtgcacgtgaccgacctgacccacagacccaagatcctgatccccggcaccctggagcccggccacagcaagaacctgacctgcagcgtgagctgggcctgcgagcagggcaccccccccatcttcagctggctgagcgccgcccccaccagcctgggccccagaaccacccacagcagcgtgctgatcatcacccccagaccccaggaccacggcaccaacctgacctgccaggtgaagttcgccggcgccggcgtgaccaccgagagaaccatccagctgaacgtgacctacgtgccccagaaccccaccaccggcatcttccccggcgacggcagcggcaagcaggagaccagagccggcgtggtgcacggcgccatcggcggcgccggcgtgaccgccctgctggccctgtgcctgtgcctgatcttcttcatcgtgaagacccacagaagaaaggccgccagaaccgccgtgggcagaaacgacacccaccccaccaccggcagcgccagccccgtgagatag

SEQ ID NO: 75936 - DNA, 714 bp, synthetic construct
  misc_feature 1..714: note = Description of Artificial Sequence: Synthetic coding sequence
  source 1..714: mol_type = other DNA
atgcccctgctgctgctgctgcccctgctgtgggccgacctgacccacagacccaagatcctgatccccggcaccctggagcccggccacagcaagaacctgacctgcagcgtgagctgggcctgcgagcagggcaccccccccatcttcagctggctgagcgccgcccccaccagcctgggccccagaaccacccacagcagcgtgctgatcatcacccccagaccccaggaccacggcaccaacctgacctgccaggtgaagttcgccggcgccggcgtgaccaccgagagaaccatccagctgaacgtgacctacgtgccccagaaccccaccaccggcatcttccccggcgacggcagcggcaagcaggagaccagagccggcgtggtgcacggcgccatcggcggcgccggcgtgaccgccctgctggccctgtgcctgtgcctgatcttcttcatcgtgaagacccacagaagaaaggccgccagaaccgccgtgggcagaaacgacacccaccccaccaccggcagcgccagccccaagcaccagaagaagagcaagctgcacggccccaccgagaccagcagctgcagcggcgccgcccccaccgtggagatggacgaggagctgcactacgccagcctgaacttccacggcatgaaccccagcaaggacaccagcaccgagtacagcgaggtgagaacccagtag

SEQ ID NO: 75937 - DNA, 639 bp, synthetic construct
  misc_feature 1..639: note = Description of Artificial Sequence: Synthetic coding sequence
  source 1..639: mol_type = other DNA
atgcccctgctgctgctgctgcccctgctgtgggccgacctgacccacagacccaagatcctgatccccggcaccctggagcccggccacagcaagaacctgacctgcagcgtgagctgggcctgcgagcagggcaccccccccatcttcagctggctgagcgccgcccccaccagcctgggccccagaaccacccacagcagcgtgctgatcatcacccccagaccccaggaccacggcaccaacctgacctgccaggtgaagttcgccggcgccggcgtgaccaccgagagaaccatccagctgaacgtgacctacgtgccccagaaccccaccaccggcatcttccccggcgacggcagcggcaagcaggagaccagagccggcgtggtgcacggcgccatcggcggcgccggcgtgaccgccctgctggccctgtgcctgtgcctgatcttcttcatcgtgaagacccacagaagaaaggccgccagaaccgccgtgggcagaaacgacacccaccccaccaccggcagcgccagccccgtgagcgacggcgccagctggcaccccgtgtgccccgccgacaccagcagccagtgcggcccccccagctgccccatccagcacttccagaactag

SEQ ID NO: 75938 - DNA, 1419 bp, synthetic construct
  misc_feature 1..1419: note = Description of Artificial Sequence: Synthetic coding sequence
  source 1..1419: mol_type = other DNA
atgggctgcgacagaaactgcggcctgatcgccggcgccgtgatcggcgccgtgctggccgtgttcggcggcatcctgatgcccgtgggcgacctgctgatccagaagaccatcaagaagcaggtggtgctggaggagggcaccatcgccttcaagaactgggtgaagaccggcaccgaggtgtacagacagttctggatcttcgacgtgcagaacccccaggaggtgatgatgaacagcagcaacatccaggtgaagcagagaggcccctacacctacagagtgagattcctggccaaggagaacgtgacccaggacgccgaggacaacaccgtgagcttcctgcagcccaacggcgccatcttcgagcccagcctgagcgtgggcaccgaggccgacaacttcaccgtgctgaacctggccgtggccgccgccagccacatctaccagaaccagttcgtgcagatgatcctgaacagcctgatcaacaagagcaagagcagcatgttccaggtgagaaccctgagagagctgctgtggggctacagagaccccttcctgagcctggtgccctaccccgtgaccaccaccgtgggcctgttctacccctacaacaacaccgccgacggcgtgtacaaggtgttcaacggcaaggacaacatcagcaaggtggccatcatcgacacctacaagggcaagagaaacctgagctactgggagagccactgcgacatgatcaacggcaccgacgccgccagcttcccccccttcgtggagaagagccaggtgctgcagttcttcagcagcgacatctgcagaagcatctacgccgtgttcgagagcgacgtgaacctgaagggcatccccgtgtacagattcgtgctgcccagcaaggccttcgccagccccgtggagaaccccgacaactactgcttctgcaccgagaagatcatcagcaagaactgcaccagctacggcgtgctggacatcagcaagtgcaaggagggcagacccgtgtacatcagcctgccccacttcctgtacgccagccccgacgtgagcgagcccatcgacggcctgaaccccaacgaggaggagcacagaacctacctggacatcgagcccatcaccggcttcaccctgcagttcgccaagagactgcaggtgaacctgctggtgaagcccagcgagaagatccaggtgctgaagaacctgaagagaaactacatcgtgcccatcctgtggctgaacgagaccggcaccatcggcgacgagaaggccaacatgttcagaagccaggtgaccggcaagatcaacctgctgggcctgatcgagatgatcctgctgagcgtgggcgtggtgatgttcgtggccttcatgatcagctactgcgcctgcagaagcaagaccatcaagtag

SEQ ID NO: 75939 - DNA, 1419 bp, synthetic construct; identical to SEQ ID NO: 75938
  misc_feature 1..1419: note = Description of Artificial Sequence: Synthetic coding sequence
  source 1..1419: mol_type = other DNA

SEQ ID NO: 75940 - DNA, 612 bp, synthetic construct
  misc_feature 1..612: note = Description of Artificial Sequence: Synthetic coding sequence
  source 1..612: mol_type = other DNA
atgggctgcgacagaaactgcggcctgatcgccggcgccgtgatcggcgccgtgctggccgtgttcggcggcatcctgatgcccgtgggcgacctgctgatccagaagaccatcaagaagcaggtggtgctggaggagggcaccatcgccttcaagaactgggtgaagaccggcaccgaggtgtacagacagttctggatcttcgacgtgcagaacccccaggaggtgatgatgaacagcagcaacatccaggtgaagcagagaggcccctacacctacagagtgagattcctggccaaggagaacgtgacccaggacgccgaggacaacaccgtgagcttcctgcagcccaacggcgccatcttcgagcccagcctgagcgtgggcaccgaggccgacaacttcaccgtgctgaacctggccgtggccgccgccagccacatctaccagaaccagttcgtgcagatgatcctgaacagcctgatcaacaagagcaagagcagcatgttccaggtgagaaccctgagagagctgctgtggggctacagagaccccttcctgagcctggtgccctaccccgtgaccaccaccgtgggcctgttctacccctag

SEQ ID NO: 75941 - DNA, 1392 bp, synthetic construct
  misc_feature 1..1392: note = Description of Artificial Sequence: Synthetic coding sequence
  source 1..1392: mol_type = other DNA
atgggctgcgacagaaactgcggcctgatcgccggcgccgtgatcggcgccgtgctggccgtgttcggcggcatcctgatgcccgtgggcgacctgctgatccagaagaccatcaagaagcaggtggtgctggaggagggcaccatcgccttcaagaactgggtgaagaccggcaccgaggtgtacagacagttctggatcttcgacgtgcagaacccccaggaggtgatgatgaacagcagcaacatccaggtgaagcagagaggcccctacacctacagagtgagattcctggccaaggagaacgtgacccaggacgccgaggacaacaccgtgagcttcctgcagcccaacggcgccatcttcgagcccagcctgagcgtgggcaccgaggccgacaacttcaccgtgctgaacctggccgtggccgccgccagccacatctaccagaaccagttcgtgcagatgatcctgaacagcctgatcaacaagagcaagagcagcatgttccaggtgagaaccctgagagagctgctgtggggctacagagaccccttcctgagcctggtgccctaccccgtgaccaccaccgtgggcctgttctacccctacaacaacaccgccgacggcgtgtacaaggtgttcaacggcaaggacaacatcagcaaggtggccatcatcgacacctacaagggcaagagaaacctgagctactgggagagccactgcgacatgatcaacggcaccgacgccgccagcttcccccccttcgtggagaagagccaggtgctgcagttcttcagcagcgacatctgcagaagcatctacgccgtgttcgagagcgacgtgaacctgaagggcatccccgtgtacagattcgtgctgcccagcaaggccttcgccagccccgtggagaaccccgacaactactgcttctgcaccgagaagatcatcagcaagaactgcaccagctacggcgtgctggacatcagcaagtgcaaggagggcagacccgtgtacatcagcctgccccacttcctgtacgccagccccgacgtgagcgagcccatcgacggcctgaaccccaacgaggaggagcacagaacctacctggacatcgagcccatcaccggcttcaccctgcagttcgccaagagactgcaggtgaacctgctggtgaagcccagcgagaagatccaggtgctgaagaacctgaagagaaactacatcgtgcccatcctgtggctgaacgagaccggcaccatcggcgacgagaaggccaacatgttcagaagccaggtgaccggcaagatcaacctgctgggcctgatcgagatgatcctgctgagcgtgggcgtggtgatgttcgtggccttcatgatcagctactag

SEQ ID NO: 75942 - DNA, 447 bp, synthetic construct
  misc_feature 1..447: note = Description of Artificial Sequence: Synthetic coding sequence
  source 1..447: mol_type = other DNA
atgggctgcgacagaaactgcggcctgatcgccggcgccgtgatcggcgccgtgctggccgtgttcggcggcatcctgatgcccgtgggcgacctgctgatccagaagaccatcaagaagcaggtggtgctggaggagggcaccatcgccttcaagaactgggtgaagaccggcaccgaggtgtacagacagttctggatcttcgacgtgcagaacccccaggaggtgatgatgaacagcagcaacatccaggtgaagcagagaggcccctacacctacagagtgagattcctggccaaggagaacgtgacccaggacgccgaggacaacaccgtgagcttcctgcagcccaacggcgccatcttcgagcccagcctgagcgtgggcaccgaggccgacaacttcaccgtgctgaacctggccgtggccgccgccagccacatctag

SEQ ID NO: 75943 - DNA, 282 bp, synthetic construct
  misc_feature 1..282: note = Description of Artificial Sequence: Synthetic coding sequence
  source 1..282: mol_type = other DNA
atgggctgcgacagaaactgcggcctgatcgccggcgccgtgatcggcgccgtgctggccgtgttcggcggcatcctgatgcccgtgggcgacctgctgatccagaagaccatcaagaagcaggtggtgctggaggagggcaccatcgccttcaagaactgggtgaagaccggcaccgaggtgtacagacagttctggatcttcgacgtgcagaacccccaggaggtgatgatgaacagcagcaacatccaggtgaagcagagaggcccctacacctactag

SEQ ID NO: 75944 - DNA, 1419 bp, synthetic construct; identical to SEQ ID NO: 75938
  misc_feature 1..1419: note = Description of Artificial Sequence: Synthetic coding sequence
  source 1..1419: mol_type = other DNA

SEQ ID NO: 75945 - DNA, 1302 bp, synthetic construct
  misc_feature 1..1302: note = Description of Artificial Sequence: Synthetic coding sequence
  source 1..1302: mol_type = other DNA
atgggctgcgacagaaactgcggcctgatcgccggcgccgtgatcggcgccgtgctggccgtgttcggcggcatcctgatgcccgtgggcgacctgctgatccagaagaccatcaagaagcaggtggtgctggaggagggcaccatcgccttcaagaactgggtgaagaccggcaccgaggtgtacagacagttctggatcttcgacgtgcagaacccccaggaggtgatgatgaacagcagcaacatccaggtgaagcagagaggcccctacacctacagagtgagattcctggccaaggagaacgtgacccaggacgccgaggacaacaccgtgagcttcctgcagcccaacggcgccatcttcgagcccagcctgagcgtgggcaccgaggccgacaacttcaccgtgctgaacctggccgtggccgccgccagccacatctaccagaaccagttcgtgcagatgatcctgaacagcctgatcaacaagagcaagagcagcatgttccaggtgagaaccctgagagagctgctgtggggctacagagaccccttcctgagcctggtgccctaccccgtgaccaccaccgtgggcctgttctacccctacaacaacaccgccgacggcgtgtacaaggtgttcaacggcaaggacaacatcagcaaggtggccatcatcgacacctacaagggcaagagaagcatctacgccgtgttcgagagcgacgtgaacctgaagggcatccccgtgtacagattcgtgctgcccagcaaggccttcgccagccccgtggagaaccccgacaactactgcttctgcaccgagaagatcatcagcaagaactgcaccagctacggcgtgctggacatcagcaagtgcaaggagggcagacccgtgtacatcagcctgccccacttcctgtacgccagccccgacgtgagcgagcccatcgacggcctgaaccccaacgaggaggagcacagaacctacctggacatcgagcccatcaccggcttcaccctgcagttcgccaagagactgcaggtgaacctgctggtgaagcccagcgagaagatccaggtgctgaagaacctgaagagaaactacatcgtgcccatcctgtggctgaacgagaccggcaccatcggcgacgagaaggccaacatgttcagaagccaggtgaccggcaagatcaacctgctgggcctgatcgagatgatcctgctgagcgtgggcgtggtgatgttcgtggccttcatgatcagctactgcgcctgcagaagcaagaccatcaagtag

SEQ ID NO: 75946 - DNA, 1419 bp, synthetic construct; identical to SEQ ID NO: 75938
  misc_feature 1..1419: note = Description of Artificial Sequence: Synthetic coding sequence
  source 1..1419: mol_type = other DNA

SEQ ID NO: 75947 - DNA, 282 bp, synthetic construct; identical to SEQ ID NO: 75943
  misc_feature 1..282: note = Description of Artificial Sequence: Synthetic coding sequence
  source 1..282: mol_type = other DNA

SEQ ID NO: 75948 - DNA, 432 bp, synthetic construct
  misc_feature 1..432: note = Description of Artificial Sequence: Synthetic coding sequence
  source 1..432: mol_type = other DNA
atgggctgcgacagaaactgcggcctgatcgccggcgccgtgatcggcgccgtgctggccgtgttcggcggcatcctgatgcccgtgggcgacctgctgatccagaagaccatcaagaagcaggtggtgctggaggagggcaccatcgccttcaagaactgggtgaagaccggcaccgaggtgtacagacagttctggatcttcgacgtgcagaacccccaggaggtgatgatgaacagcagcaacatccaggtgaagcagagaggcccctacacctacagagtgagattcctggccaaggagaacgtgacccaggacgccgaggacaacaccgtgagcttcctgcagcccaacggcgccatcttcgagcccagcctgagcgtgggcaccgaggccgacaacttcaccgtgctgaacctggccgtggcctag

SEQ ID NO: 75949 - DNA, 1419 bp, synthetic construct; identical to SEQ ID NO: 75938
  misc_feature 1..1419: note = Description of Artificial Sequence: Synthetic coding sequence
  source 1..1419: mol_type = other DNA

SEQ ID NO: 75950 - DNA, 198 bp, synthetic construct
  misc_feature 1..198: note = Description of Artificial Sequence: Synthetic coding sequence
  source 1..198: mol_type = other DNA
atgggctgcgacagaaactgcggcctgatcgccggcgccgtgatcggcgccgtgctggccgtgttcggcggcatcctgatgcccgtgggcgacctgctgatccagaagaccatcaagaagcaggtggtgctggaggagggcaccatcgccttcaagaactgggtgaagaccggcaccgaggtgtacagacagttctag

SEQ ID NO: 75951 - DNA, 1191 bp, synthetic construct
  misc_feature 1..1191: note = Description of Artificial Sequence: Synthetic coding sequence
  source 1..1191: mol_type = other DNA
atgatgaacagcagcaacatccaggtgaagcagagaggcccctacacctacagagtgagattcctggccaaggagaacgtgacccaggacgccgaggacaacaccgtgagcttcctgcagcccaacggcgccatcttcgagcccagcctgagcgtgggcaccgaggccgacaacttcaccgtgctgaacctggccgtggccgccgccagccacatctaccagaaccagttcgtgcagatgatcctgaacagcctgatcaacaagagcaagagcagcatgttccaggtgagaaccctgagagagctgctgtggggctacagagaccccttcctgagcctggtgccctaccccgtgaccaccaccgtgggcctgttctacccctacaacaacaccgccgacggcgtgtacaaggtgttcaacggcaaggacaacatcagcaaggtggccatcatcgacacctacaagggcaagagaaacctgagctactgggagagccactgcgacatgatcaacggcaccgacgccgccagcttcccccccttcgtggagaagagccaggtgctgcagttcttcagcagcgacatctgcagaagcatctacgccgtgttcgagagcgacgtgaacctgaagggcatccccgtgtacagattcgtgctgcccagcaaggccttcgccagccccgtggagaaccccgacaactactgcttctgcaccgagaagatcatcagcaagaactgcaccagctacggcgtgctggacatcagcaagtgcaaggagggcagacccgtgtacatcagcctgccccacttcctgtacgccagccccgacgtgagcgagcccatcgacggcctgaaccccaacgaggaggagcacagaacctacctggacatcgagcccatcaccggcttcaccctgcagttcgccaagagactgcaggtgaacctgctggtgaagcccagcgagaagatccaggtgctgaagaacctgaagagaaactacatcgtgcccatcctgtggctgaacgagaccggcaccatcggcgacgagaaggccaacatgttcagaagccaggtgaccggcaagatcaacctgctgggcctgatcgagatgatcctgctgagcgtgggcgtggtgatgttcgtggccttcatgatcagctactgcgcctgcagaagcaagaccatcaagtag

SEQ ID NO: 75952 - DNA, 1239 bp, synthetic construct
  misc_feature 1..1239: note = Description of Artificial Sequence: Synthetic coding sequence
  source 1..1239: mol_type = other DNA
atgggctgcgacagaaactgcggcctgatcgccggcgccgtgatcggcgccgtgctggccgtgttcggcggcatcctgatgcccgtgggcgacctgctgatccagaagaccatcaagaagcaggtggtgctggaggagggcaccatcgccttcaagaactgggtgaagaccggcaccgaggtgtacagacagttctggatcttcgacgtgcagaacccccaggaggtgatgatgaacagcagcaacatccaggtgaagcagagaggcccctacacctacagagtgagattcctggccaaggagaacgtgacccaggacgccgaggacaacaccgtgagcttcctgcagcccaacggcgccatcttcgagcccagcctgagcgtgggcaccgaggccgacaacttcaccgtgctgaacctggccgtggcctacaacaacaccgccgacggcgtgtacaaggtgttcaacggcaaggacaacatcagcaaggtggccatcatcgacacctacaagggcaagagaaacctgagctactgggagagccactgcgacatgatcaacggcaccgacgccgccagcttcccccccttcgtggagaagagccaggtgctgcagttcttcagcagcgacatctgcagaagcatctacgccgtgttcgagagcgacgtgaacctgaagggcatccccgtgtacagattcgtgctgcccagcaaggccttcgccagccccgtggagaaccccgacaactactgcttctgcaccgagaagatcatcagcaagaactgcaccagctacggcgtgctggacatcagcaagtgcaaggagggcagacccgtgtacatcagcctgccccacttcctgtacgccagccccgacgtgagcgagcccatcgacggcctgaaccccaacgaggaggagcacagaacctacctggacatcgagcccatcaccggcttcaccctgcagttcgccaagagactgcaggtgaacctgctggtgaagcccagcgagaagatccaggtgctgaagaacctgaagagaaactacatcgtgcccatcctgtggctgaacgagaccggcaccatcggcgacgagaaggccaacatgttcagaagccaggtgaccggcaagatcaacctgctgggcctgatcgagatgatcctgctgagcgtgggcgtggtgatgttcgtggccttcatgatcagctactgcgcctgcagaagcaagaccatcaagtag

SEQ ID NO: 75953 - DNA, 867 bp, synthetic construct
  misc_feature 1..867: note = Description of Artificial Sequence: Synthetic coding sequence
  source 1..867: mol_type = other DNA
atgggctgcgacagaaactgcggcctgatcgccggcgccgtgatcggcgccgtgctggccgtgttcggcggcatcctgatgcccgtgggcgacctgctgatccagaagaccatcaagaagcaggtggtgctggaggagggcaccatcgccttcaagaactgggtgaagaccggcaccgaggtgtacagacagttctggatcttcgacgtgcagaacccccaggaggtgatgatgaacagcagcaacatccaggtgaagcagagaggcccctacacctacagagtgagattcctggccaaggagaacgtgacccaggacgccgaggacaacaccgtgagcttcctgcagcccaacggcgccatcttcgagcccagcctgagcgtgggcaccgaggccgacaacttcaccgtgctgaacctggccgtggccgccgccagccacatctaccagaaccagttcgtgcagatgatcctgaacagcctgatcaacaagagcaagagcagcatgttccaggtgagaaccctgagagagctgctgtggggctacagagaccccttcctgagcctggtgccctaccccgtgaccaccaccgtgggcctgttctacccctacaacaacaccgccgacggcgtgtacaaggtgttcaacggcaaggacaacatcagcaaggtggccatcatcgacacctacaagggcaagagaaacctgagctactgggagagccactgcgacatgatcaacggcaccgacgccgccagcttcccccccttcgtggagaagagccaggtgctgcagttcttcagcagcgacatctgcagagagacctgcgtgcacttcaccagcagcttcagcgtgtgcaagagctag

SEQ ID NO: 75954 - DNA, 846 bp, synthetic construct
  misc_feature 1..846: note = Description of Artificial Sequence: Synthetic coding sequence
  source 1..846: mol_type = other DNA
atgagcgcccaggagagctgcctgagcctgatcaagtacttcctgttcgtgttcaacctgttcttcttcgtgctgggcagcctgatcttctgcttcggcatctggatcctgatcgacaagaccagcttcgtgagcttcgtgggcctggccttcgtgcccctgcagatctggagcaaggtgctggccatcagcggcatcttcaccatgggcatcgccctgctgggctgcgtgggcgccctgaaggagctgagatgcctgctgggcctgtacttcggcatgctgctgctgctgttcgccacccagatcaccctgggcatcctgatcagcacccagagagcccagctggagagaagcctgagagacgtggtggagaagaccatccagaagtacggcaccaaccccgaggagaccgccgccgaggagagctgggactacgtgcagttccagctgagatgctgcggctggcactacccccaggactggttccaggtgctgatcctgagaggcaacggcagcgaggcccacagagtgccctgcagctgctacaacctgagcgccaccaacgacagcaccatcctggacaaggtgatcctgccccagctgagcagactgggccacctggccagaagcagacacagcgccgacatctgcgccgtgcccgccgagagccacatctacagagagggctgcgcccagggcctgcagaagtggctgcacaacaacctgatcagcatcgtgggcatctgcctgggcgtgggcctgctggagctgggcttcatgaccctgagcatcttcctgtgcagaaacctggaccacgtgtacaacagactggccagatacagatag

SEQ ID NO: 75955 - DNA, 471 bp, synthetic construct
  misc_feature 1..471: note = Description of Artificial Sequence: Synthetic coding sequence
  source 1..471: mol_type = other DNA
atgagcgcccaggagagctgcctgagcctgatcaagtacttcctgttcgtgttcaacctgttcttcttcgtgctgggcagcctgatcttctgcttcggcatctggatcctgatcgacaagaccagcttcgtgagcttcgtgggcctggccttcgtgcccctgcagatctggagcaaggtgctggccatcagcggcatcttcaccatgggcatcgccctgctgggctgcgtgggcgccctgaaggagctgagatgcctgctgggcctgtacttcggcatgctgctgctgctgttcgccacccagatcaccctgggcatcctgatcagcacccagagagcccagaaggacacccccacctggaccaagggcgacagacacaagcagctgcagagagagacccacggcaagaagagagagcaggagaaggagatcgacgccctgaaggaggagaccgagacctacgagccctag

SEQ ID NO: 75956 - DNA, 642 bp, synthetic construct
  misc_feature 1..642: note = Description of Artificial Sequence: Synthetic coding sequence
  source 1..642: mol_type = other DNA
atgggcatcgccctgctgggctgcgtgggcgccctgaaggagctgagatgcctgctgggcctgtacttcggcatgctgctgctgctgttcgccacccagatcaccctgggcatcctgatcagcacccagagagcccagctggagagaagcctgagagacgtggtggagaagaccatccagaagtacggcaccaaccccgaggagaccgccgccgaggagagctgggactacgtgcagttccagctgagatgctgcggctggcactacccccaggactggttccaggtgctgatcctgagaggcaacggcagcgaggcccacagagtgccctgcagctgctacaacctgagcgccaccaacgacagcaccatcctggacaaggtgatcctgccccagctgagcagactgggccacctggccagaagcagacacagcgccgacatctgcgccgtgcccgccgagagccacatctacagagagggctgcgcccagggcctgcagaagtggctgcacaacaacctgatcagcatcgtgggcatctgcctgggcgtgggcctgctggagctgggcttcatgaccctgagcatcttcctgtgcagaaacctggaccacgtgtacaacagactggccagatacagatag

SEQ ID NO: 75957 - DNA, 813 bp, synthetic construct
  misc_feature 1..813: note = Description of Artificial Sequence: Synthetic coding sequence
  source 1..813: mol_type = other DNA
atgagcgcccaggagagctgcctgagcctgatcaagtacttcctgttcgtgttcaacctgttcttcttcgtgctgggcagcctgatcttctgcttcggcatctggatcctgatcgacaagaccagcttcgtgagcttcgtgggcctggccttcgtgcccctgcagatctggagcaaggtgctggccatcagcggcatcttcaccatgggcatcgccctgctgggctgcgtgggcgccctgaaggagctgagatgcctgctgggcctgtacttcggcatgctgctgctgctgttcgccacccagatcaccctgggcatcctgatcagcacccagagagcccagctggagagaagcctgagagacgtggtggagaagaccatccagaagtacggcaccaaccccgaggagaccgccgccgaggagagctgggactacgtgcagttccagctgagatgctgcggctggcactacccccaggactggttccaggtgctgatcctgagaggcaacggcagcgaggcccacagagtgccctgcagctgctacaacctgagcgccaccaacgacagcaccatcctggacaaggtgatcctgccccagctgagcagactgggccacctggccagaagcagacacagcgccgacatctgcgccgtgcccgccgagagccacatctacagagagggctgcgcccagggcctgcagaagtggctgcacaacaacctgatcagcatcgtgggcatctgcctgggcgtgggcctgctggaggtgatctggcccagaccccaccccagaagcgccctgaacccctag

SEQ ID NO: 75958 - DNA, 1095 bp, synthetic construct; identical to SEQ ID NO: 72478
  misc_feature 1..1095: note = Description of Artificial Sequence: Synthetic coding sequence
  source 1..1095: mol_type = other DNA

SEQ ID NO: 75959 - DNA, 483 bp, synthetic construct
  misc_feature 1..483: note = Description of Artificial Sequence: Synthetic coding sequence
  source 1..483: mol_type = other DNA
atggccaactgcgagttcagccccgtgagcggcgacaagccctgctgcagactgagcagaagagcccagctgtgcctgggcgtgagcatcctggtgctgatcctggtggtggtgctggccgtggtggtgcccagatggagacagcagtggagcggccccggcaccaccaagagattccccgagaccgtgctggccagatgcgtgaagtacaccgagatccaccccgagatgagacacgtggactgccagagcgtgtgggacgccttcaagggcgccttcatcagcaagcacccctgcaacatcaccgaggaggactaccagcccctgatgaagctgggcacccagaccgtgccctgcaacaagaacgagaccatcaacctggcccagaccggcgagagaaccgccgccaccaccctgttccagtacagcggcaagagattccccgccggcctgcagaagctgcccgtgatgtggagcatgtag

SEQ ID NO: 75960 - DNA, 624 bp, synthetic construct
  misc_feature 1..624: note = Description of Artificial Sequence: Synthetic coding sequence
  source 1..624: mol_type = other DNA
atgcagagcggcacccactggagagtgctgggcctgtgcctgctgagcgtgggcgtgtggggccaggacggcaacgaggagatgggcggcatcacccagaccccctacaaggtgagcatcagcggcaccaccgtgatcctgacctgcccccagtaccccggcagcgagatcctgtggcagcacaacgacaagaacatcggcggcgacgaggacgacaagaacatcggcagcgacgaggaccacctgagcctgaaggagttcagcgagctggagcagagcggctactacgtgtgctaccccagaggcagcaagcccgaggacgccaacttctacctgtacctgagagccagagtgtgcgagaactgcatggagatggacgtgatgagcgtggccaccatcgtgatcgtggacatctgcatcaccggcggcctgctgctgctggtgtactactggagcaagaacagaaaggccaaggccaagcccgtgaccagaggcgccggcgccggcggcagacagagaggccagaacaaggagagacccccccccgtgcccaaccccgactacgagcccatcagaaagggccagagagacctgtacagcggcctgaaccagagaagaatctag

SEQ ID NO: 75961 - DNA, 606 bp, synthetic construct
  misc_feature 1..606: note = Description of Artificial Sequence: Synthetic coding sequence
  source 1..606: mol_type = other DNA
atgcagagcggcacccactggagagtgctgggcctgtgcctgctgagcgtgggcgtgtggggccaggacggcaacgaggagatggcctacaaggtgagcatcagcggcaccaccgtgatcctgacctgcccccagtaccccggcagcgagatcctgtggcagcacaacgacaagaacatcggcggcgacgaggacgacaagaacatcggcagcgacgaggaccacctgagcctgaaggagttcagcgagctggagcagagcggctactacgtgtgctaccccagaggcagcaagcccgaggacgccaacttctacctgtacctgagagccagagtgtgcgagaactgcatggagatggacgtgatgagcgtggccaccatcgtgatcgtggacatctgcatcaccggcggcctgctgctgctggtgtactactggagcaagaacagaaaggccaaggccaagcccgtgaccagaggcgccggcgccggcggcagacagagaggccagaacaaggagagacccccccccgtgcccaaccccgactacgagcccatcagaaagggccagagagacctgtacagcggcctgaaccagagaagaatctag

SEQ ID NO: 75962 - DNA, 237 bp, synthetic construct
  misc_feature 1..237: note = Description of Artificial Sequence: Synthetic coding sequence
  source 1..237: mol_type = other DNA
atgatcggcttcctgaccgaggacaagaagaagtggaacctgggcagcaacgccaaggaccccagaggcatgtaccagtgcaagggcagccagaacaagagcaagcccctgcaggtgtactacagaaccagcgacaagcagaccctgctgcccaacgaccagctgtaccagcccctgaaggacagagaggacgaccagtacagccacctgcagggcaaccagctgagaagaaactag

SEQ ID NO: 75963 - DNA, 549 bp, synthetic construct
  misc_feature 1..549: note = Description of Artificial Sequence: Synthetic coding sequence
  source 1..549: mol_type = other DNA
atggagcagggcaagggcctggccgtgctgatcctggccatcatcctgctgcagggcaccctggcccagagcatcaagggcaaccacctggtgaaggtgtacgactaccaggaggacggcagcgtgctgctgacctgcgacgccgaggccaagaacatcacctggttcaaggacggcaagatgatcggcttcctgaccgaggacaagaagaagtggaacctgggcagcaacgccaaggaccccagaggcatgtaccagtgcaagggcagccagaacaagagcaagcccctgcaggtgtactacagaatgtgccagaactgcatcgagctgaacgccgccaccatcagcggcttcctgttcgccgagatcgtgagcatcttcgtgctggccgtgggcgtgtacttcatcgccggccaggacggcgtgagacagagcagagccagcgacaagcagaccctgctgcccaacgaccagctgtaccagcccctgaaggacagagaggacgaccagtacagccacctgcagggcaaccagctgagaagaaactag

SEQ ID NO: 75964 - DNA, 1200 bp, synthetic construct
  misc_feature 1..1200: note = Description of Artificial Sequence: Synthetic coding sequence
  source 1..1200: mol_type = other DNA
atggagccccccggcagaagagagtgccccttccccagctggagattccccggcctgctgctggccgccatggtgctgctgctgtacagcttcagcgacgcctgcgaggagccccccaccttcgaggccatggagctgatcggcaagcccaagccctactacgagatcggcgagagagtggactacaagtgcaagaagggctacttctacatcccccccctggccacccacaccatctgcgacagaaaccacacctggctgcccgtgagcgacgacgcctgctacagagagacctgcccctacatcagagaccccctgaacggccaggccgtgcccgccaacggcacctacgagttcggctaccagatgcacttcatctgcaacgagggctactacctgatcggcgaggagatcctgtactgcgagctgaagggcagcgtggccatctggagcggcaagccccccatctgcgagaaggtgctgtgcacccccccccccaagatcaagaacggcaagcacaccttcagcgaggtggaggtgttcgagtacctggacgccgtgacctacagctgcgaccccgcccccggccccgaccccttcagcctgatcggcgagagcaccatctactgcggcgacaacagcgtgtggagcagagccgcccccgagtgcaaggtggtgaagtgcagattccccgtggtggagaacggcaagcagatcagcggcttcggcaagaagttctactacaaggccaccgtgatgttcgagtgcgacaagggcttctacctggacggcagcgacaccatcgtgtgcgacagcaacagcacctgggacccccccgtgcccaagtgcctgaaggtgctgccccccagcagcaccaagccccccgccctgagccacagcgtgagcaccagcagcaccaccaagagccccgccagcagcgccagcggccccagacccacctacaagccccccgtgagcaactaccccggctaccccaagcccgaggagggcatcctggacagcctggacgtgtgggtgatcgccgtgatcgtgatcgccatcgtggtgggcgtggccgtgatctgcgtggtgccctacagatacctgcagagaagaaagaagaagggcaaggccgacggcggcgccgagtacgccacctaccagaccaagagcaccacccccgccgagcagagaggctag

SEQ ID NO: 75965 - DNA, 1050 bp, synthetic construct
  misc_feature 1..1050: note = Description of Artificial Sequence: Synthetic coding sequence
  source 1..1050: mol_type = other DNA
atggagccccccggcagaagagagtgccccttccccagctggagattccccggcctgctgctggccgccatggtgctgctgctgtacagcttcagcgacgcctgcgaggagccccccaccttcgaggccatggagctgatcggcaagcccaagccctactacgagatcggcgagagagtggactacaagtgcaagaagggctacttctacatcccccccctggccacccacaccatctgcgacagaaaccacacctggctgcccgtgagcgacgacgcctgctacagagagacctgcccctacatcagagaccccctgaacggccaggccgtgcccgccaacggcacctacgagttcggctaccagatgcacttcatctgcaacgagggctactacctgatcggcgaggagatcctgtactgcgagctgaagggcagcgtggccatctggagcggcaagccccccatctgcgagaaggtgctgtgcacccccccccccaagatcaagaacggcaagcacaccttcagcgaggtggaggtgttcgagtacctggacgccgtgacctacagctgcgaccccgcccccggccccgaccccttcagcctgatcggcgagagcaccatctactgcggcgacaacagcgtgtggagcagagccgcccccgagtgcaaggtggtgaagtgcagattccccgtggtggagaacggcaagcagatcagcggcttcggcaagaagttctactacaaggccaccgtgatgttcgagtgcgacaagggcttctacctggacggcagcgacaccatcgtgtgcgacagcaacagcacctgggacccccccgtgcccaagtgcctgaagggccccagacccacctacaagccccccgtgagcaactaccccggctaccccaagcccgaggagggcatcctggacagcctggacgtgtgggtgatcgccgtgatcgtgatcgccatcggcaagcagatggtggagctgaacatgcccctgaccagactgaaccagcccctgcagcagagcagagaggccgagtag

SEQ ID NO: 75966 - DNA, 1155 bp, synthetic construct
  misc_feature 1..1155: note = Description of Artificial Sequence: Synthetic coding sequence
  source 1..1155: mol_type = other DNA
atggagccccccggcagaagagagtgccccttccccagctggagattccccggcctgctgctggccgccatggtgctgctgctgtacagcttcagcgacgcctgcgaggagccccccaccttcgaggccatggagctgatcggcaagcccaagccctactacgagatcggcgagagagtggactacaagtgcaagaagggctacttctacatcccccccctggccacccacaccatctgcgacagaaaccacacctggctgcccgtgagcgacgacgcctgctacagagagacctgcccctacatcagagaccccctgaacggccaggccgtgcccgccaacggcacctacgagttcggctaccagatgcacttcatctgcaacgagggctactacctgatcggcgaggagatcctgtactgcgagctgaagggcagcgtggccatctggagcggcaagccccccatctgcgagaaggtgctgtgcacccccccccccaagatcaagaacggcaagcacaccttcagcgaggtggaggtgttcgagtacctggacgccgtgacctacagctgcgaccccgcccccggccccgaccccttcagcctgatcggcgagagcaccatctactgcggcgacaacagcgtgtggagcagagccgcccccgagtgcaaggtggtgaagtgcagattccccgtggtggagaacggcaagcagatcagcggcttcggcaagaagttctactacaaggccaccgtgatgttcgagtgcgacaagggcttctacctggacggcagcgacaccatcgtgtgcgacagcaacagcacctgggacccccccgtgcccaagtgcctgaaggtgagcaccagcagcaccaccaagagccccgccagcagcgccagcggccccagacccacctacaagccccccgtgagcaactaccccggctaccccaagcccgaggagggcatcctggacagcctggacgtgtgggtgatcgccgtgatcgtgatcgccatcgtggtgggcgtggccgtgatctgcgtggtgccctacagatacctgcagagaagaaagaagaagggcaaggccgacggcggcgccgagtacgccacctaccagaccaagagcaccacccccgccgagcagagaggctag

SEQ ID NO: 75967 - DNA, 1110 bp, synthetic construct
  misc_feature 1..1110: note = Description of Artificial Sequence: Synthetic coding sequence
  source 1..1110: mol_type = other DNA
atggagccccccggcagaagagagtgccccttccccagctggagattccccggcctgctgctggccgccatggtgctgctgctgtacagcttcagcgacgcctgcgaggagccccccaccttcgaggccatggagctgatcggcaagcccaagccctactacgagatcggcgagagagtggactacaagtgcaagaagggctacttctacatcccccccctggccacccacaccatctgcgacagaaaccacacctggctgcccgtgagcgacgacgcctgctacagagagacctgcccctacatcagagaccccctgaacggccaggccgtgcccgccaacggcacctacgagttcggctaccagatgcacttcatctgcaacgagggctactacctgatcggcgaggagatcctgtactgcgagctgaagggcagcgtggccatctggagcggcaagccccccatctgcgagaaggtgctgtgcacccccccccccaagatcaagaacggcaagcacaccttcagcgaggtggaggtgttcgagtacctggacgccgtgacctacagctgcgaccccgcccccggccccgaccccttcagcctgatcggcgagagcaccatctactgcggcgacaacagcgtgtggagcagagccgcccccgagtgcaaggtggtgaagtgcagattccccgtggtggagaacggcaagcagatcagcggcttcggcaagaagttctactacaaggccaccgtgatgttcgagtgcgacaagggcttctacctggacggcagcgacaccatcgtgtgcgacagcaacagcacctgggacccccccgtgcccaagtgcctgaagggccccagacccacctacaagccccccgtgagcaactaccccggctaccccaagcccgaggagggcatcctggacagcctggacgtgtgggtgatcgccgtgatcgtgatcgccatcgtggtgggcgtggccgtgatctgcgtggtgccctacagatacctgcagagaagaaagaagaagggcaaggccgacggcggcgccgagtacgccacctaccagaccaagagcaccacccccgccgagcagagaggctag

SEQ ID NO: 75968 - DNA, 1179 bp, synthetic construct
  misc_feature 1..1179: note = Description of Artificial Sequence: Synthetic coding sequence
  source 1..1179: mol_type = other DNA
atggagccccccggcagaagagagtgccccttccccagctggagattccccggcctgctgctggccgccatggtgctgctgctgtacagcttcagcgacgcctgcgaggagccccccaccttcgaggccatggagctgatcggcaagcccaagccctactacgagatcggcgagagagtggactacaagtgcaagaagggctacttctacatcccccccctggccacccacaccatctgcgacagaaaccacacctggctgcccgtgagcgacgacgcctgctacagagagacctgcccctacatcagagaccccctgaacggccaggccgtgcccgccaacggcacctacgagttcggctaccagatgcacttcatctgcaacgagggctactacctgatcggcgaggagatcctgtactgcgagctgaagggcagcgtggccatctggagcggcaagccccccatctgcgagaaggtgctgtgcacccccccccccaagatcaagaacggcaagcacaccttcagcgaggtggaggtgttcgagtacctggacgccgtgacctacagctgcgaccccgcccccggccccgaccccttcagcctgatcggcgagagcaccatctactgcggcgacaacagcgtgtggagcagagccgcccccgagtgcaaggtggtgaagtgcagattccccgtggtggagaacggcaagcagatcagcggcttcggcaagaagttctactacaaggccaccgtgatgttcgagtgcgacaagggcttctacctggacggcagcgacaccatcgtgtgcgacagcaacagcacctgggacccccccgtgcccaagtgcctgaaggtgctgccccccagcagcaccaagccccccgccctgagccacagcgtgagcaccagcagcaccaccaagagccccgccagcagcgccagcggccccagacccacctacaagccccccgtgagcaactaccccggctaccccaagcccgaggagggcatcctggacagcctggacgtgtgggtgatcgccgtgatcgtgatcgccatcgtggtgggcgtggccgtgatctgcgtggtgccctacagatacctgcagagaagaaagaagaagggcacctacctgaccgacgagacccacagagaggtgaagttcaccagcctgtag

SEQ ID NO: 75969 - DNA, 1068 bp, synthetic construct
  misc_feature 1..1068: note = Description of Artificial Sequence: Synthetic coding sequence
  source 1..1068: mol_type = other DNA
atggagccccccggcagaagagagtgccccttccccagctggagattccccggcctgctgctggccgccatggtgctgctgctgtacagcttcagcgacgcctgcgaggagccccccaccttcgaggccatggagctgatcggcaagcccaagccctactacgagatcggcgagagagtggactacaagtgcaagaagggctacttctacatcccccccctggccacccacaccatctgcgacagaaaccacacctggctgcccgtgagcgacgacgcctgctacagagagacctgcccctacatcagagaccccctgaacggccaggccgtgcccgccaacggcacctacgagttcggctaccagatgcacttcatctgcaacgagggctactacctgatcggcgaggagatcctgtactgcgagctgaagggcagcgtggccatctggagcggcaagccccccatctgcgagaaggtgctgtgcacccccccccccaagatcaagaacggcaagcacaccttcagcgaggtggaggtgttcgagtacctggacgccgtgacctacagctgcgaccccgcccccggccccgaccccttcagcctgatcggcgagagcaccatctactgcggcgacaacagcgtgtggagcagagccgcccccgagtgcaaggtggtgaagtgcagattccccgtggtggagaacggcaagcagatcagcggcttcggcaagaagttctactacaaggccaccgtgatgttcgagtgcgacaagggcttctacctggacggcagcgacaccatcgtgtgcgacagcaacagcacctgggacccccccgtgcccaagtgcctgaagggctaccccaagcccgaggagggcatcctggacagcctggacgtgtgggtgatcgccgtgatcgtgatcgccatcgtggtgggcgtggccgtgatctgcgtggtgccctacagatacctgcagagaagaaagaagaagggcaaggccgacggcggcgccgagtacgccacctaccagaccaagagcaccacccccgccgagcagagaggctag

SEQ ID NO: 75970 - DNA, 1158 bp, synthetic construct
  misc_feature 1..1158: note = Description of Artificial Sequence: Synthetic coding sequence
  source 1..1158: mol_type = other DNA
atggagccccccggcagaagagagtgccccttccccagctggagattccccggcctgctgctggccgccatggtgctgctgctgtacagcttcagcgacgcctgcgaggagccccccaccttcgaggccatggagctgatcggcaagcccaagccctactacgagatcggcgagagagtggactacaagtgcaagaagggctacttctacatcccccccctggccacccacaccatctgcgacagaaaccacacctggctgcccgtgagcgacgacgcctgctacagagagacctgcccctacatcagagaccccctgaacggccaggccgtgcccgccaacggcacctacgagttcggctaccagatgcacttcatctgcaacgagggctactacctgatcggcgaggagatcctgtactgcgagctgaagggcagcgtggccatctggagcggcaagccccccatctgcgagaaggtgctgtgcacccccccccccaagatcaagaacggcaagcacaccttcagcgaggtggaggtgttcgagtacctggacgccgtgacctacagctgcgaccccgcccccggccccgaccccttcagcctgatcggcgagagcaccatctactgcggcgacaacagcgtgtggagcagagccgcccccgagtgcaaggtggtgaagtgcagattccccgtggtggagaacggcaagcagatcagcggcttcggcaagaagttctactacaaggccaccgtgatgttcgagtgcgacaagggcttctacctggacggcagcgacaccatcgtgtgcgacagcaacagcacctgggacccccccgtgcccaagtgcctgaaggtgctgccccccagcagcaccaagccccccgccctgagccacagcgtgagcaccagcagcaccaccaagagccccgccagcagcgccagcggctaccccaagcccgaggagggcatcctggacagcctggacgtgtgggtgatcgccgtgatcgtgatcgccatcgtggtgggcgtggccgtgatctgcgtggtgccctacagatacctgcagagaagaaagaagaagggcaaggccgacggcggcgccgagtacgccacctaccagaccaagagcaccacccccgccgagcagagaggctag

SEQ ID NO: 75971 - DNA, 1089 bp, synthetic construct
  misc_feature 1..1089: note = Description of Artificial Sequence: Synthetic coding sequence
  source 1..1089: mol_type = other DNA
atggagccccccggcagaagagagtgccccttccccagctggagattccccggcctgctgctggccgccatggtgctgctgctgtacagcttcagcgacgcctgcgaggagccccccaccttcgaggccatggagctgatcggcaagcccaagccctactacgagatcggcgagagagtggactacaagtgcaagaagggctacttctacatcccccccctggccacccacaccatctgcgacagaaaccacacctggctgcccgtgagcgacgacgcctgctacagagagacctgcccctacatcagagaccccctgaacggccaggccgtgcccgccaacggcacctacgagttcggctaccagatgcacttcatctgcaacgagggctactacctgatcggcgaggagatcctgtactgcgagctgaagggcagcgtggccatctggagcggcaagccccccatctgcgagaaggtgctgtgcacccccccccccaagatcaagaacggcaagcacaccttcagcgaggtggaggtgttcgagtacctggacgccgtgacctacagctgcgaccccgcccccggccccgaccccttcagcctgatcggcgagagcaccatctactgcggcgacaacagcgtgtggagcagagccgcccccgagtgcaaggtggtgaagtgcagattccccgtggtggagaacggcaagcagatcagcggcttcggcaagaagttctactacaaggccaccgtgatgttcgagtgcgacaagggcttctacctggacggcagcgacaccatcgtgtgcgacagcaacagcacctgggacccccccgtgcccaagtgcctgaagggccccagacccacctacaagccccccgtgagcaactaccccggctaccccaagcccgaggagggcatcctggacagcctggacgtgtgggtgatcgccgtgatcgtgatcgccatcgtggtgggcgtggccgtgatctgcgtggtgccctacagatacctgcagagaagaaagaagaagggcacctacctgaccgacgagacccacagagaggtgaagttcaccagcctgtag

SEQ ID NO: 75972 - DNA, 1134 bp, synthetic construct
  misc_feature 1..1134: note = Description of Artificial Sequence: Synthetic coding sequence
  source 1..1134: mol_type = other DNA
atggagccccccggcagaagagagtgccccttccccagctggagattccccggcctgctgctggccgccatggtgctgctgctgtacagcttcagcgacgcctgcgaggagccccccaccttcgaggccatggagctgatcggcaagcccaagccctactacgagatcggcgagagagtggactacaagtgcaagaagggctacttctacatcccccccctggccacccacaccatctgcgacagaaaccacacctggctgcccgtgagcgacgacgcctgctacagagagacctgcccctacatcagagaccccctgaacggccaggccgtgcccgccaacggcacctacgagttcggctaccagatgcacttcatctgcaacgagggctactacctgatcggcgaggagatcctgtactgcgagctgaagggcagcgtggccatctggagcggcaagccccccatctgcgagaaggtgctgtgcacccccccccccaagatcaagaacggcaagcacaccttcagcgaggtggaggtgttcgagtacctggacgccgtgacctacagctgcgaccccgcccccggccccgaccccttcagcctgatcggcgagagcaccatctactgcggcgacaacagcgtgtggagcagagccgcccccgagtgcaaggtggtgaagtgcagattccccgtggtggagaacggcaagcagatcagcggcttcggcaagaagttctactacaaggccaccgtgatgttcgagtgcgacaagggcttctacctggacggcagcgacaccatcgtgtgcgacagcaacagcacctgggacccccccgtgcccaagtgcctgaaggtgagcaccagcagcaccaccaagagccccgccagcagcgccagcggccccagacccacctacaagccccccgtgagcaactaccccggctaccccaagcccgaggagggcatcctggacagcctggacgtgtgggtgatcgccgtgatcgtgatcgccatcgtggtgggcgtggccgtgatctgcgtggtgccctacagatacctgcagagaagaaagaagaagggcacctacctgaccgacgagacccacagagaggtgaagttcaccagcctgtag

SEQ ID NO: 75973 - DNA, 1011 bp, synthetic construct
  misc_feature 1..1011: note = Description of Artificial Sequence: Synthetic coding sequence
  source 1..1011: mol_type = other DNA
atggagccccccggcagaagagagtgccccttccccagctggagattccccggcctgctgctggccgccatggtgctgctgctgtacagcttcagcggcgagacctgcccctacatcagagaccccctgaacggccaggccgtgcccgccaacggcacctacgagttcggctaccagatgcacttcatctgcaacgagggctactacctgatcggcgaggagatcctgtactgcgagctgaagggcagcgtggccatctggagcggcaagccccccatctgcgagaaggtgctgtgcacccccccccccaagatcaagaacggcaagcacaccttcagcgaggtggaggtgttcgagtacctggacgccgtgacctacagctgcgaccccgcccccggccccgaccccttcagcctgatcggcgagagcaccatctactgcggcgacaacagcgtgtggagcagagccgcccccgagtgcaaggtggtgaagtgcagattccccgtggtggagaacggcaagcagatcagcggcttcggcaagaagttctactacaaggccaccgtgatgttcgagtgcgacaagggcttctacctggacggcagcgacaccatcgtgtgcgacagcaacagcacctgggacccccccgtgcccaagtgcctgaaggtgctgccccccagcagcaccaagccccccgccctgagccacagcgtgagcaccagcagcaccaccaagagccccgccagcagcgccagcggccccagacccacctacaagccccccgtgagcaactaccccggctaccccaagcccgaggagggcatcctggacagcctggacgtgtgggtgatcgccgtgatcgtgatcgccatcgtggtgggcgtggccgtgatctgcgtggtgccctacagatacctgcagagaagaaagaagaagggcaaggccgacggcggcgccgagtacgccacctaccagaccaagagcaccacccccgccgagcagagaggctag

SEQ ID NO: 75974 - DNA, 1095 bp, synthetic construct
  misc_feature 1..1095: note = Description of Artificial Sequence: Synthetic coding sequence
  source 1..1095: mol_type = other DNA
atggagccccccggcagaagagagtgccccttccccagctggagattccccggcctgctgctggccgccatggtgctgctgctgtacagcttcagcgacgcctgcgaggagccccccaccttcgaggccatggagctgatcggcaagcccaagccctactacgagatcggcgagagagtggactacaagtgcaagaagggctacttctacatcccccccctggccacccacaccatctgcgacagaaaccacacctggctgcccgtgagcgacgacgcctgctacagagagacctgcccctacatcagagaccccctgaacggccaggccgtgcccgccaacggcacctacgagttcggctaccagatgcacttcatctgcaacgagggctactacctgatcggcgaggagatcctgtactgcgagctgaagggcagcgtggccatctggagcggcaagccccccatctgcgagaaggtgctgtgcacccccccccccaagatcaagaacggcaagcacaccttcagcgaggtggaggtgttcgagtacctggacgccgtgacctacagctgcgaccccgcccccggccccgaccccttcagcctgatcggcgagagcaccatctactgcggcgacaacagcgtgtggagcagagccgcccccgagtgcaaggtggtgaagtgcagattccccgtggtggagaacggcaagcagatcagcggcttcggcaagaagttctactacaaggccaccgtgatgttcgagtgcgacaagggcttctacctggacggcagcgacaccatcgtgtgcgacagcaacagcacctgggacccccccgtgcccaagtgcctgaaggtgagcaccagcagcaccaccaagagccccgccagcagcgccagcggccccagacccacctacaagccccccgtgagcaactaccccggctaccccaagcccgaggagggcatcctggacagcctggacgtgtgggtgatcgccgtgatcgtgatcgccatcggcaagcagatggtggagctgaacatgcccctgaccagactgaaccagcccctgcagcagagcagagaggccgagtag

SEQ ID NO: 75975 - DNA, 1113 bp, synthetic construct
  misc_feature 1..1113: note = Description of Artificial Sequence: Synthetic coding sequence
  source 1..1113: mol_type = other DNA
atggagccccccggcagaagagagtgccccttccccagctggagattccccggcctgctgctggccgccatggtgctgctgctgtacagcttcagcgacgcctgcgaggagccccccaccttcgaggccatggagctgatcggcaagcccaagccctactacgagatcggcgagagagtggactacaagtgcaagaagggctacttctacatcccccccctggccacccacaccatctgcgacagaaaccacacctggctgcccgtgagcgacgacgcctgctacagagagacctgcccctacatcagagaccccctgaacggccaggccgtgcccgccaacggcacctacgagttcggctaccagatgcacttcatctgcaacgagggctactacctgatcggcgaggagatcctgtactgcgagctgaagggcagcgtggccatctggagcggcaagccccccatctgcgagaaggtgctgtgcacccccccccccaagatcaagaacggcaagcacaccttcagcgaggtggaggtgttcgagtacctggacgccgtgacctacagctgcgaccccgcccccggccccgaccccttcagcctgatcggcgagagcaccatctactgcggcgacaacagcgtgtggagcagagccgcccccgagtgcaaggtggtgaagtgcagattccccgtggtggagaacggcaagcagatcagcggcttcggcaagaagttctactacaaggccaccgtgatgttcgagtgcgacaagggcttctacctggacggcagcgacaccatcgtgtgcgacagcaacagcacctgggacccccccgtgcccaagtgcctgaaggtgagcaccagcagcaccaccaagagccccgccagcagcgccagcggctaccccaagcccgaggagggcatcctggacagcctggacgtgtgggtgatcgccgtgatcgtgatcgccatcgtggtgggcgtggccgtgatctgcgtggtgccctacagatacctgcagagaagaaagaagaagggcaaggccgacggcggcgccgagtacgccacctaccagaccaagagcaccacccccgccgagcagagaggctag

SEQ ID NO: 75976 - DNA, 510 bp, synthetic construct
  misc_feature 1..510: note = Description of Artificial Sequence: Synthetic coding sequence
  source 1..510: mol_type = other DNA
atgtgcagcagaggctgggacagctgcctggccctggagctgctgctgctgcccctgagcctgctggtgaccagcatccagggccacctggtgcacatgaccgtggtgagcggcagcaacgtgaccctgaacatcagcgagagcctgcccgagaactacaagcagctgacctggttctacaccttcgaccagaagatcgtggagtgggacagcagaaagagcaagtacttcgagagcaagttcaagggcagagtgagactggacccccagagcggcgccctgtacatcagcaaggtgcagaaggaggacaacagcacctacatcatgagagtgctgaagaagaccggcaacgagcaggagtggaagatcaagctgcaggtgctgggcgagagcggcgagcccaagagcaagagccccctgcagtggccccagatggaccactgcagagccagctgggaggcctggggcaccctgggcgaggaggagagaaagaccagcggccaggtgtag

SEQ ID NO: 75977 - DNA, 732 bp, synthetic construct
  misc_feature 1..732: note = Description of Artificial Sequence: Synthetic coding sequence
  source 1..732: mol_type = other DNA
atgtgcagcagaggctgggacagctgcctggccctggagctgctgctgctgcccctgagcctgctggtgaccagcatccagggccacctggtgcacatgaccgtggtgagcggcagcaacgtgaccctgaacatcagcgagagcctgcccgagaactacaagcagctgacctggttctacaccttcgaccagaagatcgtggagtgggacagcagaaagagcaagtacttcgagagcaagttcaagggcagagtgagactggacccccagagcggcgccctgtacatcagcaaggtgcagaaggaggacaacagcacctacatcatgagagtgctgaagaagaccggcaacgagcaggagtggaagatcaagctgcaggtgctggaccccgtgcccaagcccgtgatcaagatcgagaagatcgaggacatggacgacaactgctacctgaagctgagctgcgtgatccccggcgagagcgtgaactacacctggtacggcgacaagagacccttccccaaggagctgcagaacagcgtgctggagaccaccctgatgccccacaactacagcagatgctacacctgccaggtgagcaacagcgtgagcagcaagaacggcaccgtgtgcctgagccccccctgcaccctggccagaagcttcggcgtggagtggatcgccagctggctggtggtgaccgtgcccaccatcctgggcctgctgctgacctag

SEQ ID NO: 75978 - DNA, 1044 bp, synthetic construct
  misc_feature 1..1044: note = Description of Artificial Sequence: Synthetic coding sequence
  source 1..1044: mol_type = other DNA
atggccctgctgttcagcctgatcctggccatctgcaccagacccggcttcctggccagccccagcggcgtgagactggtgggcggcctgcacagatgcgagggcagagtggaggtggagcagaagggccagtggggcaccgtgtgcgacgacggctgggacatcaaggacgtggccgtgctgtgcagagagctgggctgcggcgccgccagcggcacccccagcggcatcctgtacgagccccccgccgagaaggagcagaaggtgctgatccagagcgtgagctgcaccggcaccgaggacaccctggcccagtgcgagcaggaggaggtgtacgactgcagccacgacgaggacgccggcgccagctgcgagaaccccgagagcagcttcagccccgtgcccgagggcgtgagactggccgacggccccggccactgcaagggcagagtggaggtgaagcaccagaaccagtggtacaccgtgtgccagaccggctggagcctgagagccgccaaggtggtgtgcagacagctgggctgcggcagagccgtgctgacccagaagagatgcaacaagcacgcctacggcagaaagcccatctggctgagccagatgagctgcagcggcagagaggccaccctgcaggactgccccagcggcccctggggcaagaacacctgcaaccacgacgaggacacctgggtggagtgcgaggaccccttcgacctgagactggtgggcggcgacaacctgtgcagcggcagactggaggtgctgcacaagggcgtgtggggcagcgtgtgcgacgacaactggggcgagaaggaggaccaggtggtgtgcaagcagctgggctgcggcaagagcctgagccccagcttcagagacagaaagtgctacggccccggcgtgggcagaatctggctggacaacgtgagatgcagcggcgaggagcagagcctggagcagtgccagcacagattctggggcttccacgactgcacccaccaggaggacgtggccgtgatctgcagcggctag

SEQ ID NO: 75979 - DNA, 660 bp, synthetic construct
  misc_feature 1..660: note = Description of Artificial Sequence: Synthetic coding sequence
  source 1..660: mol_type = other DNA
atgggcatgagcagcctgaagctgctgaagtacgtgctgttcttcttcaacctgctgttctggatctgcggctgctgcatcctgggcttcggcatctacctgctgatccacaacaacttcggcgtgctgttccacaacctgcccagcctgaccctgggcaacgtgttcgtgatcgtgggcagcatcatcatggtggtggccttcctgggctgcatgggcagcatcaaggagaacaagtgcctgctgatgagcttcttcatcctgctgctgatcatcctgctggccgaggtgaccctggccatcctgctgttcgtgtacgagcagaagctgaacgagtacgtggccaagggcctgaccgacagcatccacagataccacagcgacaacagcaccaaggccgcctgggacagcatccagagcttcctgcagtgctgcggcatcaacggcaccagcgactggaccagcggcccccccgccagctgccccagcgacagaaaggtggagggctgctacgccaaggccagactgtggttccacagcaacttcctgtacatcggcatcatcaccatctgcgtgtgcgtgatcgaggtgctgggcatgagcttcgccctgaccctgaactgccagatcgacaagaccagccagaccatcggcctgtag

SEQ ID NO: 75980 - DNA, 483 bp, synthetic construct
  misc_feature 1..483: note = Description of Artificial Sequence: Synthetic coding sequence
  source 1..483: mol_type = other DNA
atgggcatgagcagcctgaagctgctgaagtacgtgctgttcttcttcaacctgctgttctggatctgcggctgctgcatcctgggcttcggcatctacctgctgatccacaacaacttcggcgtgctgttccacaacctgcccagcctgaccctgggcaacgtgttcgtgatcgtgggcagcatcatcatggtggtggccttcctgggctgcatgggcagcatcaaggagaacaagtgcctgctgatgagcttcttcatcctgctgctgatcatcctgctggccgaggtgaccctggccatcctgctgttcgtgtacgagcagaagggctgctacgccaaggccagactgtggttccacagcaacttcctgtacatcggcatcatcaccatctgcgtgtgcgtgatcgaggtgctgggcatgagcttcgccctgaccctgaactgccagatcgacaagaccagccagaccatcggcctgtag

SEQ ID NO: 75981 - DNA, 1323 bp, synthetic construct
  misc_feature 1..1323: note = Description of Artificial Sequence: Synthetic coding sequence
  source 1..1323: mol_type = other DNA
atgaccgtggccagacccagcgtgcccgccgccctgcccctgctgggcgagctgcccagactgctgctgctggtgctgctgtgcctgcccgccgtgtggggcgactgcggcctgccccccgacgtgcccaacgcccagcccgccctggagggcagaaccagcttccccgaggacaccgtgatcacctacaagtgcgaggagagcttcgtgaagatccccggcgagaaggacagcgtgatctgcctgaagggcagccagtggagcgacatcgaggagttctgcaacagaagctgcgaggtgcccaccagactgaacagcgccagcctgaagcagccctacatcacccagaactacttccccgtgggcaccgtggtggagtacgagtgcagacccggctacagaagagagcccagcctgagccccaagctgacctgcctgcagaacctgaagtggagcaccgccgtggagttctgcaagaagaagagctgccccaaccccggcgagatcagaaacggccagatcgacgtgcccggcggcatcctgttcggcgccaccatcagcttcagctgcaacaccggctacaagctgttcggcagcaccagcagcttctgcctgatcagcggcagcagcgtgcagtggagcgaccccctgcccgagtgcagagagatctactgccccgcccccccccagatcgacaacggcatcatccagggcgagagagaccactacggctacagacagagcgtgacctacgcctgcaacaagggcttcaccatgatcggcgagcacagcatctactgcaccgtgaacaacgacgagggcgagtggagcggccccccccccgagtgcagaggcaagagcctgaccagcaaggtgccccccaccgtgcagaagcccaccaccgtgaacgtgcccaccaccgaggtgagccccaccagccagaagaccaccaccaagaccaccacccccaacgcccaggccaccagaagcacccccgtgagcagaaccaccaagcacttccacgagaccacccccaacaagggcagcggcaccaccagcggcaccaccagactgctgagcggcagcagacccgtgacccaggccggcatgagatggtgcgacagaagcagcctgcagagcagaacccccggcttcaagagaagcttccacttcagcctgcccagcagctggtactacagagcccacgtgttccacgtggacagattcgcctgggacgccagcaaccacggcctggccgacctggccaaggaggagctgagaagaaagtacacccaggtgtacagactgttcctggtgagctag

SEQ ID NO: 75982 - DNA, 1095 bp, synthetic construct
  misc_feature 1..1095: note = Description of Artificial Sequence: Synthetic coding sequence
  source 1..1095: mol_type = other DNA
atgaccgtggccagacccagcgtgcccgccgccctgcccctgctgggcgagctgcccagactgctgctgctggtgctgctgtgcctgcccgccgtgtggggcgactgcggcctgccccccgacgtgcccaacgcccagcccgccctggagggcagaaccagcttccccgaggacaccgtgatcacctacaagtgcgaggagagcttcgtgaagatccccggcgagaaggacagcgtgatctgcctgaagggcagccagtggagcgacatcgaggagttctgcaacagaagctgcgaggtgcccaccagactgaacagcgccagcctgaagcagccctacatcacccagaactacttccccgtgggcaccgtggtggagtacgagtgcagacccggctacagaagagagcccagcctgagccccaagctgacctgcctgcagaacctgaagtggagcaccgccgtggagttctgcaagaagaagagctgccccaaccccggcgagatcagaaacggccagatcgacgtgcccggcggcatcctgttcggcgccaccatcagcttcagctgcaacaccggctacaagctgttcggcagcaccagcagcttctgcctgatcagcggcagcagcgtgcagtggagcgaccccctgcccgagtgcagagagatctactgccccgcccccccccagatcgacaacggcatcatccagggcgagagagaccactacggctacagacagagcgtgacctacgcctgcaacaagggcttcaccatgatcggcgagcacagcatctactgcaccgtgaacaacgacgagggcgagtggagcggccccccccccgagtgcagaggcaagagcctgaccagcaaggtgccccccaccgtgcagaagcccaccaccgtgaacgtgcccaccaccgaggtgagccccaccagccagaagaccaccaccaagaccaccacccccaacgcccaggccaccagaagcacccccgtgagcagaaccaccaagcacttccacgagaccacccccaacaagggcagcggcaccaccagcggcaccaccagactgctgagcgtgctgttcatgtag

SEQ ID NO: 75983 - DNA, 1146 bp, synthetic construct
  misc_feature 1..1146: note = Description of Artificial Sequence: Synthetic coding sequence
  source 1..1146: mol_type = other DNA
atgaccgtggccagacccagcgtgcccgccgccctgcccctgctgggcgagctgcccagactgctgctgctggtgctgctgtgcctgcccgccgtgtggggcgactgcggcctgccccccgacgtgcccaacgcccagcccgccctggagggcagaaccagcttccccgaggacaccgtgatcacctacaagtgcgaggagagcttcgtgaagatccccggcgagaaggacagcgtgatctgcctgaagggcagccagtggagcgacatcgaggagttctgcaacagaagctgcgaggtgcccaccagactgaacagcgccagcctgaagcagccctacatcacccagaactacttccccgtgggcaccgtggtggagtacgagtgcagacccggctacagaagagagcccagcctgagccccaagctgacctgcctgcagaacctgaagtggagcaccgccgtggagttctgcaagaagaagagctgccccaaccccggcgagatcagaaacggccagatcgacgtgcccggcggcatcctgttcggcgccaccatcagcttcagctgcaacaccggctacaagctgttcggcagcaccagcagcttctgcctgatcagcggcagcagcgtgcagtggagcgaccccctgcccgagtgcagagagatctactgccccgcccccccccagatcgacaacggcatcatccagggcgagagagaccactacggctacagacagagcgtgacctacgcctgcaacaagggcttcaccatgatcggcgagcacagcatctactgcaccgtgaacaacgacgagggcgagtggagcggccccccccccgagtgcagaggcaagagcctgaccagcaaggtgccccccaccgtgcagaagcccaccaccgtgaacgtgcccaccaccgaggtgagccccaccagccagaagaccaccaccaagaccaccacccccaacgcccaggccaccagaagcacccccgtgagcagaaccaccaagcacttccacgagaccacccccaacaagggcagcggcaccaccagcggcaccaccagactgctgagcggccacacctgcttcaccctgaccggcctgctgggcaccctggtgaccatgggcctgctgacctag

SEQ ID NO: 75984 - DNA, 1320 bp, synthetic construct
  misc_feature 1..1320: note = Description of Artificial Sequence: Synthetic coding sequence
  source 1..1320: mol_type = other DNA
atgaccgtggccagacccagcgtgcccgccgccctgcccctgctgggcgagctgcccagactgctgctgctggtgctgctgtgcctgcccgccgtgtggggcgactgcggcctgccccccgacgtgcccaacgcccagcccgccctggagggcagaaccagcttccccgaggacaccgtgatcacctacaagtgcgaggagagcttcgtgaagatccccggcgagaaggacagcgtgatctgcctgaagggcagccagtggagcgacatcgaggagttctgcaacagaagctgcgaggtgcccaccagactgaacagcgccagcctgaagcagccctacatcacccagaactacttccccgtgggcaccgtggtggagtacgagtgcagacccggctacagaagagagcccagcctgagccccaagctgacctgcctgcagaacctgaagtggagcaccgccgtggagttctgcaagaagaagagctgccccaaccccggcgagatcagaaacggccagatcgacgtgcccggcggcatcctgttcggcgccaccatcagcttcagctgcaacaccggctacaagctgttcggcagcaccagcagcttctgcctgatcagcggcagcagcgtgcagtggagcgaccccctgcccgagtgcagagagatctactgccccgcccccccccagatcgacaacggcatcatccagggcgagagagaccactacggctacagacagagcgtgacctacgcctgcaacaagggcttcaccatgatcggcgagcacagcatctactgcaccgtgaacaacgacgagggcgagtggagcggccccccccccgagtgcagaggcaagagcctgaccagcaaggtgccccccaccgtgcagaagcccaccaccgtgaacgtgcccaccaccgaggtgagccccaccagccagaagaccaccaccaagaccaccacccccaacgcccaggccaccagaagcacccccgtgagcagaaccaccaagcacttccacgagaccacccccaacaagggcagcggcaccaccagcggcaccaccagactgctgagcgagaccgtgttccacagagtgatccaggacggcctggacctgctggccagcagaagcgcctgcctgggcctgcccaagtgctgggactacagaagagagcccccccacctggccagagcccacgtgttccacgtggacagattcgcctgggacgccagcaaccacggcctggccgacctggccaaggaggagctgagaagaaagtacacccaggtgtacagactgttcctggtgagctag

SEQ ID NO: 75985 - DNA, 390 bp, synthetic construct
  misc_feature 1..390: note = Description of Artificial Sequence: Synthetic coding sequence
  source 1..390: mol_type = other DNA
atgaccgtggccagacccagcgtgcccgccgccctgcccctgctgggcgagctgcccagactgctgctgctggtgctgctgtgcctgcccgccgtgtggggcgactgcggcctgccccccgacgtgcccaacgcccagcccgccctggagggcagaaccagcttccccgaggacaccgtgatcacctacaagtgcgaggagagcttcgtgaagatccccggcgagaaggacagcgtgatctgcctgaagggcagccagtggagcgacatcgaggagttctgcaacagaagctgcgaggtgcccaccagactgcagaagagaaccttcagcatcaccaagaccaacctgcccagcgagttcaagatggtgcacagcagcagaatcctgtag

SEQ ID NO: 75986 - DNA, 1155 bp, synthetic construct
  misc_feature 1..1155: note = Description of Artificial Sequence: Synthetic coding sequence
  source 1..1155: mol_type = other DNA
atgaccgtggccagacccagcgtgcccgccgccctgcccctgctgggcgagctgcccagactgctgctgctggtgctgctgtgcctgcccgccgtgtggggcgactgcggcctgccccccgacgtgcccaacgcccagcccgccctggagggcagaaccagcttccccgaggacaccgtgatcacctacaagtgcgaggagagcttcgtgaagatccccggcgagaaggacagcgtgatctgcctgaagggcagccagtggagcgacatcgaggagttctgcaacagaagctgcgaggtgcccaccagactgaacagcgccagcctgaagcagccctacatcacccagaactacttccccgtgggcaccgtggtggagtacgagtgcagacccggctacagaagagagcccagcctgagccccaagctgacctgcctgcagaacctgaagtggagcaccgccgtggagttctgcaagaagaagagctgccccaaccccggcgagatcagaaacggccagatcgacgtgcccggcggcatcctgttcggcgccaccatcagcttcagctgcaacaccggctacaagctgttcggcagcaccagcagcttctgcctgatcagcggcagcagcgtgcagtggagcgaccccctgcccgagtgcagagagatctactgccccgcccccccccagatcgacaacggcatcatccagggcgagagagaccactacggctacagacagagcgtgacctacgcctgcaacaagggcttcaccatgatcggcgagcacagcatctactgcaccgtgaacaacgacgagggcgagtggagcggccccccccccgagtgcagaggcaagagcctgaccagcaaggtgccccccaccgtgcagaagcccaccaccgtgaacgtgcccaccaccgaggtgagccccaccagccagaagaccaccaccaagaccaccacccccaacgcccaggccaccagaagcacccccgtgagcagaaccaccaagcacttccacgagaccacccccaacaagggcagcggcaccaccagcggcaccaccagactgctgagcgccctgcaggtgagacccttcgaggtgagcggcagcagccacatcagcagcaagaagatgatgtgcatcctgtag

SEQ ID NO: 75987 - DNA, 954 bp, synthetic construct
  misc_feature 1..954: note = Description of Artificial Sequence: Synthetic coding sequence
  source 1..954: mol_type = other DNA
atgaccgtggccagacccagcgtgcccgccgccctgcccctgctgggcgagctgcccagactgctgctgctggtgctgctgtgcctgcccgccgtgtggggcgactgcggcctgccccccgacgtgcccaacgcccagcccgccctggagggcagaaccagcttccccgaggacaccgtgatcacctacaagtgcgaggagagcttcgtgaagatccccggcgagaaggacagcgtgatctgcctgaagggcagccagtggagcgacatcgaggagttctgcaaccagaagagctgccccaaccccggcgagatcagaaacggccagatcgacgtgcccggcggcatcctgttcggcgccaccatcagcttcagctgcaacaccggctacaagctgttcggcagcaccagcagcttctgcctgatcagcggcagcagcgtgcagtggagcgaccccctgcccgagtgcagagagatctactgccccgcccccccccagatcgacaacggcatcatccagggcgagagagaccactacggctacagacagagcgtgacctacgcctgcaacaagggcttcaccatgatcggcgagcacagcatctactgcaccgtgaacaacgacgagggcgagtggagcggccccccccccgagtgcagaggcaagagcctgaccagcaaggtgccccccaccgtgcagaagcccaccaccgtgaacgtgcccaccaccgaggtgagccccaccagccagaagaccaccaccaagaccaccacccccaacgcccaggccaccagaagcacccccgtgagcagaaccaccaagcacttccacgagaccacccccaacaagggcagcggcaccaccagcggccagctgaccctgttcagcggccacacctgcttcaccctgaccggcctgctgggcaccctggtgaccatgggcctgctgacctag

SEQ ID NO: 75988 - DNA, 753 bp, synthetic construct
  misc_feature 1..753: note = Description of Artificial Sequence: Synthetic coding sequence
  source 1..753: mol_type = other DNA
atggtggccggcagcgacgccggcagagccctgggcgtgctgagcgtggtgtgcctgctgcactgcttcggcttcatcagctgcttcagccagcagatctacggcgtggtgtacggcaacgtgaccttccacgtgcccagcaacgtgcccctgaaggaggtgctgtggaagaagcagaaggacaaggtggccgagctggagaacagcgagttcagagccttcagcagcttcaagaacagagtgtacctggacaccgtgagcggcagcctgaccatctacaacctgaccagcagcgacgaggacgagtacgagatggagagccccaacatcaccgacaccatgaagttcttcctgtacgtgctggagagcctgcccagccccaccctgacctgcgccctgaccaacggcagcatcgaggtgcagtgcatgatccccgagcactacaacagccacagaggcctgatcatgtacagctgggactgccccatggagcagtgcaagagaaacagcaccagcatctacttcaagatggagaacgacctgccccagaagatccagtgcaccctgagcaaccccctgttcaacaccaccagcagcatcatcctgaccacctgcatccccagcagcggccacagcagacacagatacgccctgatccccatccccctggccgtgatcaccacctgcatcgtgctgtacatgaacggcatcctgaagtgcgacagaaagcccgacagaaccaacagcaactag

SEQ ID NO: 75989 - DNA, 747 bp, synthetic construct
  misc_feature 1..747: note = Description of Artificial Sequence: Synthetic coding sequence
  source 1..747: mol_type = other DNA
atggtggccggcagcgacgccggcagagccctgggcgtgctgagcgtggtgtgcctgctgcactgcttcggcttcatcagctgcttcagccagcagatctacggcgtggtgtacggcaacgtgaccttccacgtgcccagcaacgtgcccctgaaggaggtgctgtggaagaagcagaaggacaaggtggccgagctggagaacagcgagttcagagccttcagcagcttcaagaacagagtgtacctggacaccgtgagcggcagcctgaccatctacaacctgaccagcagcgacgaggacgagtacgagatggagagccccaacatcaccgacaccatgaagttcttcctgtacgtgctggagagcctgcccagccccaccctgacctgcgccctgaccaacggcagcatcgaggtgcagtgcatgatccccgagcactacaacagccacagaggcctgatcatgtacagctgggactgccccatggagcagtgcaagagaaacagcaccagcatctacttcaagatggagaacgacctgccccagaagatccagtgcaccctgagcaaccccctgttcaacaccaccagcagcatcatcctgaccacctgcatccccagcagcggccacagcagacacagatacgccctgatccccatccccctggccgtgatcaccacctgcatcgtgctgtacatgaacggcatcctgaagtgcgacagaaagcccgacagaaccaagtag

SEQ ID NO: 75990 - DNA, 387 bp, synthetic construct
  misc_feature 1..387: note = Description of Artificial Sequence: Synthetic coding sequence
  source 1..387: mol_type = other DNA
atgggcatccagggcggcagcgtgctgttcggcctgctgctggtgctggccgtgttctgccacagcggccacagcctgcagtgctacaactgccccaaccccaccgccgactgcaagaccgccgtgaactgcagcagcgacttcgacgcctgcctgatcaccaaggccggcctgcaggtgtacaacaagtgctggaagttcgagcactgcaacttcaacgacgtgaccaccagactgagagagaacgagctgacctactactgctgcaagaaggacctgtgcaacttcaacgagcagctggagaacggcggcaccagcctgagcgagaagaccgtgctgctgctggtgacccccttcctggccgccgcctggagcctgcacccctag

SEQ ID NO: 75991 - DNA, 387 bp, synthetic construct; identical to SEQ ID NO: 75990
  misc_feature 1..387: note = Description of Artificial Sequence: Synthetic coding sequence
  source 1..387: mol_type = other DNA

SEQ ID NO: 75992 - DNA, 387 bp, synthetic construct; identical to SEQ ID NO: 75990
  misc_feature 1..387: note = Description of Artificial Sequence: Synthetic coding sequence
  source 1..387: mol_type = other DNA

SEQ ID NO: 75993 - DNA, 387 bp, synthetic construct; identical to SEQ ID NO: 75990
  misc_feature 1..387: note = Description of Artificial Sequence: Synthetic coding sequence
  source 1..387: mol_type = other DNA

SEQ ID NO: 75994 - DNA, 387 bp, synthetic construct; identical to SEQ ID NO: 75990
  misc_feature 1..387: note = Description of Artificial Sequence: Synthetic coding sequence
  source 1..387: mol_type = other DNA

SEQ ID NO: 75995 - DNA, 387 bp, synthetic construct; identical to SEQ ID NO: 75990
  misc_feature 1..387: note = Description of Artificial Sequence: Synthetic coding sequence
  source 1..387: mol_type = other DNA

SEQ ID NO: 75996 - DNA, 387 bp, synthetic construct; identical to SEQ ID NO: 75990
  misc_feature 1..387: note = Description of Artificial Sequence: Synthetic coding sequence
  source 1..387: mol_type = other DNA

SEQ ID NO: 75997 - DNA, 387 bp, synthetic construct; identical to SEQ ID NO: 75990
  misc_feature 1..387: note = Description of Artificial Sequence: Synthetic coding sequence
  source 1..387: mol_type = other DNA

SEQ ID NO: 75998 - DNA, 387 bp, synthetic construct; identical to SEQ ID NO: 75990
  misc_feature 1..387: note = Description of Artificial Sequence: Synthetic coding sequence
  source 1..387: mol_type = other DNA

SEQ ID NO: 75999 - DNA, 2007 bp, synthetic construct
  misc_feature 1..2007: note = Description of Artificial Sequence: Synthetic coding sequence
  source 1..2007: mol_type = other DNA
atgtggctgttcttcggcatcaccggcctgctgaccgccgccctgagcggccaccccagccccgccccccccgaccagctgaacaccagcagcgccgagagcgagctgtgggagcccggcgagagactgcccgtgagactgaccaacggcagcagcagctgcagcggcaccgtggaggtgagactggaggccagctgggagcccgcctgcggcgccctgtgggacagcagagccgccgaggccgtgtgcagagccctgggctgcggcggcgccgaggccgccagccagctggccccccccacccccgagctgccccccccccccgccgccggcaacaccagcgtggccgccaacgccaccctggccggcgcccccgccctgctgtgcagcggcgccgagtggagactgtgcgaggtggtggagcacgcctgcagaagcgacggcagaagagccagagtgacctgcgccgagaacagagccctgagactggtggacggcggcggcgcctgcgccggcagagtggagatgctggagcacggcgagtggggcagcgtgtgcgacgacacctgggacctggaggacgcccacgtggtgtgcagacagctgggctgcggctgggccgtgcaggccctgcccggcctgcacttcacccccggcagaggccccatccacagagaccaggtgaactgcagcggcgccgaggcctacctgtgggactgccccggcctgcccggccagcactactgcggccacaaggaggacgccggcgccgtgtgcagcgagcaccagagctggagactgaccggcggcgccgacagatgcgagggccaggtggaggtgcacttcagaggcgtgtggaacaccgtgtgcgacagcgagtggtaccccagcgaggccaaggtgctgtgccagagcctgggctgcggcaccgccgtggagagacccaagggcctgccccacagcctgagcggcagaatgtactacagctgcaacggcgaggagctgaccctgagcaactgcagctggagattcaacaacagcaacctgtgcagccagagcctggccgccagagtgctgtgcagcgccagcagaagcctgcacaacctgagcacccccgaggtgcccgccagcgtgcagaccgtgaccatcgagagcagcgtgaccgtgaagatcgagaacaaggagagcagagagctgatgctgctgatccccagcatcgtgctgggcatcctgctgctgggcagcctgatcttcatcgccttcatcctgctgagaatcaagggcaagtacgccctgcccgtgatggtgaaccaccagcacctgcccaccaccatccccgccggcagcaacagctaccagcccgtgcccatcaccatccccaaggaggtgttcatgctgcccatccaggtgcaggcccccccccccgaggacagcgacagcggcagcgacagcgactacgagcactacgacttcagcgcccagccccccgtggccctgaccaccttctacaacagccagagacacagagtgaccgacgaggaggtgcagcagagcagattccagatgccccccctggaggagggcctggaggagctgcacgccagccacatccccaccgccaaccccggccactgcatcaccgacccccccagcctgggcccccagtaccaccccagaagcaacagcgagagcagcaccagcagcggcgaggactactgcaacagccccaagagcaagctgcccccctggaacccccaggtgttcagcagcgagagaagcagcttcctggagcagccccccaacctggagctggccggcacccagcccgccttcagcgccggcccccccgccgacgacagcagcagcaccagcagcggcgagtggtaccagaacttccagccccccccccagccccccagcgaggagcagttcggctgccccggcagccccagcccccagcccgacagcaccgacaacgacgactacgacgacatcagcgccgcctag

SEQ ID NO: 76000 - DNA, 1911 bp, synthetic construct
  misc_feature 1..1911: note = Description of Artificial Sequence: Synthetic coding sequence
  source 1..1911: mol_type = other DNA
atgtggctgttcttcggcatcaccggcctgctgaccgccgccctgagcggccaccccagccccgccccccccgaccagctgaacaccagcagcgccgagagcgagctgtgggagcccggcgagagactgcccgtgagactgaccaacggcagcagcagctgcagcggcaccgtggaggtgagactggaggccagctgggagcccgcctgcggcgccctgtgggacagcagagccgccgaggccgtgtgcagagccctgggctgcggcggcgccgaggccgccagccagctggccccccccacccccgagctgccccccccccccgccgccggcaacaccagcgtggccgccaacgccaccctggccggcgcccccgccctgctgtgcagcggcgccgagtggagactgtgcgaggtggtggagcacgcctgcagaagcgacggcagaagagccagagtgacctgcgccgagaacagagccctgagactggtggacggcggcggcgcctgcgccggcagagtggagatgctggagcacggcgagtggggcagcgtgtgcgacgacacctgggacctggaggacgcccacgtggtgtgcagacagctgggctgcggctgggccgtgcaggccctgcccggcctgcacttcacccccggcagaggccccatccacagagaccaggtgaactgcagcggcgccgaggcctacctgtgggactgccccggcctgcccggccagcactactgcggccacaaggaggacgccggcgccgtgtgcagcgagcaccagagctggagactgaccggcggcgccgacagatgcgagggccaggtggaggtgcacttcagaggcgtgtggaacaccgtgtgcgacagcgagtggtaccccagcgaggccaaggtgctgtgccagagcctgggctgcggcaccgccgtggagagacccaagggcctgccccacagcctgagcggcagaatgtactacagctgcaacggcgaggagctgaccctgagcaactgcagctggagattcaacaacagcaacctgtgcagccagagcctggccgccagagtgctgtgcagcgccagcagaagcctgcacaacctgagcacccccgaggtgcccgccagcgtgcagaccgtgaccatcgagagcagcgtgaccgtgaagatcgagaacaaggagagcagagagctgatgctgctgatccccagcatcgtgctgggcatcctgctgctgggcagcctgatcttcatcgccttcatcctgctgagaatcaagggcaagtacgtgttcatgctgcccatccaggtgcaggcccccccccccgaggacagcgacagcggcagcgacagcgactacgagcactacgacttcagcgcccagccccccgtggccctgaccaccttctacaacagccagagacacagagtgaccgacgaggaggtgcagcagagcagattccagatgccccccctggaggagggcctggaggagctgcacgccagccacatccccaccgccaaccccggccactgcatcaccgacccccccagcctgggcccccagtaccaccccagaagcaacagcgagagcagcaccagcagcggcgaggactactgcaacagccccaagagcaagctgcccccctggaacccccaggtgttcagcagcgagagaagcagcttcctggagcagccccccaacctggagctggccggcacccagcccgccttcagcgccggcccccccgccgacgacagcagcagcaccagcagcggcgagtggtaccagaacttccagccccccccccagccccccagcgaggagcagttcggctgccccggcagccccagcccccagcccgacagcaccgacaacgacgactacgacgacatcagcgccgcctag

SEQ ID NO: 76001 - DNA, 1788 bp, synthetic construct
  misc_feature 1..1788: note = Description of Artificial Sequence: Synthetic coding sequence
  source 1..1788: mol_type = other DNA
atgtggctgttcttcggcatcaccggcctgctgaccgccgccctgagcggccaccccagccccgccccccccgaccagctgaacaccagcagcgccgagagcgagctgtgggagcccggcgagagactgcccgtgagactgaccaacggcagcagcagctgcagcggcaccgtggaggtgagactggaggccagctgggagcccgcctgcggcgccctgtgggacagcagagccgccgaggccgtgtgcagagccctgggctgcggcggcgccgaggccgccagccagctggccccccccacccccgagctgccccccccccccgccgccggcaacaccagcgtggccgccaacgccaccctggccggcgcccccgccctgctgtgcagcggcgccgagtggagactgtgcgaggtggtggagcacgcctgcagaagcgacggcagaagagccagagtgacctgcgccgagaacagagccctgagactggtggacggcggcggcgcctgcgccggcagagtggagatgctggagcacggcgagtggggcagcgtgtgcgacgacacctgggacctggaggacgcccacgtggtgtgcagacagctgggctgcggctgggccgtgcaggccctgcccggcctgcacttcacccccggcagaggccccatccacagagaccaggtgaactgcagcggcgccgaggcctacctgtgggactgccccggcctgcccggccagcactactgcggccacaaggaggacgccggcgccgtgtgcagcgagcaccagagctggagactgaccggcggcgccgacagatgcgagggccaggtggaggtgcacttcagaggcgtgtggaacaccgtgtgcgacagcgagtggtaccccagcgaggccaaggtgctgtgccagagcctgggctgcggcaccgccgtggagagacccaagggcctgccccacagcctgagcggcagaatgtactacagctgcaacggcgaggagctgaccctgagcaactgcagctggagattcaacaacagcaacctgtgcagccagagcctggccgccagagtgctgtgcagcgccagcagaagcctgcacaacctgagcacccccgaggtgcccgccagcgtgcagaccgtgaccatcgagagcagcgtgaccgtgaagatcgagaacaaggagagcagagagctgatgctgctgatccccagcatcgtgctgggcatcctgctgctgggcagcctgatcttcatcgccttcatcctgctgagaatcaagggcaagtacgacagccagagacacagagtgaccgacgaggaggtgcagcagagcagattccagatgccccccctggaggagggcctggaggagctgcacgccagccacatccccaccgccaaccccggccactgcatcaccgacccccccagcctgggcccccagtaccaccccagaagcaacagcgagagcagcaccagcagcggcgaggactactgcaacagccccaagagcaagctgcccccctggaacccccaggtgttcagcagcgagagaagcagcttcctggagcagccccccaacctggagctggccggcacccagcccgccttcagcgccggcccccccgccgacgacagcagcagcaccagcagcggcgagtggtaccagaacttccagccccccccccagccccccagcgaggagcagttcggctgccccggcagccccagcccccagcccgacagcaccgacaacgacgactacgacgacatcagcgccgcctag

SEQ ID NO: 76002 - DNA, 1806 bp, synthetic construct
  misc_feature 1..1806: note = Description of Artificial Sequence: Synthetic coding sequence
  source 1..1806: mol_type = other DNA
atgtggctgttcttcggcatcaccggcctgctgaccgccgccctgagcggccaccccagccccgccccccccgaccagctgaacaccagcagcgccgagagcgagctgtgggagcccggcgagagactgcccgtgagactgaccaacggcagcagcagctgcagcggcaccgtggaggtgagactggaggccagctgggagcccgcctgcggcgccctgtgggacagcagagccgccgaggccgtgtgcagagccctgggctgcggcggcgccgaggccgccagccagctggccccccccacccccgagctgccccccccccccgccgccggcaacaccagcgtggccgccaacgccaccctggccggcgcccccgccctgctgtgcagcggcgccgagtggagactgtgcgaggtggtggagcacgcctgcagaagcgacggcagaagagccagagtgacctgcgccgagaacagagccctgagactggtggacggcggcggcgcctgcgccggcagagtggagatgctggagcacggcgagtggggcagcgtgtgcgacgacacctgggacctggaggacgcccacgtggtgtgcagacagctgggctgcggctgggccgtgcaggccctgcccggcctgcacttcacccccggcagaggccccatccacagagaccaggtgaactgcagcggcgccgaggcctacctgtgggactgccccggcctgcccggccagcactactgcggccacaaggaggacgccggcgccgtgtgcagcgagcaccagagctggagactgaccggcggcgccgacagatgcgagggccaggtggaggtgcacttcagaggcgtgtggaacaccgtgtgcgacagcgagtggtaccccagcgaggccaaggtgctgtgccagagcctgggctgcggcaccgccgtggagagacccaagggcctgccccacagcctgagcggcagaatgtactacagctgcaacggcgaggagctgaccctgagcaactgcagctggagattcaacaacagcaacctgtgcagccagagcctggccgccagagtgctgtgcagcgccagcagaagcctgcacaacctgagcacccccgaggtgcccgccagcgtgcagaccgtgaccatcgagagcagcgtgaccgtgaagatcgagaacaaggagagcagagagctgatgctgctgatccccagcatcgtgctgggcatcctgctgctgggcagcctgatcttcatcgccttcatcctgctgagaatcaagggcaagtacgtgttcatgctgcccatccaggtgcaggcccccccccccgaggacagcgacagcggcagcgacagcgactacgagcactacgacttcagcgcccagccccccgtggccctgaccaccttctacaacagccagagacacagagtgaccgacgaggaggtgcagcagagcagattccagatgccccccctggaggagggcctggaggagctgcacgccagccacatccccaccgccaaccccggccactgcatcaccgacccccccagcctgggcccccagtaccaccccagaagcaacagcgagagcagcaccagcagcggcgaggactactgcaacagccccaagagcaagctgcccccctggaacccccaggtgttcagcagcgagagaagcagcttcctggagcagccccccaacctggagctggccggcacccagcccgccttcagcggcagccccagcccccagcccgacagcaccgacaacgacgactacgacgacatcagcgccgcctag

SEQ ID NO: 76003 - DNA, 1779 bp, synthetic construct
  misc_feature 1..1779: note = Description of Artificial Sequence: Synthetic coding sequence
  source 1..1779: mol_type = other DNA
atgtggctgttcttcggcatcaccggcctgctgaccgccgccctgagcggccaccccagccccgccccccccgaccagctgaacaccagcagcgccgagagcgagctgtgggagcccggcgagagactgcccgtgagactgaccaacggcagcagcagctgcagcggcaccgtggaggtgagactggaggccagctgggagcccgcctgcggcgccctgtgggacagcagagccgccgaggccgtgtgcagagccctgggctgcggcggcgccgaggccgccagccagctggccccccccacccccgagctgccccccccccccgccgccggcaacaccagcgtggccgccaacgccaccctggccggcgcccccgccctgctgtgcagcggcgccgagtggagactgtgcgaggtggtggagcacgcctgcagaagcgacggcagaagagccagagtgacctgcgccgagaacagagccctgagactggtggacggcggcggcgcctgcgccggcagagtggagatgctggagcacggcgagtggggcagcgtgtgcgacgacacctgggacctggaggacgcccacgtggtgtgcagacagctgggctgcggctgggccgtgcaggccctgcccggcctgcacttcacccccggcagaggccccatccacagagaccaggtgaactgcagcggcgccgaggcctacctgtgggactgccccggcctgcccggccagcactactgcggccacaaggaggacgccggcgccgtgtgcagcgagcaccagagctggagactgaccggcggcgccgacagatgcgagggccaggtggaggtgcacttcagaggcgtgtggaacaccgtgtgcgacagcgagtggtaccccagcgaggccaaggtgctgtgccagagcctgggctgcggcaccgccgtggagagacccaagggcctgccccacagcctgagcggcagaatgtactacagctgcaacggcgaggagctgaccctgagcaactgcagctggagattcaacaacagcaacctgtgcagccagagcctggccgccagagtgctgtgcagcgccagcagaagcctgcacaacctgagcacccccgaggtgcccgccagcgtgcagaccgtgaccatcgagagcagcgtgaccgtgaagatcgagaacaaggagagcagagagctgatgctgctgatccccagcatcgtgctgggcatcctgctgctgggcagcctgatcttcatcgccttcatcctgctgagaatcaagggcaagtacgccctgcccgtgatggtgaaccaccagcacctgcccaccaccatccccgccggcagcaacagctaccagcccgtgcccatcaccatccccaaggaggacagccagagacacagagtgaccgacgaggaggtgcagcagagcagattccagatgccccccctggaggagggcctggaggagctgcacgccagccacatccccaccgccaaccccggccactgcatcaccgacccccccagcctgggcccccagtaccaccccagaagcaacagcgagagcagcaccagcagcggcgaggactactgcaacagccccaagagcaagctgcccccctggaacccccaggtgttcagcagcgagagaagcagcttcctggagcagccccccaacctggagctggccggcacccagcccgccttcagcggcagccccagcccccagcccgacagcaccgacaacgacgactacgacgacatcagcgccgcctag

SEQ ID NO: 76004 - DNA, 717 bp, synthetic construct
  misc_feature 1..717: note = Description of Artificial Sequence: Synthetic coding sequence
  source 1..717: mol_type = other DNA
atggccgtggagggcggcatgaagtgcgtgaagttcctgctgtacgtgctgctgctggccttctgcgcctgcgccgtgggcctgatcgccgtgggcgtgggcgcccagctggtgctgagccagaccatcatccagggcgccacccccggcagcctgctgcccgtggtgatcatcgccgtgggcgtgttcctgttcctggtggccttcgtgggctgctgcggcgcctgcaaggagaactactgcctgatgatcaccttcgccatcttcctgagcctgatcatgctggtggaggtggccgccgccatcgccggctacgtgttcagagacaaggtgatgagcgagttcaacaacaacttcagacagcagatggagaactaccccaagaacaaccacaccgccagcatcctggacagaatgcaggccgacttcaagtgctgcggcgccgccaactacaccgactgggagaagatccccagcatgagcaagaacagagtgcccgacagctgctgcatcaacgtgaccgtgggctgcggcatcaacttcaacgagaaggccatccacaaggagggctgcgtggagaagatcggcggctggctgagaaagaacgtgctggtggtggccgccgccgccctgggcatcgccttcgtggaggtgctgggcatcgtgttcgcctgctgcctggtgaagagcatcagaagcggctacgaggtgatgtag

SEQ ID NO: 76005 - DNA, 711 bp, synthetic construct
  misc_feature 1..711: note = Description of Artificial Sequence: Synthetic coding sequence
  source 1..711: mol_type = other DNA
atggccgtggagggcggcatgaagtgcgtgaagttcctgctgtacgtgctgctgctggccttctgcgcctgcgccgtgggcctgatcgccgtgggcgtgggcgcccagctggtgctgagccagaccatcatccagggcgccacccccggcagcctgctgcccgtggtgatcatcgccgtgggcgtgttcctgttcctggtggccttcgtgggctgctgcggcgcctgcaaggagaactactgcctgatgatcaccttcgccatcttcctgagcctgatcatgctggtggaggtggccgccgccatcgccggctacgtgttcagagacaaggtgatgagcgagttcaacaacaacttcagacagcagatggagaactaccccaagaacaaccacaccgccagcatcctggacagaatgcaggccgacttcaagtgctgcggcgccgccaactacaccgactgggagaagatccccagcatgagcaagaacagagtgcccgacagctgctgcatcaacgtgaccgtgggctgcggcatcaacttcaacgagaaggccatccacaaggagggctgcgtggagaagatcggcggctggctgagaaagaacgtgctggtggtggccgccgccgccctgggcatcgccttcgtgctgggcatcgtgttcgcctgctgcctggtgaagagcatcagaagcggctacgaggtgatgtag

SEQ ID NO: 76006 - DNA, 402 bp, synthetic construct
  misc_feature 1..402: note = Description of Artificial Sequence: Synthetic coding sequence
  source 1..402: mol_type = other DNA
atggccgtggagggcggcatgaagtgcgtgaagttcctgctgtacgtgctgctgctggccttctgcgcctgcgccgtgggcctgatcgccgtgggcgtgggcgcccagctggtgctgagccagaccatcatccagggcgccacccccggcagcctgctgcccgtggtgatcatcgccgtgggcgtgttcctgttcctggtggccttcgtgggctgctgcggcgcctgcaaggagaactactgcctgatgatcaccttcgccatcttcctgagcctgatcatgctggtggaggtggccgccgccatcgccggctacgtgttcagagacaaggtgatgagcgagttcaacaacaacttcagacagcagatggagaactaccccaagaacaaccacaccgcctag

SEQ ID NO: 76007 - DNA, 717 bp, synthetic construct; identical to SEQ ID NO: 76004
  misc_feature 1..717: note = Description of Artificial Sequence: Synthetic coding sequence
  source 1..717: mol_type = other DNA

SEQ ID NO: 76008 - DNA, 648 bp, synthetic construct
  misc_feature 1..648: note = Description of Artificial Sequence: Synthetic coding sequence
  source 1..648: mol_type = other DNA
atggccgtggagggcggcatgaagtgcgtgaagttcctgctgtacgtgctgctgctggccttctgcgcctgcgccgtgggcctgatcgccgtgggcgtgggcgcccagctggtgctgagccagaccatcatccagggcgccacccccggcagcctgctgcccgtggtgatcatcgccgtgggcgtgttcctgttcctggtggccttcgtgggctgctgcggcgcctgcaaggagaactactgcctgatgatcaccttcgccatcttcctgagcctgatcatgctggtggaggtggccgccgccatcgccggctacgtgttcagagacaaggtgatgagcgagttcaacaacaacttcagacagcagatggagaactaccccaagaacaaccacaccgccagcatcctggacagaatgcaggccgacttcaagtgctgcggcgccgccaactacaccgactgggagaagatccccagcatgagcaagaacagagtgcccgacagctgctgcatcaacgtgaccgtgggctgcggcatcaacttcaacgagaaggccatccacaaggagggctgcgtggagaagatcggcggctggctgagaaagaacgtgctggtggtggccgccgccgccctgggcatcgccttctag

SEQ ID NO: 76009 - DNA, 654 bp, synthetic construct
  misc_feature 1..654: note = Description of Artificial Sequence: Synthetic coding sequence
  source 1..654: mol_type = other DNA
atggccgtggagggcggcatgaagtgcgtgaagttcctgctgtacgtgctgctgctggccttctgcgcctgcgccgtgggcctgatcgccgtgggcgtgggcgcccagctggtgctgagccagaccatcatccagggcgccacccccggcagcctgctgcccgtggtgatcatcgccgtgggcgtgttcctgttcctggtggccttcgtgggctgctgcggcgcctgcaaggagaactactgcctgatgatcaccttcgccatcttcctgagcctgatcatgctggtggaggtggccgccgccatcgccggctacgtgttcagagacaaggtgatgagcgagttcaacaacaacttcagacagcagatggagaactaccccaagaacaaccacaccgccagcatcctggacagaatgcaggccgacttcaagtgctgcggcgccgccaactacaccgactgggagaagatccccagcatgagcaagaacagagtgcccgacagctgctgcatcaacgtgaccgtgggctgcggcatcaacttcaacgagaaggccatccacaaggagggctgcgtggagaagatcggcggctggctgagaaagaacgtgctggtggtggccgccgccgccctgggcatcgccttcgtggagtag

SEQ ID NO: 76010 - DNA, 717 bp, synthetic construct; identical to SEQ ID NO: 76004
  misc_feature 1..717: note = Description of Artificial Sequence: Synthetic coding sequence
  source 1..717: mol_type = other DNA

SEQ ID NO: 76011 - DNA, 648 bp, synthetic construct
  misc_feature 1..648: note = Description of Artificial Sequence: Synthetic coding sequence
  source 1..648: mol_type = other DNA
atggccgtggagggcggcatgaagtgcgtgaagttcctgctgtacgtgctgctgctggccttctgcggcgccacccccggcagcctgctgcccgtggtgatcatcgccgtgggcgtgttcctgttcctggtggccttcgtgggctgctgcggcgcctgcaaggagaactactgcctgatgatcaccttcgccatcttcctgagcctgatcatgctggtggaggtggccgccgccatcgccggctacgtgttcagagacaaggtgatgagcgagttcaacaacaacttcagacagcagatggagaactaccccaagaacaaccacaccgccagcatcctggacagaatgcaggccgacttcaagtgctgcggcgccgccaactacaccgactgggagaagatccccagcatgagcaagaacagagtgcccgacagctgctgcatcaacgtgaccgtgggctgcggcatcaacttcaacgagaaggccatccacaaggagggctgcgtggagaagatcggcggctggctgagaaagaacgtgctggtggtggccgccgccgccctgggcatcgccttcgtggaggtgctgggcatcgtgttcgcctgctgcctggtgaagagcatcagaagcggctacgaggtgatgtag

SEQ ID NO: 76012 - DNA, 471 bp, synthetic construct
  misc_feature 1..471: note = Description of Artificial Sequence: Synthetic coding sequence
  source 1..471: mol_type = other DNA
atgatcaccttcgccatcttcctgagcctgatcatgctggtggaggtggccgccgccatcgccggctacgtgttcagagacaaggtgatgagcgagttcaacaacaacttcagacagcagatggagaactaccccaagaacaaccacaccgccagcatcctggacagaatgcaggccgacttcaagtgctgcggcgccgccaactacaccgactgggagaagatccccagcatgagcaagaacagagtgcccgacagctgctgcatcaacgtgaccgtgggctgcggcatcaacttcaacgagaaggccatccacaaggagggctgcgtggagaagatcggcggctggctgagaaagaacgtgctggtggtggccgccgccgccctgggcatcgccttcgtggaggtgctgggcatcgtgttcgcctgctgcctggtgaagagcatcagaagcggctacgaggtgatgtag

SEQ ID NO: 76013 - DNA, 471 bp, synthetic construct; identical to SEQ ID NO: 76012
  misc_feature 1..471: note = Description of Artificial Sequence: Synthetic coding sequence
  source 1..471: mol_type = other DNA

SEQ ID NO: 76014 - DNA, 1065 bp, synthetic construct
  misc_feature 1..1065: note = Description of Artificial Sequence: Synthetic coding sequence
  source 1..1065: mol_type = other DNA
atgagactggccgtgctgttcagcggcgccctgctgggcctgctggccgcccagggcaccggcaacgactgcccccacaagaagagcgccaccctgctgcccagcttcaccgtgacccccaccgtgaccgagagcaccggcaccaccagccacagaaccaccaagagccacaagaccaccacccacagaaccaccaccaccggcaccaccagccacggccccaccaccgccacccacaaccccaccaccaccagccacggcaacgtgaccgtgcaccccaccagcaacagcaccgccaccagccagggccccagcaccgccacccacagccccgccaccaccagccacggcaacgccaccgtgcaccccaccagcaacagcaccgccaccagccccggcttcaccagcagcgcccaccccgagccccccccccccagccccagccccagccccaccagcaaggagaccatcggcgactacacctggaccaacggcagccagccctgcgtgcacctgcaggcccagatccagatcagagtgatgtacaccacccagggcggcggcgaggcctggggcatcagcgtgctgaaccccaacaagaccaaggtgcagggcagctgcgagggcgcccacccccacctgctgctgagcttcccctacggccacctgagcttcggcttcatgcaggacctgcagcagaaggtggtgtacctgagctacatggccgtggagtacaacgtgagcttcccccacgccgcccagtggaccttcagcgcccagaacgccagcctgagagacctgcaggcccccctgggccagagcttcagctgcagcaacagcagcatcatcctgagccccgccgtgcacctggacctgctgagcctgagactgcaggccgcccagctgccccacaccggcgtgttcggccagagcttcagctgccccagcgacagaagcatcctgctgcccctgatcatcggcctgatcctgctgggcctgctggccctggtgctgatcgccttctgcatcatcagaagaagacccagcgcctaccaggccctgtag

SEQ ID NO: 76015 - DNA, 894 bp, synthetic construct
  misc_feature 1..894: note = Description of Artificial Sequence: Synthetic coding sequence
  source 1..894: mol_type = other DNA
atgagactggccgtgctgttcagcggcgccctgctgggcctgctggccgagagcaccggcaccaccagccacagaaccaccaagagccacaagaccaccacccacagaaccaccaccaccggcaccaccagccacggccccaccaccgccacccacaaccccaccaccaccagccacggcaacgccaccgtgcaccccaccagcaacagcaccgccaccagccccggcttcaccagcagcgcccaccccgagccccccccccccagccccagccccagccccaccagcaaggagaccatcggcgactacacctggaccaacggcagccagccctgcgtgcacctgcaggcccagatccagatcagagtgatgtacaccacccagggcggcggcgaggcctggggcatcagcgtgctgaaccccaacaagaccaaggtgcagggcagctgcgagggcgcccacccccacctgctgctgagcttcccctacggccacctgagcttcggcttcatgcaggacctgcagcagaaggtggtgtacctgagctacatggccgtggagtacaacgtgagcttcccccacgccgcccagtggaccttcagcgcccagaacgccagcctgagagacctgcaggcccccctgggccagagcttcagctgcagcaacagcagcatcatcctgagccccgccgtgcacctggacctgctgagcctgagactgcaggccgcccagctgccccacaccggcgtgttcggccagagcttcagctgccccagcgacagaagcatcctgctgcccctgatcatcggcctgatcctgctgggcctgctggccctggtgctgatcgccttctgcatcatcagaagaagacccagcgcctaccaggccctgtag

SEQ ID NO: 76016 - DNA, 3018 bp, synthetic construct
  misc_feature 1..3018: note = Description of Artificial Sequence: Synthetic coding sequence
  source 1..3018: mol_type = other DNA
atgatgagcgacgccagcgacatgctggccgccgccctggagcagatggacggcatcatcgccggcagcaaggccctggagtacagcaacggcatcttcgactgccagagccccaccagccccttcatgggcagcctgagagccctgcacctggtggaggacctgagaggcctgctggagatgatggagaccgacgagaaggagggcctgagatgccagatccccgacagcaccgccgagaccctggtggagtggctgcagagccagatgaccaacggccacctgcccggcaacggcgacgtgtaccaggagagactggccagactggagaacgacaaggagagcctggtgctgcaggtgagcgtgctgaccgaccaggtggaggcccagggcgagaagatcagagacctggagttctgcctggaggagcacagagagaaggtgaacgccaccgaggagatgctgcagcaggagctgctgagcagaaccagcctggagacccagaagctggacctgatggccgagatcagcaacctgaagctgaagctgaccgccgtggagaaggacagactggactacgaggacaagttcagagacaccgagggcctgatccaggagatcaacgacctgagactgaaggtgagcgagatggacagcgagagactgcagtacgagaagaagctgaagagcaccaaggacgagctggccagcctgaaggagcagctggaggagaaggagagcgaggtgaagagactgcaggagaagctggtgtgcaagatgaagggcgagggcgtggagatcgtggacagagacgagaacttcaagaagaagctgaaggagaagaacatcgaggtgcagaagatgaagaaggccgtggagagcctgatggccgccaacgaggagaaggacagaaagatcgaggacctgagacagtgcctgaacagatacaagaagatgcaggacaccgtggtgctggcccagggcaagaagggcaaggacggcgagtacgaggagctgctgaacagcagcagcatcagcagcctgctggacgcccagggcttcagcgacctggagaagagccccagccccacccccgtgatgggcagccccagctgcgaccccttcaacaccagcgtgcccgaggagttccacaccaccatcctgcaggtgagcatccccagcctgctgcccgccaccgtgagcatggagaccagcgagaagagcaagctgacccccaagcccgagaccagcttcgaggagaacgacggcaacatcatcctgggcgccaccgtggacacccagctgtgcgacaagctgctgaccagcagcctgcagaagagcagcagcctgggcaacctgaagaaggagaccagcgacggcgagaaggagaccatccagaagaccagcgaggacagagcccccgccgagagcagacccttcggcaccctgccccccagaccccccggccaggacaccagcatggacgacaaccccttcggcaccagaaaggtgagaagcagcttcggcagaggcttcttcaagatcaagagcaacaagagaaccgccagcgcccccaacctggacagaaagagaagcgccagcgcccccaccctggccgagaccgagaaggagaccgccgagcacctggacctggccggcgccagcagcagacccaaggacagccagagaaacagccccttccagatccccccccccagccccgacagcaagaagaagagcagaggcatcatgaagctgttcggcaagctgagaagaagccagagcaccaccttcaaccccgacgacatgagcgagcccgagttcaagagaggcggcaccagagccaccgccggccccagactgggctggagcagagacctgggccagagcaacagcgacctggacatgcccttcgccaagtggaccaaggagcaggtgtgcaactggctgatggagcagggcctgggcagctacctgaacagcggcaagcactggatcgccagcggccagaccctgctgcaggccagccagcaggacctggagaaggagctgggcatcaagcacagcctgcacagaaagaagctgcagctggccctgcaggccctgggcagcgaggaggagaccaaccacggcaagctggacttcaactgggtgaccagatggctggacgacatcggcctgccccagtacaagacccagttcgacgagggcagagtggacggcagaatgctgcactacatgaccgtggacgacctgctgagcctgaaggtggtgagcgtgctgcaccacctgagcatcaagagagccatccaggtgctgagaatcaacaacttcgagcccaactgcctgagaagaagacccagcgacgagaacaccatcgcccccagcgaggtgcagaagtggaccaaccacagagtgatggagtggctgagaagcgtggacctggccgagtacgcccccaacctgagaggcagcggcgtgcacggcggcctgatggtgctggagcccagattcaacgtggagaccatggcccagctgctgaacatcccccccaacaagaccctgctgagaagacacctggccacccacttcaacctgctgatcggcgccgaggcccagcaccagaagagagacgccatggagctgcccgactacgtgctgctgaccgccaccgccaaggtgaagcccaagaagctggccttcagcaacttcggcaacctgagaaagaagaagcaggaggacggcgaggagtacgtgtgccccatggagctgggccaggccagcggcagcgccagcaagaagggcttcaagcccggcctggacatgagactgtacgaggaggacgacctggacagactggagcagatggaggacagcgagggcaccgtgagacagatcggcgccttcagcgagggcatcaacaacctgacccacatgctgaaggaggacgacatgttcaaggacttcgccgccagaagccccagcgccagcatcaccgacgaggacagcaacgtgtag

SEQ ID NO: 76017 - DNA, 495 bp, synthetic construct
  misc_feature 1..495: note = Description of Artificial Sequence: Synthetic coding sequence
  source 1..495: mol_type = other DNA
atgagcagcgagaactgcttcgtggccgagaacagcagcctgcaccccgagagcggccaggagaacgacgccaccagcccccacttcagcaccagacacgagggcagcttccaggtgcccgtgctgtgcgccgtgatgaacgtggtgttcatcaccatcctgatcatcgccctgatcgccctgagcgtgggccagtacaactgccccggccagtacaccttcagcatgcccagcgacagccacgtgagcagctgcagcgaggactgggtgggctaccagagaaagtgctacttcatcagcaccgtgaagagaagctggaccagcgcccagaacgcctgcagcgagcacggcgccaccctggccgtgatcgacagcgagaaggacatgaacttcctgaagagatacgccggcagagaggagcactgggtgggcctgaagaaggagcccggccacccctggaagtggagcaacggcaaggagttcaacaactggtag

SEQ ID NO: 76018 - DNA, 723 bp, synthetic construct
  misc_feature 1..723: note = Description of Artificial Sequence: Synthetic coding sequence
  source 1..723: mol_type = other DNA
atggccggcccccccagactgctgctgctgcccctgctgctggccctggccagaggcctgcccggcgccctggccgcccaggaggtgcagcagagcccccactgcaccaccgtgcccgtgggcgccagcgtgaacatcacctgcagcaccagcggcggcctgagaggcatctacctgagacagctgggcccccagccccaggacatcatctactacgaggacggcgtggtgcccaccaccgacagaagattcagaggcagaatcgacttcagcggcagccaggacaacctgaccatcaccatgcacagactgcagctgagcgacaccggcacctacacctgccaggccatcaccgaggtgaacgtgtacggcagcggcaccctggtgctggtgaccgaggagcagagccagggctggcacagatgcagcgacgccccccccagagccagcgccctgcccgccccccccaccggcagcgccctgcccgacccccagaccgccagcgccctgcccgacccccccgccgccagcgccctgcccgccgccctggccgtgatcagcttcctgctgggcctgggcctgggcgtggcctgcgtgctggccagaacccagatcaagaagctgtgcagctggagagacaagaacagcgccgcctgcgtggtgtacgaggacatgagccacagcagatgcaacaccctgagcagccccaaccagtaccagtag

SEQ ID NO: 76019 - DNA, 1080 bp, synthetic construct
  misc_feature 1..1080: note = Description of Artificial Sequence: Synthetic coding sequence
  source 1..1080: mol_type = other DNA
atggccgaggccatcacctacgccgacctgagattcgtgaaggcccccctgaagaagagcatcagcagcagactgggccaggaccccggcgccgacgacgacggcgagatcacctacgagaacgtgcaggtgcccgccgtgctgggcgtgcccagcagcctggccagcagcgtgctgggcgacaaggccgccgtgaagagcgagcagcccaccgccagctggagagccgtgaccagccccgccgtgggcagaatcctgccctgcagaaccacctgcctgagatacctgctgctgggcctgctgctgacctgcctgctgctgggcgtgaccgccatctgcctgggcgtgagatacctgcaggtgagccagcagctgcagcagaccaacagagtgctggaggtgaccaacagcagcctgagacagcagctgagactgaagatcacccagctgggccagagcgccgaggacctgcagggcagcagaagagagctggcccagagccaggaggccctgcaggtggagcagagagcccaccaggccgccgagggccagctgcaggcctgccaggccgacagacagaagaccaaggagaccctgcagagcgaggagcagcagagaagagccctggagcagaagctgagcaacatggagaacagactgaagcccttcttcacctgcggcagcgccgacacctgctgccccagcggctggatcatgcaccagaagagctgcttctacatcagcctgaccagcaagaactggcaggagagccagaagcagtgcgagaccctgagcagcaagctggccaccttcagcgagatctacccccagagccacagctactacttcctgaacagcctgctgcccaacggcggcagcggcaacagctactggaccggcctgagcagcaacaaggactggaagctgaccgacgacacccagagaaccagaacctacgcccagagcagcaagtgcaacaaggtgcacaagacctggagctggtggaccctggagagcgagagctgcagaagcagcctgccctacatctgcgagatgaccgccttcagattccccgactag

SEQ ID NO: 76020 - DNA, 363 bp, synthetic construct
  misc_feature 1..363: note = Description of Artificial Sequence: Synthetic coding sequence
  source 1..363: mol_type = other DNA
atggccgaggccatcacctacgccgacctgagattcgtgaaggcccccctgaagaagagcatcagcagcagactgggccaggaccccggcgccgacgacgacggcgagatcacctacgagaacgtgcaggtgcccgccgtgctgggcgtgcccagcagcctggccagcagcgtgctgggcgacaaggccgccgtgaagagcgagcagcccaccgccagctggagagccgtgaccagccccgccgtgggcagaatcctgccctgcgagtgcgcctgcgccggccagcccagaggccaggtgctggcccccgtgcccgccgccgacggcgccggccccagaggcgtgcagctgctgcccggctag

SEQ ID NO: 76021 - DNA, 360 bp, synthetic construct
  misc_feature 1..360: note = Description of Artificial Sequence: Synthetic coding sequence
  source 1..360: mol_type = other DNA
atggccgaggccatcacctacgccgacctgagattcgtgaaggcccccctgaagaagagcatcagcagcagactgggccaggaccccggcgccgacgacgacggcgagatcacctacgagaacgtgcaggtgcccgccgtgctgggcgtgcccagcagcctggccagcagcgtgctgggcgacaaggccgccgtgaagagcgagcagcccaccgccagctggagagccgtgaccagccccgccgtgggcagaatcctgccctgcagaaccacctgcctgagatacctgctgctgggcctgctgctgacctgcctgctgctgggcgtgaccgccatctgcctgggcgtgagatgcgagtag

SEQ ID NO: 76022 - DNA, 1080 bp, synthetic construct; identical to SEQ ID NO: 76019
  misc_feature 1..1080: note = Description of Artificial Sequence: Synthetic coding sequence
  source 1..1080: mol_type = other DNA

SEQ ID NO: 76023 - DNA, 1080 bp, synthetic construct
  misc_feature 1..1080: note = Description of Artificial Sequence: Synthetic coding sequence
  source 1..1080: mol_type = other DNA
atgcagaccagaaacccccagagccacggcgagaacggcgccagcccctggagctggggcgacagactgggccccggccccgaccccggcgccgacgacgacggcgagatcacctacgagaacgtgcaggtgcccgccgtgctgggcgtgcccagcagcctggccagcagcgtgctgggcgacaaggccgccgtgaagagcgagcagcccaccgccagctggagagccgtgaccagccccgccgtgggcagaatcctgccctgcagaaccacctgcctgagatacctgctgctgggcctgctgctgacctgcctgctgctgggcgtgaccgccatctgcctgggcgtgagatacctgcaggtgagccagcagctgcagcagaccaacagagtgctggaggtgaccaacagcagcctgagacagcagctgagactgaagatcacccagctgggccagagcgccgaggacctgcagggcagcagaagagagctggcccagagccaggaggccctgcaggtggagcagagagcccaccaggccgccgagggccagctgcaggcctgccaggccgacagacagaagaccaaggagaccctgcagagcgaggagcagcagagaagagccctggagcagaagctgagcaacatggagaacagactgaagcccttcttcacctgcggcagcgccgacacctgctgccccagcggctggatcatgcaccagaagagctgcttctacatcagcctgaccagcaagaactggcaggagagccagaagcagtgcgagaccctgagcagcaagctggccaccttcagcgagatctacccccagagccacagctactacttcctgaacagcctgctgcccaacggcggcagcggcaacagctactggaccggcctgagcagcaacaaggactggaagctgaccgacgacacccagagaaccagaacctacgcccagagcagcaagtgcaacaaggtgcacaagacctggagctggtggaccctggagagcgagagctgcagaagcagcctgccctacatctgcgagatgaccgccttcagattccccgactag

SEQ ID NO: 76024 - DNA, 891 bp, synthetic construct
  misc_feature 1..891: note = Description of Artificial Sequence: Synthetic coding sequence
  source 1..891: mol_type = other DNA
atgcacagaagaagaagcagaagctgcagagaggaccagaagcccgtgatggacgaccagagagacctgatcagcaacaacgagcagctgcccatgctgggcagaagacccggcgcccccgagagcaagtgcagcagaggcgccctgtacaccggcttcagcatcctggtgaccctgctgctggccggccaggccaccaccgcctacttcctgtaccagcagcagggcagactggacaagctgaccgtgaccagccagaacctgcagctggagaacctgagaatgaagctgcccaagccccccaagcccgtgagcaagatgagaatggccacccccctgctgatgcaggccctgcccatgggcgccctgccccagggccccatgcagaacgccaccaagtacggcaacatgaccgaggaccacgtgatgcacctgctgcagaacgccgaccccctgaaggtgtacccccccctgaagggcagcttccccgagaacctgagacacctgaagaacaccatggagaccatcgactggaaggtgttcgagagctggatgcaccactggctgctgttcgagatgagcagacacagcctggagcagaagcccaccgacgccccccccaaggtgctgaccaagtgccaggaggaggtgagccacatccccgccgtgcaccccggcagcttcagacccaagtgcgacgagaacggcaactacctgcccctgcagtgctacggcagcatcggctactgctggtgcgtgttccccaacggcaccgaggtgcccaacaccagaagcagaggccaccacaactgcagcgagagcctggagctggaggaccccagcagcggcctgggcgtgaccaagcaggacctgggccccgtgcccatgtag

SEQ ID NO: 76025 - DNA, 699 bp, synthetic construct
  misc_feature 1..699: note = Description of Artificial Sequence: Synthetic coding sequence
  source 1..699: mol_type = other DNA
atgcacagaagaagaagcagaagctgcagagaggaccagaagcccgtgatggacgaccagagagacctgatcagcaacaacgagcagctgcccatgctgggcagaagacccggcgcccccgagagcaagtgcagcagaggcgccctgtacaccggcttcagcatcctggtgaccctgctgctggccggccaggccaccaccgcctacttcctgtaccagcagcagggcagactggacaagctgaccgtgaccagccagaacctgcagctggagaacctgagaatgaagctgcccaagccccccaagcccgtgagcaagatgagaatggccacccccctgctgatgcaggccctgcccatgggcgccctgccccagggccccatgcagaacgccaccaagtacggcaacatgaccgaggaccacgtgatgcacctgctgcagaacgccgaccccctgaaggtgtacccccccctgaagggcagcttccccgagaacctgagacacctgaagaacaccatggagaccatcgactggaaggtgttcgagagctggatgcaccactggctgctgttcgagatgagcagacacagcctggagcagaagcccaccgacgccccccccaaggagagcctggagctggaggaccccagcagcggcctgggcgtgaccaagcaggacctgggccccgtgcccatgtag

SEQ ID NO: 76026 - DNA, 483 bp, synthetic construct
  misc_feature 1..483: note = Description of Artificial Sequence: Synthetic coding sequence
  source 1..483: mol_type = other DNA
atgcacagaagaagaagcagaagctgcagagaggaccagaagcccgtgatggacgaccagagagacctgatcagcaacaacgagcagctgcccatgctgggcagaagacccggcgcccccgagagcaagtgcagcagaggcgccctgtacaccggcttcagcatcctggtgaccctgctgctggccggccaggccaccaccgcctacttcctgtaccagcagcagggcagactggacaagctgaccgtgaccagccagaacctgcagctggagaacctgagaatgaagctgcccaagccccccaagcccgtgagcaagatgagaatggccacccccctgctgatgcaggccctgcccatgggcgccctgccccagggccccatgcagaacgccaccaagtacggcaacatgaccgaggaccacgtgatgcacctgctgcagagccactggaactggagaaccagactgctgggctgggtgtag

SEQ ID NO: 76027 - DNA, 951 bp, synthetic construct
  misc_feature 1..951: note = Description of Artificial Sequence: Synthetic coding sequence
  source 1..951: mol_type = other DNA
tgaagaagctgcagagaggaccagaagcccgtgatggacgaccagagagacctgatcagcaacaacgagcagctgcccatgctgggcagaagacccggcgcccccgagagcaagtgcagcagaggcgccctgtacaccggcttcagcatcctggtgaccctgctgctggccggccaggccaccaccgcctacttcctgtaccagcagcagggcagactggacaagctgaccgtgaccagccagaacctgcagctggagaacctgagaatgaagctgcccaagccccccaagcccgtgagcaagatgagaatggccacccccctgctgatgcaggccctgcccatgggcgccctgccccagggccccatgcagaacgccaccaagtacggcaacatgaccgaggaccacgtgatgcacctgctgcagaacgccgaccccctgaaggtgtacccccccctgaagggcagcttccccgagaacctgagacacctgaagaacaccatggagaccatcgactggaaggtgttcgagagctggatgcaccactggctgctgttcgagatgagcagacacagcctggagcagaagcccaccgacgccccccccaaggtgctgaccaagtgccaggaggaggtgagccacatccccgccgtgcaccccggcagcttcagacccaagtgcgacgagaacggcaactacctgcccctgcagtgctacggcagcatcggctactgctggtgcgtgttccccaacggcaccgaggtgcccaacaccagaagcagaggccaccacaactgcagcgagagcctggagctggaggaccccagcagcggcctgggcgtgaccaagcaggacctgggccccggcaagggcctggccgagggccacctggtgaccagcagcagcagccccgccggccccgcccccctgtgggccggcgagggcgtgtag

SEQ ID NO: 76028 - DNA, 369 bp, synthetic construct
  misc_feature 1..369: note = Description of Artificial Sequence: Synthetic coding sequence
  source 1..369: mol_type = other DNA
atgcacagaagaagaagcagaagctgcagagaggaccagaagcccgtgatggacgaccagagagacctgatcagcaacaacgagcagctgcccatgctgggcagaagacccggcgcccccgagagcaagtgcagcagaggcgccctgtacaccggcttcagcatcctggtgaccctgctgctggccggccaggccaccaccgcctacttcctgtaccagcagcagggcagactggacaagctgaccgtgaccagccagaacctgcagctggagaacctgagaatgaagctgcccaagccccacgccgagtgccaccaggtgtggcagcacgacagaggcccctgcgacgcccccgcccccgagtgctag

SEQ ID NO: 76029 - DNA, 459 bp, synthetic construct
  misc_feature 1..459: note = Description of Artificial Sequence: Synthetic coding sequence
  source 1..459: mol_type = other DNA
atgcacagaagaagaagcagaagctgcagagaggaccagaagcccgtgatggacgaccagagagacctgatcagcaacaacgagcagctgcccatgctgggcagaagacccggcgcccccgagagcaagtgcagcagaggcgccctgtacaccggcttcagcatcctggtgaccctgctgctggccggccaggccaccaccgcctacttcctgtaccagcagcagggcagactggacaagctgaccgtgaccagccagaacctgcagctggagaacctgagaatgaagctgcccaagccccccaagcccgtgagcaagatgagaatggccacccccctgctgatgcaggccctgcccatgggcgccctgccccagggccccatgcagaacgccaccaagtacggcaacatgaccgaggaccacgtgatgcacctgctgcaggaggtggccaagagctag

SEQ ID NO: 76030 - DNA, 690 bp, synthetic construct
  misc_feature 1..690: note = Description of Artificial Sequence: Synthetic coding sequence
  source 1..690: mol_type = other DNA
atggccagactggccctgagccccgtgcccagccactggatggtggccctgctgctgctgctgagcgccgagcccgtgcccgccgccagaagcgaggacagatacagaaaccccaagggcagcgcctgcagcagaatctggcagagccccagattcatcgccagaaagagaggcttcaccgtgaagatgcactgctacatgaacagcgccagcggcaacgtgagctggctgtggaagcaggagatggacgagaacccccagcagctgaagctggagaagggcagaatggaggagagccagaacgagagcctggccaccctgaccatccagggcatcagattcgaggacaacggcatctacttctgccagcagaagtgcaacaacaccagcgaggtgtaccagggctgcggcaccgagctgagagtgatgggcttcagcaccctggcccagctgaagcagagaaacaccctgaaggacggcatcatcatgatccagaccctgctgatcatcctgttcatcatcgtgcccatcttcctgctgctggacaaggacgacagcaaggccggcatggaggaggaccacacctacgagggcctggacatcgaccagaccgccacctacgaggacatcgtgaccctgagaaccggcgaggtgaagtggagcgtgggcgagcaccccggccaggagtag

SEQ ID NO: 76031 - DNA, 378 bp, synthetic construct
  misc_feature 1..378: note = Description of Artificial Sequence: Synthetic coding sequence
  source 1..378: mol_type = other DNA
atggccagactggccctgagccccgtgcccagccactggatggtggccctgctgctgctgctgagcgccgagcccgtgcccgccgccagaagcgaggacagatacagaaaccccaagggcttcagcaccctggcccagctgaagcagagaaacaccctgaaggacggcatcatcatgatccagaccctgctgatcatcctgttcatcatcgtgcccatcttcctgctgctggacaaggacgacagcaaggccggcatggaggaggaccacacctacgagggcctggacatcgaccagaccgccacctacgaggacatcgtgaccctgagaaccggcgaggtgaagtggagcgtgggcgagcaccccggccaggagtag

SEQ ID NO: 76032 - DNA, 693 bp, synthetic construct
  misc_feature 1..693: note = Description of Artificial Sequence: Synthetic coding sequence
  source 1..693: mol_type = other DNA
atggccagactggccctgagccccgtgcccagccactggatggtggccctgctgctgctgctgagcgccgccgagcccgtgcccgccgccagaagcgaggacagatacagaaaccccaagggcagcgcctgcagcagaatctggcagagccccagattcatcgccagaaagagaggcttcaccgtgaagatgcactgctacatgaacagcgccagcggcaacgtgagctggctgtggaagcaggagatggacgagaacccccagcagctgaagctggagaagggcagaatggaggagagccagaacgagagcctggccaccctgaccatccagggcatcagattcgaggacaacggcatctacttctgccagcagaagtgcaacaacaccagcgaggtgtaccagggctgcggcaccgagctgagagtgatgggcttcagcaccctggcccagctgaagcagagaaacaccctgaaggacggcatcatcatgatccagaccctgctgatcatcctgttcatcatcgtgcccatcttcctgctgctggacaaggacgacagcaaggccggcatggaggaggaccacacctacgagggcctggacatcgaccagaccgccacctacgaggacatcgtgaccctgagaaccggcgaggtgaagtggagcgtgggcgagcaccccggccaggagtag

SEQ ID NO: 76033 - DNA, 711 bp, synthetic construct
  misc_feature 1..711: note = Description of Artificial Sequence: Synthetic coding sequence
  source 1..711: mol_type = other DNA
atgggcgtggagggctgcaccaagtgcatcaagtacctgctgttcgtgttcaacttcgtgttctggctggccggcggcgtgatcctgggcgtggccctgtggctgagacacgacccccagaccaccaacctgctgtacctggagctgggcgacaagcccgcccccaacaccttctacgtgggcatctacatcctgatcgccgtgggcgccgtgatgatgttcgtgggcttcctgggctgctacggcgccatccaggagagccagtgcctgctgggcaccttcttcacctgcctggtgatcctgttcgcctgcgaggtggccgccggcatctggggcttcgtgaacaaggaccagatcgccaaggacgtgaagcagttctacgaccaggccctgcagcaggccgtggtggacgacgacgccaacaacgccaaggccgtggtgaagaccttccacgagaccctggactgctgcggcagcagcaccctgaccgccctgaccaccagcgtgctgaagaacaacctgtgccccagcggcagcaacatcatcagcaacctgttcaaggaggactgccaccagaagatcgacgacctgttcagcggcaagctgtacctgatcggcatcgccgccatcgtggtggccgtgatcatgatcttcgagatgatcctgagcatggtgctgtgctgcggcatcagaaacagcagcgtgtactag

SEQ ID NO: 76034 - DNA, 618 bp, synthetic construct
  misc_feature 1..618: note = Description of Artificial Sequence: Synthetic coding sequence
  source 1..618: mol_type = other DNA
atgagcagaggcctgcagctgctgctgctgagctgcgcctacagcctggcccccgccacccccgaggtgaaggtggcctgcagcgaggacgtggacctgccctgcaccgccccctgggacccccaggtgccctacaccgtgagctgggtgaagctgctggagggcggcgaggagagaatggagaccccccaggaggaccacctgagaggccagcactaccaccagaagggccagaacggcagcttcgacgcccccaacgagagaccctacagcctgaagatcagaaacaccaccagctgcaacagcggcacctacagatgcaccctgcaggaccccgacggccagagaaacctgagcggcaaggtgatcctgagagtgaccggctgccccgcccagagaaaggaggagaccttcaagaagtacagagccgagatcgtgctgctgctggccctggtgatcttctacctgaccctgatcatcttcacctgcaagttcgccagactgcagagcatcttccccgacttcagcaaggccggcatggagagagccttcctgcccgtgaccagccccaacaagcacctgggcctggtgaccccccacaagaccgagctggtgtag

SEQ ID NO: 76035 - DNA, 351 bp, synthetic construct
  misc_feature 1..351: note = Description of Artificial Sequence: Synthetic coding sequence
  source 1..351: mol_type = other DNA
atggacccccagtgcaccatgggcctgagcaacatcctgttcgtgatggccttcctgctgagcgagctggaggacccccagcccccccccgaccacatcccctggatcaccgccgtgctgcccaccgtgatcatctgcgtgatggtgttctgcctgatcctgtggaagtggaagaagaagaagagacccagaaacagctacaagtgcggcaccaacaccatggagagagaggagagcgagcagaccaagaagagagagaagatccacatccccgagagaagcgacgaggcccagagagtgttcaagagcagcaagaccagcagctgcgacaagagcgacacctgcttctag

SEQ ID NO: 76036 - DNA, 990 bp, synthetic construct
  misc_feature 1..990: note = Description of Artificial Sequence: Synthetic coding sequence
  source 1..990: mol_type = other DNA
atggacccccagtgcaccatgggcctgagcaacatcctgttcgtgatggccttcctgctgagcggcgccgcccccctgaagatccaggcctacttcaacgagaccgccgacctgccctgccagttcgccaacagccagaaccagagcctgagcgagctggtggtgttctggcaggaccaggagaacctggtgctgaacgaggtgtacctgggcaaggagaagttcgacagcgtgcacagcaagtacatgggcagaaccagcttcgacagcgacagctggaccctgagactgcacaacctgcagatcaaggacaagggcctgtaccagtgcatcatccaccacaagaagcccaccggcatgatcagaatccaccagatgaacagcgagctgagcgtgctggccaacttcagccagcccgagatcgtgcccatcagcaacatcaccgagaacgtgtacatcaacctgacctgcagcagcatccacggctaccccgagcccaagaagatgagcgtgctgctgagaaccaagaacagcaccatcgagtacgacggcgtgatgcagaagagccaggacaacgtgaccgagctgtacgacgtgagcatcagcctgagcgtgagcttccccgacgtgaccagcaacatgaccatcttctgcatcctggagaccgacaagaccagactgctgagcagccccttcagcatcgagctggaggacccccagcccccccccgaccacatcccctggatcaccgccgtgctgcccaccgtgatcatctgcgtgatggtgttctgcctgatcctgtggaagtggaagaagaagaagagacccagaaacagctacaagtgcggcaccaacaccatggagagagaggagagcgagcagaccaagaagagagagaagatccacatccccgagagaagcgacgaggcccagagagtgttcaagagcagcaagaccagcagctgcgacaagagcgacacctgcttctag

SEQ ID NO: 76037 - DNA, 972 bp, synthetic construct
  misc_feature 1..972: note = Description of Artificial Sequence: Synthetic coding sequence
  source 1..972: mol_type = other DNA
atgggcctgagcaacatcctgttcgtgatggccttcctgctgagcggcgccgcccccctgaagatccaggcctacttcaacgagaccgccgacctgccctgccagttcgccaacagccagaaccagagcctgagcgagctggtggtgttctggcaggaccaggagaacctggtgctgaacgaggtgtacctgggcaaggagaagttcgacagcgtgcacagcaagtacatgggcagaaccagcttcgacagcgacagctggaccctgagactgcacaacctgcagatcaaggacaagggcctgtaccagtgcatcatccaccacaagaagcccaccggcatgatcagaatccaccagatgaacagcgagctgagcgtgctggccaacttcagccagcccgagatcgtgcccatcagcaacatcaccgagaacgtgtacatcaacctgacctgcagcagcatccacggctaccccgagcccaagaagatgagcgtgctgctgagaaccaagaacagcaccatcgagtacgacggcgtgatgcagaagagccaggacaacgtgaccgagctgtacgacgtgagcatcagcctgagcgtgagcttccccgacgtgaccagcaacatgaccatcttctgcatcctggagaccgacaagaccagactgctgagcagccccttcagcatcgagctggaggacccccagcccccccccgaccacatcccctggatcaccgccgtgctgcccaccgtgatcatctgcgtgatggtgttctgcctgatcctgtggaagtggaagaagaagaagagacccagaaacagctacaagtgcggcaccaacaccatggagagagaggagagcgagcagaccaagaagagagagaagatccacatccccgagagaagcgacgaggcccagagagtgttcaagagcagcaagaccagcagctgcgacaagagcgacacctgcttctag

SEQ ID NO: 76038 - DNA, 504 bp, synthetic construct
  misc_feature 1..504: note = Description of Artificial Sequence: Synthetic coding sequence
  source 1..504: mol_type = other DNA
atgggcctgagcaacatcctgttcgtgatggccttcctgctgagcggcgccgcccccctgaagatccaggcctacttcaacgagaccgccgacctgccctgccagttcgccaacagccagaaccagagcctgagcgagctggtggtgttctggcaggaccaggagaacctggtgctgaacgaggtgtacctgggcaaggagaagttcgacagcgtgcacagcaagtacatgggcagaaccagcttcgacagcgacagctggaccctgagactgcacaacctgcagatcaaggacaagggcctgtaccagtgcatcatccaccacaagaagcccaccggcatgatcagaatccaccagatgaacagcgagctgagcgtgctggccaacttcagccagcccgagatcgtgcccatcagcaacatcaccgagaacgtgtacatcaacctgacctgcagcagcatccacggctaccccgagcccaagaagatgagcgtgctgctgtag

SEQ ID NO: 76039 - DNA, 744 bp, synthetic construct
  misc_feature 1..744: note = Description of Artificial Sequence: Synthetic coding sequence
  source 1..744: mol_type = other DNA
atgggcagaaccagcttcgacagcgacagctggaccctgagactgcacaacctgcagatcaaggacaagggcctgtaccagtgcatcatccaccacaagaagcccaccggcatgatcagaatccaccagatgaacagcgagctgagcgtgctggccaacttcagccagcccgagatcgtgcccatcagcaacatcaccgagaacgtgtacatcaacctgacctgcagcagcatccacggctaccccgagcccaagaagatgagcgtgctgctgagaaccaagaacagcaccatcgagtacgacggcgtgatgcagaagagccaggacaacgtgaccgagctgtacgacgtgagcatcagcctgagcgtgagcttccccgacgtgaccagcaacatgaccatcttctgcatcctggagaccgacaagaccagactgctgagcagccccttcagcatcgagctggaggacccccagcccccccccgaccacatcccctggatcaccgccgtgctgcccaccgtgatcatctgcgtgatggtgttctgcctgatcctgtggaagtggaagaagaagaagagacccagaaacagctacaagtgcggcaccaacaccatggagagagaggagagcgagcagaccaagaagagagagaagatccacatccccgagagaagcgacgaggcccagagagtgttcaagagcagcaagaccagcagctgcgacaagagcgacacctgcttctag

SEQ ID NO: 76040 - DNA, 654 bp, synthetic construct
  misc_feature 1..654: note = Description of Artificial Sequence: Synthetic coding sequence
  source 1..654: mol_type = other DNA
atggacccccagtgcaccatgggcctgagcaacatcctgttcgtgatggccttcctgctgagcgccaacttcagccagcccgagatcgtgcccatcagcaacatcaccgagaacgtgtacatcaacctgacctgcagcagcatccacggctaccccgagcccaagaagatgagcgtgctgctgagaaccaagaacagcaccatcgagtacgacggcgtgatgcagaagagccaggacaacgtgaccgagctgtacgacgtgagcatcagcctgagcgtgagcttccccgacgtgaccagcaacatgaccatcttctgcatcctggagaccgacaagaccagactgctgagcagccccttcagcatcgagctggaggacccccagcccccccccgaccacatcccctggatcaccgccgtgctgcccaccgtgatcatctgcgtgatggtgttctgcctgatcctgtggaagtggaagaagaagaagagacccagaaacagctacaagtgcggcaccaacaccatggagagagaggagagcgagcagaccaagaagagagagaagatccacatccccgagagaagcgacgaggcccagagagtgttcaagagcagcaagaccagcagctgcgacaagagcgacacctgcttctag

SEQ ID NO: 76041 - DNA, 732 bp, synthetic construct
  misc_feature 1..732: note = Description of Artificial Sequence: Synthetic coding sequence
  source 1..732: mol_type = other DNA
atgagacccagactgtggctgctgctggccgcccagctgaccgtgctgcacggcaacagcgtgctgcagcagacccccgcctacatcaaggtgcagaccaacaagatggtgatgctgagctgcgaggccaagatcagcctgagcaacatgagaatctactggctgagacagagacaggcccccagcagcgacagccaccacgagttcctggccctgtgggacagcgccaagggcaccatccacggcgaggaggtggagcaggagaagatcgccgtgttcagagacgccagcagattcatcctgaacctgaccagcgtgaagcccgaggacagcggcatctacttctgcatgatcgtgggcagccccgagctgaccttcggcaagggcacccagctgagcgtggtggacttcctgcccaccaccgcccagcccaccaagaagagcaccctgaagaagagagtgtgcagactgcccagacccgagacccagaagggccccctgtgcagccccatcaccctgggcctgctggtggccggcgtgctggtgctgctggtgagcctgggcgtggccatccacctgtgctgcagaagaagaagagccagactgagattcatgaagcagccccagggcgagggcatcagcggcaccttcgtgccccagtgcctgcacggctactacagcaacaccaccaccagccagaagctgctgaacccctggatcctgaagacctag

SEQ ID NO: 76042 - DNA, 642 bp, synthetic construct
  misc_feature 1..642: note = Description of Artificial Sequence: Synthetic coding sequence
  source 1..642: mol_type = other DNA
atgagacccagactgtggctgctgctggccgcccagctgaccgtgctgcacggcaacagcgtgctgcagcagacccccgcctacatcaaggtgcagaccaacaagatggtgatgctgagctgcgaggccaagatcagcctgagcaacatgagaatctactggctgagacagagacaggcccccagcagcgacagccaccacgagttcctggccctgtgggacagcgccaagggcaccatccacggcgaggaggtggagcaggagaagatcgccgtgttcagagacgccagcagattcatcctgaacctgaccagcgtgaagcccgaggacagcggcatctacttctgcatgatcgtgggcagccccgagctgaccttcggcaagggcacccagctgagcgtggtggacttcctgcccaccaccgcccagcccaccaagaagagcaccctgaagaagagagtgtgcagactgcccagacccgagacccagaagggcagaagaagaagagccagactgagattcatgaagcagccccagggcgagggcatcagcggcaccttcgtgccccagtgcctgcacggctactacagcaacaccaccaccagccagaagctgctgaacccctggatcctgaagacctag

SEQ ID NO: 76043 - DNA, 633 bp, synthetic construct
  misc_feature 1..633: note = Description of Artificial Sequence: Synthetic coding sequence
  source 1..633: mol_type = other DNA
atgagacccagactgtggctgctgctggccgcccagctgaccgtgctgcacggcaacagcgtgctgcagcagacccccgcctacatcaaggtgcagaccaacaagatggtgatgctgagctgcgaggccaagatcagcctgagcaacatgagaatctactggctgagacagagacaggcccccagcagcgacagccaccacgagttcctggccctgtgggacagcgccaagggcaccatccacggcgaggaggtggagcaggagaagatcgccgtgttcagagacgccagcagattcatcctgaacctgaccagcgtgaagcccgaggacagcggcatctacttctgcatgatcgtgggcagccccgagctgaccttcggcaagggcacccagctgagcgtggtggacttcctgcccaccaccgcccagcccaccaagaagagcaccctgaagaagagagtgtgcagactgcccagacccgagacccagaagggccccctgtgcagccccatcaccctgggcctgctggtggccggcgtgctggtgctgctggtgagcctgggcgtggccatccacctgtgctgcagaagaagaagagccagactgagattcatgaagcagttctacaagtag

SEQ ID NO: 76044 - DNA, 666 bp, synthetic construct
  misc_feature 1..666: note = Description of Artificial Sequence: Synthetic coding sequence
  source 1..666: mol_type = other DNA
atgagacccagactgtggctgctgctggccgcccagctgaccgtgctgcacggcaacagcgtgctgcagcagacccccgcctacatcaaggtgcagaccaacaagatggtgatgctgagctgcgaggccaagatcagcctgagcaacatgagaatctactggctgagacagagacaggcccccagcagcgacagccaccacgagttcctggccctgtgggacagcgccaagggcaccatccacggcgaggaggtggagcaggagaagatcgccgtgttcagagacgccagcagattcatcctgaacctgaccagcgtgaagcccgaggacagcggcatctacttctgcatgatcgtgggcagccccgagctgaccttcggcaagggcacccagctgagcgtggtggacttcctgcccaccaccgcccagcccaccaagaagagcaccctgaagaagagagtgtgcagactgcccagacccgagacccagaagggccccctgtgcagccccatcaccctgggcctgctggtggccggcgtgctggtgctgctggtgagcctgggcgtggccatccacctgtgctgcagaagaagaagagccagactgagattcatgaagcagctgagactgcaccccctggagaagtgcagcagaatggactactag

SEQ ID NO: 76045 - DNA, 597 bp, synthetic construct
  misc_feature 1..597: note = Description of Artificial Sequence: Synthetic coding sequence
  source 1..597: mol_type = other DNA
atgagacccagactgtggctgctgctggccgcccagctgaccgtgctgcacggcaacagcgtgctgcagcagacccccgcctacatcaaggtgcagaccaacaagatggtgatgctgagctgcgaggccaagatcagcctgagcaacatgagaatctactggctgagacagagacaggcccccagcagcgacagccaccacgagttcctggccctgtgggacagcgccaagggcaccatccacggcgaggaggtggagcaggagaagatcgccgtgttcagagacgccagcagattcatcctgaacctgaccagcgtgaagcccgaggacagcggcatctacttctgcatgatcgtgggcagccccgagctgaccttcggcaagggcacccagctgagcgtggtggacttcctgcccaccaccgcccagcccaccaagaagagcaccctgaagaagagagtgtgcagactgcccagacccgagacccagaagggcctgaagggcaaggtgtaccaggagcccctgagccccaacgcctgcatggacaccaccgccatcctgcagccccacagaagctgcctgacccacggcagctag

SEQ ID NO: 76046 - DNA, 93 bp, synthetic construct
  misc_feature 1..93: note = Description of Artificial Sequence: Synthetic coding sequence
  source 1..93: mol_type = other DNA
atgagacccagactgtggctgctgctggccgcccagctgaccggcagaagaagaagagccagactgagattcatgaagcagctgtacaagtag

SEQ ID NO: 76047 - DNA, 624 bp, synthetic construct
  misc_feature 1..624: note = Description of Artificial Sequence: Synthetic coding sequence
  source 1..624: mol_type = other DNA
atgagacccagactgtggctgctgctggccgcccagctgaccgtgctgcacggcaacagcgtgctgcagcagacccccgcctacatcaaggtgcagaccaacaagatggtgatgctgagctgcgaggccaagatcagcctgagcaacatgagaatctactggctgagacagagacaggcccccagcagcgacagccaccacgagttcctggccctgtgggacagcgccaagggcaccatccacggcgaggaggtggagcaggagaagatcgccgtgttcagagacgccagcagattcatcctgaacctgaccagcgtgaagcccgaggacagcggcatctacttctgcatgatcgtgggcagccccgagctgaccttcggcaagggcacccagctgagcgtggtggacttcctgcccaccaccgcccagcccaccaagaagagcaccctgaagaagagagtgtgcagactgcccagacccgagacccagaagggccccctgtgcagccccatcaccctgggcctgctggtggccggcgtgctggtgctgctggtgagcctgggcgtggccatccacctgtgctgcagaagaagaagagccagactgagattcatgaagcagtag

SEQ ID NO: 76048 - DNA, 153 bp, synthetic construct
  misc_feature 1..153: note = Description of Artificial Sequence: Synthetic coding sequence
  source 1..153: mol_type = other DNA
gagagaggcagagagagaagagtgaagctgagattcagcgccagaccccagggcgagggcatcagcggcaccttcgtgccccagtgcctgcacggctactacagcaacaccaccaccagccagaagctgctgaacccctggatcctgaagtag

SEQ ID NO: 76049 - DNA, 687 bp, synthetic construct
  misc_feature 1..687: note = Description of Artificial Sequence: Synthetic coding sequence
  source 1..687: mol_type = other DNA
atgcccgtgaagggcggcaccaagtgcatcaagtacctgctgttcggcttcaacttcatcttctggctggccggcatcgccgtgctggccatcggcctgtggctgagattcgacagccagaccaagagcatcttcgagcaggagaccaacaacaacaacagcagcttctacaccggcgtgtacatcctgatcggcgccggcgccctgatgatgctggtgggcttcctgggctgctgcggcgccgtgcaggagagccagtgcatgctgggcctgttcttcggcttcctgctggtgatcttcgccatcgagatcgccgccgccatctggggctacagccacaaggacgaggtgatcaaggaggtgcaggagttctacaaggacacctacaacaagctgaagaccaaggacgagccccagagagagaccctgaaggccatccactacgccctgaactgctgcggcctggccggcggcgtggagcagttcatcagcgacatctgccccaagaaggacgtgctggagaccttcaccgtgaagagctgccccgacgccatcaaggaggtgttcgacaacaagttccacatcatcggcgccgtgggcatcggcatcgccgtggtgatgatcttcggcatgatcttcagcatgatcctgtgctgcgccatcagaagaaacagagagatggtgtag

SEQ ID NO: 76050 - DNA, 480 bp, synthetic construct
  misc_feature 1..480: note = Description of Artificial Sequence: Synthetic coding sequence
  source 1..480: mol_type = other DNA
atgatgctggtgggcttcctgggctgctgcggcgccgtgcaggagagccagtgcatgctgggcctgttcttcggcttcctgctggtgatcttcgccatcgagatcgccgccgccatctggggctacagccacaaggacgaggtgatcaaggaggtgcaggagttctacaaggacacctacaacaagctgaagaccaaggacgagccccagagagagaccctgaaggccatccactacgccctgaactgctgcggcctggccggcggcgtggagcagttcatcagcgacatctgccccaagaaggacgtgctggagaccttcaccgtgaagagctgccccgacgccatcaaggaggtgttcgacaacaagttccacatcatcggcgccgtgggcatcggcatcgccgtggtgatgatcttcggcatgatcttcagcatgatcctgtgctgcgccatcagaagaaacagagagatggtgtag

SEQ ID NO: 76051 - DNA, 687 bp, synthetic construct; identical to SEQ ID NO: 76049
  misc_feature 1..687: note = Description of Artificial Sequence: Synthetic coding sequence
  source 1..687: mol_type = other DNA

SEQ ID NO: 76052 - DNA, 687 bp, synthetic construct
  misc_feature 1..687: note = Description of Artificial Sequence: Synthetic coding sequence
  source 1..687: mol_type = other DNA
atgcccgtgaagggcggcaccaagtgcatcaagtacctgctgttcggcttcaacttcatcttctggctggccggcatcgccgtgctggccatcggcctgtggctgagattcgacagccagaccaagagcatcttcgagcaggagaccaacaacaacaacagcagcttctacaccggcgtgtacatcctgatcggcgccggcgccctgatgatgctggtgggcttcctgggctgctgcggcgccgtgcaggagagccagtgcatgctgggcctggccaccaagagaaccatgttcccccccttcctggaggaccacgtgtgcttcttcagcctgaacccccagttcttcggcttcctgctggtgatcttcgccatcgagatcgccgccgccatctggggctacagccacaaggacgaggtgatcaaggaggtgcaggagttctacaaggacacctacaacaagctgaagaccaaggacgagccccagagagagaccctgaaggccatccactacgccctgaactgctgcggcctggccggcggcgtggagcagttcatcagcgacatctgccccaagaaggacgtgctggagaccttcaccgtgaagagctgccccgacgccatcaaggaggtgttcgacaacaagttccacatcatcggcgccgtgggcatcggcatcgccgtgtag

SEQ ID NO: 76053 - DNA, 546 bp, synthetic construct
  misc_feature 1..546: note = Description of Artificial Sequence: Synthetic coding sequence
  source 1..546: mol_type = other DNA
atgcccgtgaagggcggcaccaagtgcatcaagtacctgctgttcggcttcaacttcatcttctggctggccggcatcgccgtgctggccatcggcctgtggctgagattcgacagccagaccaagagcatcttcgagcaggagaccaacaacaacaacagcagcttctacaccggcgtgtacatcctgatcggcgccggcgccctgatgatgctggtgggcttcctgggctgctgcggcgccgtgcaggagagccagtgcatgctgggcctgttcttcggcttcctgctggtgatcttcgccatcgagatcgccgccgccatctggggctacagccacaaggacgaggtgatcaaggaggtgcaggagttctacaaggacacctacaacaagctgaagaccaaggacgagccccagagagagaccctgaaggccatccactacgccctgaacctgtggttcggctggggcagaggcaccgtgtacctgagacacctgccccaggagggcagaaccagaaacctgcacagagaggtgctgagctag

SEQ ID NO: 76054 - DNA, 426 bp, synthetic construct
  misc_feature 1..426: note = Description of Artificial Sequence: Synthetic coding sequence
  source 1..426: mol_type = other DNA
atgctgggcctgttcttcggcttcctgctggtgatcttcgccatcgagatcgccgccgccatctggggctacagccacaaggacgaggtgatcaaggaggtgcaggagttctacaaggacacctacaacaagctgaagaccaaggacgagccccagagagagaccctgaaggccatccactacgccctgaactgctgcggcctggccggcggcgtggagcagttcatcagcgacatctgccccaagaaggacgtgctggagaccttcaccgtgaagagctgccccgacgccatcaaggaggtgttcgacaacaagttccacatcatcggcgccgtgggcatcggcatcgccgtggtgatgatcttcggcatgatcttcagcatgatcctgtgctgcgccatcagaagaaacagagagatggtgtag

SEQ ID NO: 76055 - DNA, 1758 bp, synthetic construct
  misc_feature 1..1758: note = Description of Artificial Sequence: Synthetic coding sequence
  source 1..1758: mol_type = other DNA
atggagaagaagtggaagtactgcgccgtgtactacatcatccagatccacttcgtgaagggcgtgtgggagaagaccgtgaacaccgaggagaacgtgtacgccaccctgggcagcgacgtgaacctgacctgccagacccagaccgtgggcttcttcgtgcagatgcagtggagcaaggtgaccaacaagatcgacctgatcgccgtgtaccacccccagtacggcttctactgcgcctacggcagaccctgcgagagcctggtgaccttcaccgagacccccgagaacggcagcaagtggaccctgcacctgagaaacatgagctgcagcgtgagcggcagatacgagtgcatgctggtgctgtaccccgagggcatccagaccaagatctacaacctgctgatccagacccacgtgaccgccgacgagtggaacagcaaccacaccatcgagatcgagatcaaccagaccctggagatcccctgcttccagaacagcagcagcaagatcagcagcgagttcacctacgcctggagcgtggagaacagcagcaccgacagctgggtgctgctgagcaagggcatcaaggaggacaacggcacccaggagaccctgatcagccagaaccacctgatcagcaacagcaccctgctgaaggacagagtgaagctgggcaccgactacagactgcacctgagccccgtgcagatcttcgacgacggcagaaagttcagctgccacatcagagtgggccccaacaagatcctgagaagcagcaccaccgtgaaggtgttcgccaagcccgagatccccgtgatcgtggagaacaacagcaccgacgtgctggtggagagaagattcacctgcctgctgaagaacgtgttccccaaggccaacatcacctggttcatcgacggcagcttcctgcacgacgagaaggagggcatctacatcaccaacgaggagagaaagggcaaggacggcttcctggagctgaagagcgtgctgaccagagtgcacagcaacaagcccgcccagagcgacaacctgaccatctggtgcatggccctgagccccgtgcccggcaacaaggtgtggaacatcagcagcgagaagatcaccttcctgctgggcagcgagatcagcagcaccgacccccccctgagcgtgaccgagagcaccctggacacccagcccagccccgccagcagcgtgagccccgccagataccccgccaccagcagcgtgaccctggtggacgtgagcgccctgagacccaacaccaccccccagcccagcaacagcagcatgaccaccagaggcttcaactacccctggaccagcagcggcaccgacaccaagaagagcgtgagcagaatccccagcgagacctacagcagcagccccagcggcgccggcagcaccctgcacgacaacgtgttcaccagcaccgccagagccttcagcgaggtgcccaccaccgccaacggcagcaccaagaccaaccacgtgcacatcaccggcatcgtggtgaacaagcccaaggacggcatgagctggcccgtgatcgtggccgccctgctgttctgctgcatgatcctgttcggcctgggcgtgagaaagtggtgccagtaccagaaggagatcatggagagacccccccccttcaagcccccccccccccccatcaagtacacctgcatccaggagcccaacgagagcgacctgccctaccacgagatggagaccctgtag

SEQ ID NO: 76056 - DNA, 1710 bp, synthetic construct
  misc_feature 1..1710: note = Description of Artificial Sequence: Synthetic coding sequence
  source 1..1710: mol_type = other DNA
atggagaagaagtggaagtactgcgccgtgtactacatcatccagatccacttcgtgaagggcgtgtgggagaagaccgtgaacaccgaggagaacgtgtacgccaccctgggcagcgacgtgaacctgacctgccagacccagaccgtgggcttcttcgtgcagatgcagtggagcaaggtgaccaacaagatcgacctgatcgccgtgtaccacccccagtacggcttctactgcgcctacggcagaccctgcgagagcctggtgaccttcaccgagacccccgagaacggcagcaagtggaccctgcacctgagaaacatgagctgcagcgtgagcggcagatacgagtgcatgctggtgctgtaccccgagggcatccagaccaagatctacaacctgctgatccagacccacgtgaccgccgacgagtggaacagcaaccacaccatcgagatcgagatcaaccagaccctggagatcccctgcttccagaacagcagcagcaagatcagcagcgagttcacctacgcctggagcgtggaggacaacggcacccaggagaccctgatcagccagaaccacctgatcagcaacagcaccctgctgaaggacagagtgaagctgggcaccgactacagactgcacctgagccccgtgcagatcttcgacgacggcagaaagttcagctgccacatcagagtgggccccaacaagatcctgagaagcagcaccaccgtgaaggtgttcgccaagcccgagatccccgtgatcgtggagaacaacagcaccgacgtgctggtggagagaagattcacctgcctgctgaagaacgtgttccccaaggccaacatcacctggttcatcgacggcagcttcctgcacgacgagaaggagggcatctacatcaccaacgaggagagaaagggcaaggacggcttcctggagctgaagagcgtgctgaccagagtgcacagcaacaagcccgcccagagcgacaacctgaccatctggtgcatggccctgagccccgtgcccggcaacaaggtgtggaacatcagcagcgagaagatcaccttcctgctgggcagcgagatcagcagcaccgacccccccctgagcgtgaccgagagcaccctggacacccagcccagccccgccagcagcgtgagccccgccagataccccgccaccagcagcgtgaccctggtggacgtgagcgccctgagacccaacaccaccccccagcccagcaacagcagcatgaccaccagaggcttcaactacccctggaccagcagcggcaccgacaccaagaagagcgtgagcagaatccccagcgagacctacagcagcagccccagcggcgccggcagcaccctgcacgacaacgtgttcaccagcaccgccagagccttcagcgaggtgcccaccaccgccaacggcagcaccaagaccaaccacgtgcacatcaccggcatcgtggtgaacaagcccaaggacggcatgagctggcccgtgatcgtggccgccctgctgttctgctgcatgatcctgttcggcctgggcgtgagaaagtggtgccagtaccagaaggagatcatggagagacccccccccttcaagcccccccccccccccatcaagtacacctgcatccaggagcccaacgagagcgacctgccctaccacgagatggagaccctgtag

SEQ ID NO: 76057 - DNA, 2508 bp, synthetic construct
  misc_feature 1..2508: note = Description of Artificial Sequence: Synthetic coding sequence
  source 1..2508: mol_type = other DNA
atgggcggcagagtgttcctggccttctgcgtgtggctgaccctgcccggcgccgagacccaggacagcagaggctgcgccagatggtgcccccagaacagcagctgcgtgaacgccaccgcctgcagatgcaaccccggcttcagcagcttcagcgagatcatcaccacccccaccgagacctgcgacgacatcaacgagtgcgccacccccagcaaggtgagctgcggcaagttcagcgactgctggaacaccgagggcagctacgactgcgtgtgcagccccggctacgagcccgtgagcggcgccaagaccttcaagaacgagagcgagaacacctgccaggacgtggacgagtgccagcagaaccccagactgtgcaagagctacggcacctgcgtgaacaccctgggcagctacacctgccagtgcctgcccggcttcaagttcatccccgaggaccccaaggtgtgcaccgacgtgaacgagtgcaccagcggccagaacccctgccacagcagcacccactgcctgaacaacgtgggcagctaccagtgcagatgcagacccggctggcagcccatccccggcagccccaacggccccaacaacaccgtgtgcgaggacgtggacgagtgcagcagcggccagcaccagtgcgacagcagcaccgtgtgcttcaacaccgtgggcagctacagctgcagatgcagacccggctggaagcccagacacggcatccccaacaaccagaaggacaccgtgtgcgaggacatgaccttcagcacctggacccccccccccggcgtgcacagccagaccctgagcagattcttcgacaaggtgcaggacctgggcagagacagcaagaccagcagcgccgaggtgaccatccagaacgtgatcaagctggtggacgagctgatggaggcccccggcgacgtggaggccctggccccccccgtgagacacctgatcgccacccagctgctgagcaacctggaggacatcatgagaatcctggccaagagcctgcccaagggccccttcacctacatcagccccagcaacaccgagctgaccctgatgatccaggagagaggcgacaagaacgtgaccatgggccagagcagcgccagaatgaagctgaactgggccgtggccgccggcgccgaggaccccggccccgccgtggccggcatcctgagcatccagaacatgaccaccctgctggccaacgccagcctgaacctgcacagcaagaagcaggccgagctggaggagatctacgagagcagcatcagaggcgtgcagctgagaagactgagcgccgtgaacagcatcttcctgagccacaacaacaccaaggagctgaacagccccatcctgttcgccttcagccacctggagagcagcgacggcgaggccggcagagacccccccgccaaggacgtgatgcccggccccagacaggagctgctgtgcgccttctggaagagcgacagcgacagaggcggccactgggccaccgagggctgccaggtgctgggcagcaagaacggcagcaccacctgccagtgcagccacctgagcagcttcgccatcctgatggcccactacgacgtggaggactggaagctgaccctgatcaccagagtgggcctggccctgagcctgttctgcctgctgctgtgcatcctgaccttcctgctggtgagacccatccagggcagcagaaccaccatccacctgcacctgtgcatctgcctgttcgtgggcagcaccatcttcctggccggcatcgagaacgagggcggccaggtgggcctgagatgcagactggtggccggcctgctgcactactgcttcctggccgccttctgctggatgagcctggagggcctggagctgtacttcctggtggtgagagtgttccagggccagggcctgagcaccagatggctgtgcctgatcggctacggcgtgcccctgctgatcgtgggcgtgagcgccgccatctacagcaagggctacggcagacccagatactgctggctggacttcgagcagggcttcctgtggagcttcctgggccccgtgaccttcatcatcctgtgcaacgccgtgatcttcgtgaccaccgtgtggaagctgacccagaagttcagcgagatcaaccccgacatgaagaagctgaagaaggccagagccctgaccatcaccgccatcgcccagctgttcctgctgggctgcacctgggtgttcggcctgttcatcttcgacgacagaagcctggtgctgacctacgtgttcaccatcctgaactgcctgcagggcgccttcctgtacctgctgcactgcctgctgaacaagaaggtgagagaggagtacagaaagtgggcctgcctggtggccggcggcagcaagtacagcgagttcaccagcaccaccagcggcaccggccacaaccagaccagagccctgagagccagcgagagcggcatctag

SEQ ID NO: 76058 - DNA, 2361 bp, synthetic construct
  misc_feature 1..2361: note = Description of Artificial Sequence: Synthetic coding sequence
  source 1..2361: mol_type = other DNA
atgggcggcagagtgttcctggccttctgcgtgtggctgaccctgcccggcgccgagacccaggacagcagaggctgcgccagatggtgcccccagaacagcagctgcgtgaacgccaccgcctgcagatgcaaccccggcttcagcagcttcagcgagatcatcaccacccccaccgagacctgcgacgacatcaacgagtgcgccacccccagcaaggtgagctgcggcaagttcagcgactgctggaacaccgagggcagctacgactgcgtgtgcagccccggctacgagcccgtgagcggcgccaagaccttcaagaacgagagcgagaacacctgccaggacgtggacgagtgccagcagaaccccagactgtgcaagagctacggcacctgcgtgaacaccctgggcagctacacctgccagtgcctgcccggcttcaagttcatccccgaggaccccaaggtgtgcaccgacgtggacgagtgcagcagcggccagcaccagtgcgacagcagcaccgtgtgcttcaacaccgtgggcagctacagctgcagatgcagacccggctggaagcccagacacggcatccccaacaaccagaaggacaccgtgtgcgaggacatgaccttcagcacctggacccccccccccggcgtgcacagccagaccctgagcagattcttcgacaaggtgcaggacctgggcagagacagcaagaccagcagcgccgaggtgaccatccagaacgtgatcaagctggtggacgagctgatggaggcccccggcgacgtggaggccctggccccccccgtgagacacctgatcgccacccagctgctgagcaacctggaggacatcatgagaatcctggccaagagcctgcccaagggccccttcacctacatcagccccagcaacaccgagctgaccctgatgatccaggagagaggcgacaagaacgtgaccatgggccagagcagcgccagaatgaagctgaactgggccgtggccgccggcgccgaggaccccggccccgccgtggccggcatcctgagcatccagaacatgaccaccctgctggccaacgccagcctgaacctgcacagcaagaagcaggccgagctggaggagatctacgagagcagcatcagaggcgtgcagctgagaagactgagcgccgtgaacagcatcttcctgagccacaacaacaccaaggagctgaacagccccatcctgttcgccttcagccacctggagagcagcgacggcgaggccggcagagacccccccgccaaggacgtgatgcccggccccagacaggagctgctgtgcgccttctggaagagcgacagcgacagaggcggccactgggccaccgagggctgccaggtgctgggcagcaagaacggcagcaccacctgccagtgcagccacctgagcagcttcgccatcctgatggcccactacgacgtggaggactggaagctgaccctgatcaccagagtgggcctggccctgagcctgttctgcctgctgctgtgcatcctgaccttcctgctggtgagacccatccagggcagcagaaccaccatccacctgcacctgtgcatctgcctgttcgtgggcagcaccatcttcctggccggcatcgagaacgagggcggccaggtgggcctgagatgcagactggtggccggcctgctgcactactgcttcctggccgccttctgctggatgagcctggagggcctggagctgtacttcctggtggtgagagtgttccagggccagggcctgagcaccagatggctgtgcctgatcggctacggcgtgcccctgctgatcgtgggcgtgagcgccgccatctacagcaagggctacggcagacccagatactgctggctggacttcgagcagggcttcctgtggagcttcctgggccccgtgaccttcatcatcctgtgcaacgccgtgatcttcgtgaccaccgtgtggaagctgacccagaagttcagcgagatcaaccccgacatgaagaagctgaagaaggccagagccctgaccatcaccgccatcgcccagctgttcctgctgggctgcacctgggtgttcggcctgttcatcttcgacgacagaagcctggtgctgacctacgtgttcaccatcctgaactgcctgcagggcgccttcctgtacctgctgcactgcctgctgaacaagaaggtgagagaggagtacagaaagtgggcctgcctggtggccggcggcagcaagtacagcgagttcaccagcaccaccagcggcaccggccacaaccagaccagagccctgagagccagcgagagcggcatctag

SEQ ID NO: 76059 - DNA, 2229 bp, synthetic construct
  misc_feature 1..2229: note = Description of Artificial Sequence: Synthetic coding sequence
  source 1..2229: mol_type = other DNA
atgggcggcagagtgttcctggccttctgcgtgtggctgaccctgcccggcgccgagacccaggacagcagaggctgcgccagatggtgcccccagaacagcagctgcgtgaacgccaccgcctgcagatgcaaccccggcttcagcagcttcagcgagatcatcaccacccccaccgagacctgcgacgacatcaacgagtgcgccacccccagcaaggtgagctgcggcaagttcagcgactgctggaacaccgagggcagctacgactgcgtgtgcagccccggctacgagcccgtgagcggcgccaagaccttcaagaacgagagcgagaacacctgccaggacgtggacgagtgcagcagcggccagcaccagtgcgacagcagcaccgtgtgcttcaacaccgtgggcagctacagctgcagatgcagacccggctggaagcccagacacggcatccccaacaaccagaaggacaccgtgtgcgaggacatgaccttcagcacctggacccccccccccggcgtgcacagccagaccctgagcagattcttcgacaaggtgcaggacctgggcagagacagcaagaccagcagcgccgaggtgaccatccagaacgtgatcaagctggtggacgagctgatggaggcccccggcgacgtggaggccctggccccccccgtgagacacctgatcgccacccagctgctgagcaacctggaggacatcatgagaatcctggccaagagcctgcccaagggccccttcacctacatcagccccagcaacaccgagctgaccctgatgatccaggagagaggcgacaagaacgtgaccatgggccagagcagcgccagaatgaagctgaactgggccgtggccgccggcgccgaggaccccggccccgccgtggccggcatcctgagcatccagaacatgaccaccctgctggccaacgccagcctgaacctgcacagcaagaagcaggccgagctggaggagatctacgagagcagcatcagaggcgtgcagctgagaagactgagcgccgtgaacagcatcttcctgagccacaacaacaccaaggagctgaacagccccatcctgttcgccttcagccacctggagagcagcgacggcgaggccggcagagacccccccgccaaggacgtgatgcccggccccagacaggagctgctgtgcgccttctggaagagcgacagcgacagaggcggccactgggccaccgagggctgccaggtgctgggcagcaagaacggcagcaccacctgccagtgcagccacctgagcagcttcgccatcctgatggcccactacgacgtggaggactggaagctgaccctgatcaccagagtgggcctggccctgagcctgttctgcctgctgctgtgcatcctgaccttcctgctggtgagacccatccagggcagcagaaccaccatccacctgcacctgtgcatctgcctgttcgtgggcagcaccatcttcctggccggcatcgagaacgagggcggccaggtgggcctgagatgcagactggtggccggcctgctgcactactgcttcctggccgccttctgctggatgagcctggagggcctggagctgtacttcctggtggtgagagtgttccagggccagggcctgagcaccagatggctgtgcctgatcggctacggcgtgcccctgctgatcgtgggcgtgagcgccgccatctacagcaagggctacggcagacccagatactgctggctggacttcgagcagggcttcctgtggagcttcctgggccccgtgaccttcatcatcctgtgcaacgccgtgatcttcgtgaccaccgtgtggaagctgacccagaagttcagcgagatcaaccccgacatgaagaagctgaagaaggccagagccctgaccatcaccgccatcgcccagctgttcctgctgggctgcacctgggtgttcggcctgttcatcttcgacgacagaagcctggtgctgacctacgtgttcaccatcctgaactgcctgcagggcgccttcctgtacctgctgcactgcctgctgaacaagaaggtgagagaggagtacagaaagtgggcctgcctggtggccggcggcagcaagtacagcgagttcaccagcaccaccagcggcaccggccacaaccagaccagagccctgagagccagcgagagcggcatctag

SEQ ID NO: 76060 - DNA, 2358 bp, synthetic construct
  misc_feature 1..2358: note = Description of Artificial Sequence: Synthetic coding sequence
  source 1..2358: mol_type = other DNA
ggcggcagaatcatgagagccttctgcgtgtggctgaccctgcccggcgccgagacccaggacagcagaggctgcgccagatggtgcccccagaacagcagctgcgtgaacgccaccgcctgcagatgcaaccccggcttcagcagcttcagcgagatcatcaccacccccaccgagacctgcgacgacatcaacgagtgcgccacccccagcaaggtgagctgcggcaagttcagcgactgctggaacaccgagggcagctacgactgcgtgtgcagccccggctacgagcccgtgagcggcgccaagaccttcaagaacgagagcgagaacacctgccaggacgtggacgagtgccagcagaaccccagactgtgcaagagctacggcacctgcgtgaacaccctgggcagctacacctgccagtgcctgcccggcttcaagttcatccccgaggaccccaaggtgtgcaccgacgtggacgagtgcagcagcggccagcaccagtgcgacagcagcaccgtgtgcttcaacaccgtgggcagctacagctgcagatgcagacccggctggaagcccagacacggcatccccaacaaccagaaggacaccgtgtgcgaggacatgaccttcagcacctggacccccccccccggcgtgcacagccagaccctgagcagattcttcgacaaggtgcaggacctgggcagagacagcaagaccagcagcgccgaggtgaccatccagaacgtgatcaagctggtggacgagctgatggaggcccccggcgacgtggaggccctggccccccccgtgagacacctgatcgccacccagctgctgagcaacctggaggacatcatgagaatcctggccaagagcctgcccaagggccccttcacctacatcagccccagcaacaccgagctgaccctgatgatccaggagagaggcgacaagaacgtgaccatgggccagagcagcgccagaatgaagctgaactgggccgtggccgccggcgccgaggaccccggccccgccgtggccggcatcctgagcatccagaacatgaccaccctgctggccaacgccagcctgaacctgcacagcaagaagcaggccgagctggaggagatctacgagagcagcatcagaggcgtgcagctgagaagactgagcgccgtgaacagcatcttcctgagccacaacaacaccaaggagctgaacagccccatcctgttcgccttcagccacctggagagcagcgacggcgaggccggcagagacccccccgccaaggacgtgatgcccggccccagacaggagctgctgtgcgccttctggaagagcgacagcgacagaggcggccactgggccaccgagggctgccaggtgctgggcagcaagaacggcagcaccacctgccagtgcagccacctgagcagcttcgccatcctgatggcccactacgacgtggaggactggaagctgaccctgatcaccagagtgggcctggccctgagcctgttctgcctgctgctgtgcatcctgaccttcctgctggtgagacccatccagggcagcagaaccaccatccacctgcacctgtgcatctgcctgttcgtgggcagcaccatcttcctggccggcatcgagaacgagggcggccaggtgggcctgagatgcagactggtggccggcctgctgcactactgcttcctggccgccttctgctggatgagcctggagggcctggagctgtacttcctggtggtgagagtgttccagggccagggcctgagcaccagatggctgtgcctgatcggctacggcgtgcccctgctgatcgtgggcgtgagcgccgccatctacagcaagggctacggcagacccagatactgctggctggacttcgagcagggcttcctgtggagcttcctgggccccgtgaccttcatcatcctgtgcaacgccgtgatcttcgtgaccaccgtgtggaagctgacccagaagttcagcgagatcaaccccgacatgaagaagctgaagaaggccagagccctgaccatcaccgccatcgcccagctgttcctgctgggctgcacctgggtgttcggcctgttcatcttcgacgacagaagcctggtgctgacctacgtgttcaccatcctgaactgcctgcagggcgccttcctgtacctgctgcactgcctgctgaacaagaaggtgagagaggagtacagaaagtgggcctgcctggtggccggcggcagcaagtacagcgagttcaccagcaccaccagcggcaccggccacaaccagaccagagccctgagagccagcgagagcggcatctag

SEQ ID NO: 76061 - DNA, 297 bp, synthetic construct
  misc_feature 1..297: note = Description of Artificial Sequence: Synthetic coding sequence
  source 1..297: mol_type = other DNA
atgagcgtgagactgcacgtgcccagcggcagcagaggcagcgagctgagcgccctgatccaggccatcggcgccagcaccagcggcaagcccaagtgcttcgtgtgcatcctgagaagcggcctgagcgtggccctgagcctgagcgtgtacttcctgctgctgttcagcagaaccagaggcggcggccacggcgagccccccgagtgccagagaagagccagctgcagcgcctacagcttcagagagatcgaggactgcagacagaagcagcccagaagatggcagcagggctag

SEQ ID NO: 76062 - DNA, 231 bp, synthetic construct
  misc_feature 1..231: note = Description of Artificial Sequence: Synthetic coding sequence
  source 1..231: mol_type = other DNA
atggccagaggcgccgccctggccctgctgctgttcggcctgctgggcgtgctggtggccgcccccggcttcggcgacctgagactgcaggccgccagaggcggcagacccggcgtggcctgccacagccacgccctgagacccggccccaagttcggcatcgccagaagcctgagacccggctggtggggcgagggcaaggagaagctggagaagaacttcgagccctag

SEQ ID NO: 76063 - DNA, 534 bp, synthetic construct
  misc_feature 1..534: note = Description of Artificial Sequence: Synthetic coding sequence
  source 1..534: mol_type = other DNA
atggccagaggcgccgccctggccctgctgctgttcggcctgctgggcgtgctggtggccgcccccgacggcggcttcgacctgagcgacgccctgcccgacaacgagaacaagaagcccaccgccatccccaagaagcccagcgccggcgacgacttcgacctgggcgacgccgtggtggacggcgagaacgacgaccccagaccccccaacccccccaagcccatgcccaaccccaaccccaaccaccccagcagcagcggcagcttcagcgacgccgacctggccgacggcgtgagcggcggcgagggcaagggcggcagcgacggcggcggcagccacagaaaggagggcgaggaggccgacgcccccggcgtgatccccggcatcgtgggcgccgtggtggtggccgtggccggcgccatcagcagcttcatcgcctaccagaagaagaagctgtgcttcaaggagaacggccagctggccggcagcctgggcccctgcatcggcatcagaagagaggccgacggctag

SEQ ID NO: 76064 - DNA, 510 bp, synthetic construct
  misc_feature 1..510: note = Description of Artificial Sequence: Synthetic coding sequence
  source 1..510: mol_type = other DNA
atggccagaggcgccgccctggccctgctgctgttcggcctgctgggcgtgctggtggccgcccccgacggcggcttcgacctgagcgacgccctgcccggcgacgacttcgacctgggcgacgccgtggtggacggcgagaacgacgaccccagaccccccaacccccccaagcccatgcccaaccccaaccccaaccaccccagcagcagcggcagcttcagcgacgccgacctggccgacggcgtgagcggcggcgagggcaagggcggcagcgacggcggcggcagccacagaaaggagggcgaggaggccgacgcccccggcgtgatccccggcatcgtgggcgccgtggtggtggccgtggccggcgccatcagcagcttcatcgcctaccagaagaagaagctgtgcttcaaggagaacgccgagcagggcgaggtggacatggagagccacagaaacgccaacgccgagcccgccgtgcagagaaccctgctggagaagtag

SEQ ID NO: 76065 - DNA, 558 bp, synthetic construct
  misc_feature 1..558: note = Description of Artificial Sequence: Synthetic coding sequence
  source 1..558: mol_type = other DNA
atggccagaggcgccgccctggccctgctgctgttcggcctgctgggcgtgctggtggccgcccccgacggcggcttcgacctgagcgacgccctgcccgacaacgagaacaagaagcccaccgccatccccaagaagcccagcgccggcgacgacttcgacctgggcgacgccgtggtggacggcgagaacgacgaccccagaccccccaacccccccaagcccatgcccaaccccaaccccaaccaccccagcagcagcggcagcttcagcgacgccgacctggccgacggcgtgagcggcggcgagggcaagggcggcagcgacggcggcggcagccacagaaaggagggcgaggaggccgacgcccccggcgtgatccccggcatcgtgggcgccgtggtggtggccgtggccggcgccatcagcagcttcatcgcctaccagaagaagaagctgtgcttcaaggagaacgccgagcagggcgaggtggacatggagagccacagaaacgccaacgccgagcccgccgtgcagagaaccctgctggagaagtag

SEQ ID NO: 76066 - DNA, 606 bp, synthetic construct
  misc_feature 1..606: note = Description of Artificial Sequence: Synthetic coding sequence
  source 1..606: mol_type = other DNA
agaagatggggcagacccgccggcacccccggcgccagcagcctgcccggcagaaccagatgcgcccacggcggccccggccccgaggaggcccccaccttcagccccaccctgttcctggagcccttccagagagagaagagcgccttcgtggtgggcgtggccaacagctacatgtggggcggcctgggcagagacggcggcttcgacctgagcgacgccctgcccgacaacgagaacaagaagcccaccgccatccccaagaagcccagcgccggcgacgacttcgacctgggcgacgccgtggtggacggcgagaacgacgaccccagaccccccaacccccccaagcccatgcccaaccccaaccccaaccaccccagcagcagcggcagcttcagcgacgccgacctggccgacggcgtgagcggcggcgagggcaagggcggcagcgacggcggcggcagccacagaaaggagggcgaggaggccgacgcccccggcgtgatccccggcatcgtgggcgccgtggtggtggccgtggccggcgccatcagcagcttcatcgcctaccagaagaagaagctgtgcttcaaggagaactag

SEQ ID NO: 76067 - DNA, 438 bp, synthetic construct
  misc_feature 1..438: note = Description of Artificial Sequence: Synthetic coding sequence
  source 1..438: mol_type = other DNA
atggtggcctggagaagcgccttcctggtgtgcctggccttcagcctggccaccctggtgcagagaggcagcggcgacttcgacgacttcaacctggaggacgccgtgaaggagaccagcagcgtgaagcccgccctgggcatgtaccacaagctggacggcctgaagcagcagaacttcatcctgagcctgttctggatgctggaggtgctgtaccagggcgtgggctgggccaccttcagcctgaaggccctgggcaagaacctgagcctgaccttccccaccagcggcggcagcagatgcagcctggtgtgcggctgcatcacccccatcagcgccagcgtggtgacctggtgcagccccttctgcgtgagcctgctgagcctgaccaagatgctggtgagcggcttcaaggcccacctggacaaccccggctag

SEQ ID NO: 76068 - DNA, 573 bp, synthetic construct
  misc_feature 1..573: note = Description of Artificial Sequence: Synthetic coding sequence
  source 1..573: mol_type = other DNA
atggtggcctggagaagcgccttcctggtgtgcctggccttcagcctggccaccctggtgcagagaggcagcggcgacttcgacgacttcaacctggaggacgccgtgaaggagaccagcagcgtgaagagaaacgacttcgacctggccgacgccctggacgacagaaacgacagagacgacggcagaagaaagcccatcgccggcggcggcggcttcagcgacaaggacctggaggacatcgtgggcggcggcgagtacaagcccgacaagggcaagggcgacggcagatacggcagcaacgacgaccccggcagcggcatggtggccgagcccggcaccatcgccggcgtggccagcgccctggccatggccctgatcggcgccgtgagcagctacatcagctaccagcagaagaagttctgcttcagcatccagcagggcctgaacgccgactacgtgaagggcgagaacctggaggccgtggtgtgcgaggagccccaggtgaagtacagcaccctgcacacccagagcgccgagcccccccccccccccgagcccgccagaatctag

SEQ ID NO: 76069 - DNA, 789 bp, synthetic construct
  misc_feature 1..789: note = Description of Artificial Sequence: Synthetic coding sequence
  source 1..789: mol_type = other DNA
atggtggcctggagaagcgccttcctggtgtgcctggccttcagcctggccaccctggtgcagagaggcagcggcgacttcgacgacttcaacctggaggacgccgtgaaggagaccagcagcgtgaagcagccctgggaccacaccaccaccaccaccaccaacagacccggcaccaccagagcccccgccaagccccccggcagcggcctggacctggccgacgccctggacgaccaggacgacggcagaagaaagcccggcatcggcggcagagagagatggaaccacgtgaccaccaccaccaagagacccgtgaccaccagagcccccgccaacaccctgggcaacgacttcgacctggccgacgccctggacgacagaaacgacagagacgacggcagaagaaagcccatcgccggcggcggcggcttcagcgacaaggacctggaggacatcgtgggcggcggcgagtacaagcccgacaagggcaagggcgacggcagatacggcagcaacgacgaccccggcagcggcatggtggccgagcccggcaccatcgccggcgtggccagcgccctggccatggccctgatcggcgccgtgagcagctacatcagctaccagcagaagaagttctgcttcagcatccagcagggcctgaacgccgactacgtgaagggcgagaacctggaggccgtggtgtgcgaggagccccaggtgaagtacagcaccctgcacacccagagcgccgagcccccccccccccccgagcccgccagaatctag

SEQ ID NO: 76070 - DNA, 474 bp, synthetic construct
  misc_feature 1..474: note = Description of Artificial Sequence: Synthetic coding sequence
  source 1..474: mol_type = other DNA
gagaccagcagcgtgaagcagccctgggaccacaccaccaccaccaccaccaacagacccggcaccaccagagcccccgccaagccccccggcagcggcctggacctggccgacgccctggacgaccaggacgacggcagaagaaagcccggcatcggcggcagagagagatggaaccacgtgaccaccaccaccaagagacccgtgaccaccagagcccccgccaacaccctgggcaacgacttcgacctggccgacgccctggacgacagaaacgacagagacgacggcagaagaaagcccatcgccggcggcggcggcttcagcgacaaggacctggaggacatcgtgggcggcggcgagtacaagcccgacaagggcaagggcgacggcagatacggcagcaacgacgaccccggcagcggcggcttcctgaaccccgaggcccccgtgggccacgtgaagggcaagtag

SEQ ID NO: 76071 - DNA, 570 bp, synthetic construct
  misc_feature 1..570: note = Description of Artificial Sequence: Synthetic coding sequence
  source 1..570: mol_type = other DNA
atggtggcctggagaagcgccttcctggtgtgcctggccttcagcctggccaccctggtgcagagaggcagcggcgacttcgacgacttcaacctggaggacgccgtgaaggagaccagcagcgtgaagcagccctgggaccacaccaccaccaccaccaccaacagacccggcaccaccagagcccccgccaagccccccggcagcggcctggacctggccgacgccctggacgaccaggacgacggcagaagaaagcccggcatcggcggcagaggcgacggcagatacggcagcaacgacgaccccggcagcggcatggtggccgagcccggcaccatcgccggcgtggccagcgccctggccatggccctgatcggcgccgtgagcagctacatcagctaccagcagaagaagttctgcttcagcatccagcagggcctgaacgccgactacgtgaagggcgagaacctggaggccgtggtgtgcgaggagccccaggtgaagtacagcaccctgcacacccagagcgccgagcccccccccccccccgagcccgccagaatctag

SEQ ID NO: 76072 - DNA, 819 bp, synthetic construct
  misc_feature 1..819: note = Description of Artificial Sequence: Synthetic coding sequence
  source 1..819: mol_type = other DNA
atggtggcctggagaagcgccttcctggtgtgcctggccttcagcctggccaccctggtgcagagaggcagcggcgacttcgacgacttcaacctggaggacgccgtgaaggagaccagcagcgtgaagcagccctgggaccacaccaccaccaccaccaccaacagacccggcaccaccagagcccccgccaagccccccggccccaccgagggcagcggcctggacctggccgacgccctggacgaccaggacgacggcagaagaaagcccggcatcggcggcagagagagatggaaccacgtgaccaccaccaccaagagacccgtgaccaccagagcccccgccaacaccctgggcaacgacttcgacctggccgacgccctggacgacagaaacgacagagacgacggcagaagaaagcccatcgccggcggcggcggcttcagcgacaaggacctggaggacatcgtgggcggcggcgagtacaagcccgacaagggcaagggcgacggcagatacggcagcaacgacgaccccggcagcggcatggtggccgagcccggcaccatcgccggcgtggccagcgccctggccatggccctgatcggcgccgtgagcagctacatcagctaccagcagaagaagttctgcttcagcatccagcacgccgccgccggccaggagggcctgaacgccgactacgtgaagggcgagaacctggaggccgtggtgtgcgaggagccccaggtgaagtacagcaccctgcacacccagagcgccgagcccccccccccccccgagcccgccagaatctag

SEQ ID NO: 76073 - DNA, 642 bp, synthetic construct
  misc_feature 1..642: note = Description of Artificial Sequence: Synthetic coding sequence
  source 1..642: mol_type = other DNA
atggtggcctggagaagcgccttcctggtgtgcctggccttcagcctggccaccctggtgcagagaggcagcggcgacttcgacgacttcaacctggaggacgccgtgaaggagaccagcagcgtgaagcagagatggaaccacgtgaccaccaccaccaagagacccgtgaccaccagagcccccgccaacaccctgggcaacgacttcgacctggccgacgccctggacgacagaaacgacagagacgacggcagaagaaagcccatcgccggcggcggcggcttcagcgacaaggacctggaggacatcgtgggcggcggcgagtacaagcccgacaagggcaagggcgacggcagatacggcagcaacgacgaccccggcagcggcatggtggccgagcccggcaccatcgccggcgtggccagcgccctggccatggccctgatcggcgccgtgagcagctacatcagctaccagcagaagaagttctgcttcagcatccagcagggcctgaacgccgactacgtgaagggcgagaacctggaggccgtggtgtgcgaggagccccaggtgaagtacagcaccctgcacacccagagcgccgagcccccccccccccccgagcccgccagaatctag

SEQ ID NO: 76074 - DNA, 1785 bp, synthetic construct
  misc_feature 1..1785: note = Description of Artificial Sequence: Synthetic coding sequence
  source 1..1785: mol_type = other DNA
atggccgccgagagcggcgagctgatcggcgcctgcgagttcatgaaggacagactgtacttcgccaccctgagaaacagacccaagagcaccgtgaacacccactacttcagcatcgacgaggagctggtgtacgagaacttctacgccgacttcggccccctgaacctggccatggtgtacagatactgctgcaagctgaacaagaagctgaagagctacagcctgagcagaaagaagatcgtgcactacacctgcttcgaccagagaaagagagccaacgccgccttcctgatcggcgcctacgccgtgatctacctgaagaagacccccgaggaggcctacagagccctgctgagcggcagcaaccccccctacctgcccttcagagacgccagcttcggcaactgcacctacaacctgaccatcctggactgcctgcagggcatcagaaagggcctgcagcacggcttcttcgacttcgagaccttcgacgtggacgagtacgagcactacgagagagtggagaacggcgacttcaactggatcgtgcccggcaagttcctggccttcagcggcccccaccccaagagcaagatcgagaacggctaccccctgcacgcccccgaggcctacttcccctacttcaagaagcacaacgtgaccgccgtggtgagactgaacaagaagatctacgaggccaagagattcaccgacgccggcttcgagcactacgacctgttcttcatcgacggcagcacccccagcgacaacatcgtgagaagattcctgaacatctgcgagaacaccgagggcgccatcgccgtgcactgcaaggccggcctgggcagaaccggcaccctgatcgcctgctacgtgatgaagcactacagattcacccacgccgagatcatcgcctggatcagaatctgcagacccggcagcatcatcggcccccagcagcacttcctggaggagaagcaggccagcctgtgggtgcagggcgacatcttcagaagcaagctgaagaacagacccagcagcgagggcagcatcaacaagatcctgagcggcctggacgacatgagcatcggcggcaacctgagcaagacccagaacatggagagattcggcgaggacaacctggaggacgacgacgtggagatgaagaacggcatcacccagggcgacaagctgagagccctgaagagccagagacagcccagaaccagccccagctgcgccttcagaagcgacgacaccaagggccaccccagagccgtgagccagcccttcagactgagcagcagcctgcagggcagcgccgtgaccctgaagaccagcaagatggccctgagccccagcgccaccgccaagagaatcaacagaaccagcctgagcagcggcgccaccgtgagaagcttcagcatcaacagcagactggccagcagcctgggcaacctgaacgccgccaccgacgaccccgagaacaagaagaccagcagcagcagcaaggccggcttcaccgccagccccttcaccaacctgctgaacggcagcagccagcccaccaccagaaactaccccgagctgaacaacaaccagtacaacagaagcagcaacagcaacggcggcaacctgaacagcccccccggcccccacagcgccaagaccgaggagcacaccaccatcctgagacccagctacaccggcctgagcagcagcagcgccagattcctgagcagaagcatccccagcctgcagagcgagtacgtgcactactag

SEQ ID NO: 76075 - DNA, 1872 bp, synthetic construct
  misc_feature 1..1872: note = Description of Artificial Sequence: Synthetic coding sequence
  source 1..1872: mol_type = other DNA
atggccgccgagagcggcgagctgatcggcgcctgcgagttcatgaaggacagactgtacttcgccaccctgagaaacagacccaagagcaccgtgaacacccactacttcagcatcgacgaggagctggtgtacgagaacttctacgccgacttcggccccctgaacctggccatggtgtacagatactgctgcaagctgaacaagaagctgaagagctacagcctgagcagaaagaagatcgtgcactacacctgcttcgaccagagaaagagagccaacgccgccttcctgatcggcgcctacgccgtgatctacctgaagaagacccccgaggaggcctacagagccctgctgagcggcagcaaccccccctacctgcccttcagagacgccagcttcggcaactgcacctacaacctgaccatcctggactgcctgcagggcatcagaaagggcctgcagcacggcttcttcgacttcgagaccttcgacgtggacgagtacgagcactacgagagagtggagaacggcgacttcaactggatcgtgcccggcaagttcctggccttcagcggcccccaccccaagagcaagatcgagaacggctaccccctgcacgcccccgaggcctacttcccctacttcaagaagcacaacgtgaccgccgtggtgagactgaacaagaagatctacgaggccaagagattcaccgacgccggcttcgagcactacgacctgttcttcatcgacggcagcacccccagcgacaacatcgtgagaagattcctgaacatctgcgagaacaccgagggcgccatcgccgtgcactgcaaggccggcctgggcagaaccggcaccctgatcgcctgctacgtgatgaagcactacagattcacccacgccgagatcatcgcctggatcagaatctgcagacccggcagcatcatcggcccccagcagcacttcctggaggagaagcaggccagcctgtgggtgcagggcgacatcttcagaagcaagctgaagaacagacccagcagcgagggcagcatcaacaagatcctgagcggcctggacgacatgagcatcggcggcaacctgagcaagacccagaacatggagagattcggcgaggacaacctggaggacgacgacgtggagatgaagaacggcatcacccagggcgacaagctgagagccctgaagagccagagacagcccagaaccagccccagctgcgccttcagaagcgacgacaccaagggccaccccagagccgtgagccagcccttcagactgagcagcagcctgcagggcagcgccgtgaccctgaagaccagcaagatggccctgagccccagcgccaccgccaagagaatcaacagaaccagcctgagcagcggcgccaccgtgagaagcttcagcatcaacagcagactggccagcagcctgggcaacctgaacgccgccaccgacgaccccgagaacaagaagaccagcagcagcagcaaggccggcttcaccgccagccccttcaccaacctgctgaacggcagcagccagcccaccaccagaaactaccccgagctgaacaacaaccagtacaacagaagcagcaacagcaacggcggcaacctgaacagcccccccggcccccacagcgccaagaccgaggagcacaccaccatcctgagacccagctacaccggcctgagcagcagcagcgccagattcctgagcagaagcatccccgtgagcgcccagacccccccccccggcccccagaaccccgagtgcaacttctgcgccctgcccagccagcccagactgccccccaagaagttcaacagcgccaaggaggccttctag

SEQ ID NO: 76076 - DNA, 1152 bp, synthetic construct
  misc_feature 1..1152: note = Description of Artificial Sequence: Synthetic coding sequence
  source 1..1152: mol_type = other DNA
atggccgccgagagcggcgagctgatcggcgcctgcgagttcatgaaggacagactgtacttcgccaccctgagaaacagacccaagagcaccgtgaacacccactacttcagcatcgacgaggagctggtgtacgagaacttctacgccgacttcggccccctgaacctggccatggtgtacagatactgctgcaagctgaacaagaagctgaagagctacagcctgagcagaaagaagatcgtgcactacacctgcttcgaccagagaaagagagccaacgccgccttcctgatcggcgcctacgccgtgatctacctgaagaagacccccgaggaggcctacagagccctgctgagcggcagcaaccccccctacctgcccttcagagacgccagcttcggcaactgcacctacaacctgaccatcctggactgcctgcagggcatcagaaagggcctgcagcacggcttcttcgacttcgagaccttcgacgtggacgagtacgagcactacgagagagtggagaacggcgacttcaactggatcgtgcccggcaagttcctggccttcagcggcccccaccccaagagcaagatcgagaacggctaccccctgcacgcccccgaggcctacttcccctacttcaagaagcacaacgtgaccgccgtggtgagactgaacaagaagatctacgaggccaagagattcaccgacgccggcttcgagcactacgacctgttcttcatcgacggcagcacccccagcgacaacatcgtgagaagattcctgaacatctgcgagaacaccgagggcgccatcgccgtgcactgcaaggccggcctgggcagaaccggcaccctgatcgcctgctacgtgatgaagcactacagattcacccacgccgagatcatcgcctggatcagaatctgcagacccggcagcatcatcggcccccagcagcacttcctggaggagaagcaggccagcctgtgggtgcagggcgacatcttcagaagcaagctgaagaacagacccagcagcgagggcagcatcaacaagatcctgagcggcctggacgacatgagcatcggcggcaacctgagcaagacccagaacatggagagattcggcgaggtgagcttcccctag

SEQ ID NO: 76077 - DNA, 576 bp, synthetic construct
  misc_feature 1..576: note = Description of Artificial Sequence: Synthetic coding sequence
  source 1..576: mol_type = other DNA
atggccgccgagagcggcgagctgatcggcgcctgcgagttcatgaaggacagactgtacttcgccaccctgagaaacagacccaagagcaccgtgaacacccactacttcagcatcgacgaggagctggtgtacgagaacttctacgccgacttcggccccctgaacctggccatggtgtacagatactgctgcaagctgaacaagaagctgaagagctacagcctgagcagaaagaagatcgtgcactacacctgcttcgaccagagaaagagagccaacgccgccttcctgatcggcgcctacgccgtgatctacctgaagaagacccccgaggaggcctacagagccctgctgagcggcagcaaccccccctacctgcccttcagagacgccagcttcggcaactgcacctacaacctgaccatcctggactgcctgcagggcatcagaaagggcctgcagcacggcttcttcgacttcgagaccttcgacgtggacgagtacgagcactacgaggtgatcctgttcacccccctgaagcccaccttcctgatcagcaagagcatcatgtag

SEQ ID NO: 76078 - DNA, 822 bp, synthetic construct
  misc_feature 1..822: note = Description of Artificial Sequence: Synthetic coding sequence
  source 1..822: mol_type = other DNA
atgggcaacttcctgagcagagagaacaaggtgcaggtgatcagcgagagcgacagactgtacttcgccaccctgagaaacagacccaagagcaccgtgaacacccactacttcagcatcgacgaggagctggtgtacgagaacttctacgccgacttcggccccctgaacctggccatggtgtacagatactgctgcaagctgaacaagaagctgaagagctacagcctgagcagaaagaagatcgtgcactacacctgcttcgaccagagaaagagagccaacgccgccttcctgatcggcgcctacgccgtgatctacctgaagaagacccccgaggaggcctacagagccctgctgagcggcagcaaccccccctacctgcccttcagagacgccagcttcggcaactgcacctacaacctgaccatcctggactgcctgcagggcatcagaaagggcctgcagcacggcttcttcgacttcgagaccttcgacgtggacgagtacgagcactacgagagagtggagaacggcgacttcaactggatcgtgcccggcaagttcctggccttcagcggcccccaccccaagagcaagatcgagaacggctaccccctgcacgcccccgaggcctacttcccctacttcaagaagcacaacgtgaccgccgtggtgagactgaacaagaagatctacgaggccaagagattcaccgacgccggcttcgagcactacgacctgttcttcatcgacggcagcacccccagcgacaacatcgtgagaagattcctgaacatctgcgagaacaccgagggctag

SEQ ID NO: 76079 - DNA, 1698 bp, synthetic construct
  misc_feature 1..1698: note = Description of Artificial Sequence: Synthetic coding sequence
  source 1..1698: mol_type = other DNA
atggtgtacagatactgctgcaagctgaacaagaagctgaagagctacagcctgagcagaaagaagatcgtgcactacacctgcttcgaccagagaaagagagccaacgccgccttcctgatcggcgcctacgccgtgatctacctgaagaagacccccgaggaggcctacagagccctgctgagcggcagcaaccccccctacctgcccttcagagacgccagcttcggcaactgcacctacaacctgaccatcctggactgcctgcagggcatcagaaagggcctgcagcacggcttcttcgacttcgagaccttcgacgtggacgagtacgagcactacgagagagtggagaacggcgacttcaactggatcgtgcccggcaagttcctggccttcagcggcccccaccccaagagcaagatcgagaacggctaccccctgcacgcccccgaggcctacttcccctacttcaagaagcacaacgtgaccgccgtggtgagactgaacaagaagatctacgaggccaagagattcaccgacgccggcttcgagcactacgacctgttcttcatcgacggcagcacccccagcgacaacatcgtgagaagattcctgaacatctgcgagaacaccgagggcgccatcgccgtgcactgcaaggccggcctgggcagaaccggcaccctgatcgcctgctacgtgatgaagcactacagattcacccacgccgagatcatcgcctggatcagaatctgcagacccggcagcatcatcggcccccagcagcacttcctggaggagaagcaggccagcctgtgggtgcagggcgacatcttcagaagcaagctgaagaacagacccagcagcgagggcagcatcaacaagatcctgagcggcctggacgacatgagcatcggcggcaacctgagcaagacccagaacatggagagattcggcgaggacaacctggaggacgacgacgtggagatgaagaacggcatcacccagggcgacaagctgagagccctgaagagccagagacagcccagaaccagccccagctgcgccttcagaagcgacgacaccaagggccaccccagagccgtgagccagcccttcagactgagcagcagcctgcagggcagcgccgtgaccctgaagaccagcaagatggccctgagccccagcgccaccgccaagagaatcaacagaaccagcctgagcagcggcgccaccgtgagaagcttcagcatcaacagcagactggccagcagcctgggcaacctgaacgccgccaccgacgaccccgagaacaagaagaccagcagcagcagcaaggccggcttcaccgccagccccttcaccaacctgctgaacggcagcagccagcccaccaccagaaactaccccgagctgaacaacaaccagtacaacagaagcagcaacagcaacggcggcaacctgaacagcccccccggcccccacagcgccaagaccgaggagcacaccaccatcctgagacccagctacaccggcctgagcagcagcagcgccagattcctgagcagaagcatccccgtgagcgcccagacccccccccccggcccccagaaccccgagtgcaacttctgcgccctgcccagccagcccagactgccccccaagaagttcaacagcgccaaggaggccttctag

SEQ ID NO: 76080 - DNA, 1833 bp, synthetic construct
  misc_feature 1..1833: note = Description of Artificial Sequence: Synthetic coding sequence
  source 1..1833: mol_type = other DNA
atggccgccgagagcggcgagctgatcggcgcctgcgagttcatgaaggacagactgtacttcgccaccctgagaaacagacccaagagcaccgtgaacacccactacttcagcatcgacgaggagctggtgtacgagaacttctacgccgacttcggccccctgaacctggccatggtgtacagatactgctgcaagctgaacaagaagctgaagagctacagcctgagcagaaagaagatcgtgcactacacctgcttcgaccagagaaagagagccaacgccgccttcctgatcggcgcctacgccgtgatctacctgaagaagacccccgaggaggcctacagagccctgctgagcggcagcaaccccccctacctgcccttcagagacgccagcttcggcaactgcacctacaacctgaccatcctggactgcctgcagggcatcagaaagggcctgcagcacggcttcttcgacttcgagaccttcgacgtggacgagtacgagcactacgagagagtggagaacggcgacttcaactggatcgtgcccggcaagttcctggccttcagcggcccccaccccaagagcaagatcgagaacggctaccccctgcacgcccccgaggcctacttcccctacttcaagaagcacaacgtgaccgccgtggtgagactgaacaagaagatctacgaggccaagagattcaccgacgccggcttcgagcactacgacctgttcttcatcgacggcagcacccccagcgacaacatcgtgagaagattcctgaacatctgcgagaacaccgagggcgccatcgccgtgcactgcaaggccggcctgggcagaaccggcaccctgatcgcctgctacgtgatgaagcactacagattcacccacgccgagatcatcgcctggatcagaatctgcagacccggcagcatcatcggcccccagcagcacttcctggaggagaagcaggccagcctgtgggtgcagggcgacatcttcagaagcaagctgaagaacagacccagcagcgagggcagcatcaacaagatcctgagcggcctggacgacatgagcatcggcggcaacctgagcaagacccagaacatggagagattcggcgaggacaacctggaggacgacgacgtggagatgaagaacggcatcacccagggcgacaagctgagagccctgaagagccagagacagcccagaaccagccccagctgcgccttcagaagcgacgacaccaagggccaccccagagccgtgagccagcccttcagactgagcagcagcctgcagggcagcgccgtgaccctgaagaccagcaagatggccctgagccccagcgccaccgccaagagaatcaacagaaccagcctgagcagcggcgccaccgtgagaagcttcagcatcaacagcagactggccagcagcctgggcaacctgaacgccgccaccgacgaccccgagaacaagaagaccagcagcagcagcaaggccggcttcaccgccagccccttcaccaacctgctgaacggcagcagccagcccaccaccagaaactaccccgagctgaacaacaaccagtacaacagaagcagcaacagcaacggcggcaacctgaacagcccccccggcccccacagcgccaagaccgaggagcacaccaccatcctgagacccagctacaccggcctgagcagcagcagcgccagattcctgagcagaagcatcccctgcagctgcctgctgctggtgttcagaaagcccttcctgggcagccccctgctgagcctgcccatcagccacctgtag

SEQ ID NO: 76081 - DNA, 1416 bp, synthetic construct
  misc_feature 1..1416: note = Description of Artificial Sequence: Synthetic coding sequence
  source 1..1416: mol_type = other DNA
atgaagagaaagagcgagagaagaagcagctgggccgccgcccccccctgcagcagaagatgcagcagcaccagccccggcgtgaagaagatcagaagcagcacccagcaggaccccagaagaagagacccccaggacgacgtgtacctggacatcaccgacagactgtgcttcgccatcctgtacagcagacccaagagcgccagcaacgtgcactacttcagcatcgacaacgagctggagtacgagaacttctacgccgacttcggccccctgaacctggccatggtgtacagatactgctgcaagatcaacaagaagctgaagagcatcaccatgctgagaaagaagatcgtgcacttcaccggcagcgaccagagaaagcaggccaacgccgccttcctggtgggctgctacatggtgatctacctgggcagaacccccgaggaggcctacagaatcctgatcttcggcgagaccagctacatccccttcagagacgccgcctacggcagctgcaacttctacatcaccctgctggactgcttccacgccgtgaagaaggccatgcagtacggcttcctgaacttcaacagcttcaacctggacgagtacgagcactacgagaaggccgagaacggcgacctgaactggatcatccccgacagattcatcgccttctgcggcccccacagcagagccagactggagagcggctaccaccagcacagccccgagacctacatccagtacttcaagaaccacaacgtgaccaccatcatcagactgaacaagagaatgtacgacgccaagagattcaccgacgccggcttcgaccaccacgacctgttcttcgccgacggcagcacccccaccgacgccatcgtgaaggagttcctggacatctgcgagaacgccgagggcgccatcgccgtgcactgcaaggccggcctgggcagaaccggcaccctgatcgcctgctacatcatgaagcactacagaatgaccgccgccgagaccatcgcctgggtgagaatctgcagacccggcagcgtgatcggcccccagcagcagttcctggtgatgaagcagaccaacctgtggctggagggcgactacttcagacagaagctgaagggccaggagaacggccagcacagagccgccttcagcaagctgctgagcggcgtggacgacatcagcatcaacggcgtggagaaccaggaccagcaggagcccgagccctacagcgacgacgacgagatcaacggcgtgacccagggcgacagactgagagccctgaagagcagaagacagagcaagaccaacgccatccccctgaccgacggctggctgagccaggccgtgaccttcctggacagactgctgatctggctgggcatccacaaggactag

SEQ ID NO: 76082 - DNA, 1458 bp, synthetic construct
  misc_feature 1..1458: note = Description of Artificial Sequence: Synthetic coding sequence
  source 1..1458: mol_type = other DNA
atgaagagaaagagcgagagaagaagcagctgggccgccgcccccccctgcagcagaagatgcagcagcaccagccccggcgtgaagaagatcagaagcagcacccagcaggaccccagaagaagagacccccaggacgacgtgtacctggacatcaccgacagactgtgcttcgccatcctgtacagcagacccaagagcgccagcaacgtgcactacttcagcatcgacaacgagctggagtacgagaacttctacgccgacttcggccccctgaacctggccatggtgtacagatactgctgcaagatcaacaagaagctgaagagcatcaccatgctgagaaagaagatcgtgcacttcaccggcagcgaccagagaaagcaggccaacgccgccttcctggtgggctgctacatggtgatctacctgggcagaacccccgaggaggcctacagaatcctgatcttcggcgagaccagctacatccccttcagagacgccgcctacggcagctgcaacttctacatcaccctgctggactgcttccacgccgtgaagaaggccatgcagtacggcttcctgaacttcaacagcttcaacctggacgagtacgagcactacgagaaggccgagaacggcgacctgaactggatcatccccgacagattcatcgccttctgcggcccccacagcagagccagactggagagcggctaccaccagcacagccccgagacctacatccagtacttcaagaaccacaacgtgaccaccatcatcagactgaacaagagaatgtacgacgccaagagattcaccgacgccggcttcgaccaccacgacctgttcttcgccgacggcagcacccccaccgacgccatcgtgaaggagttcctggacatctgcgagaacgccgagggcgccatcgccgtgcactgcaaggccggcctgggcagaaccggcaccctgatcgcctgctacatcatgaagcactacagaatgaccgccgccgagaccatcgcctgggtgagaatctgcagacccggcagcgtgatcggcccccagcagcagttcctggtgatgaagcagaccaacctgtggctggagggcgactacttcagacagaagctgaagggccaggagaacggccagcacagagccgccttcagcaagctgctgagcggcgtggacgacatcagcatcaacggcgtggagaaccaggaccagcaggagcccgagccctacagcgacgacgacgagatcaacggcgtgacccagggcgacagactgagagccctgaagagcagaagacagagcaagaccaacgccatccccctgacctgccccctggccgtgctgaccagcgccctgtgcagcgtggtgatctggtggatcgtgtgcgactacatcctgcccatcctgctgttctgcctggacggcttcagaacccagtag

SEQ ID NO: 76083 - DNA, 1380 bp, synthetic construct
  misc_feature 1..1380: note = Description of Artificial Sequence: Synthetic coding sequence
  source 1..1380: mol_type = other DNA
atgaagagaaagagcgagagaagaagcagctgggccgccgcccccccctgcagcagaagatgcagcagcaccagccccggcgtgaagaagatcagaagcagcacccagcaggaccccagaagaagagacccccaggacgacgtgtacctggacatcaccgacagactgtgcttcgccatcctgtacagcagacccaagagcgccagcaacgtgcactacttcagcatcgacaacgagctggagtacgagaacttctacgccgacttcggccccctgaacctggccatggtgtacagatactgctgcaagatcaacaagaagctgaagagcatcaccatgctgagaaagaagatcgtgcacttcaccggcagcgaccagagaaagcaggccaacgccgccttcctggtgggctgctacatggtgatctacctgggcagaacccccgaggaggcctacagaatcctgatcttcggcgagaccagctacatccccttcagagacgccgcctacggcagctgcaacttctacatcaccctgctggactgcttccacgccgtgaagaaggccatgcagtacggcttcctgaacttcaacagcttcaacctggacgagtacgagcactacgagaaggccgagaacggcgacctgaactggatcatccccgacagattcatcgccttctgcggcccccacagcagagccagactggagagcggctaccaccagcacagccccgagacctacatccagtacttcaagaaccacaacgtgaccaccatcatcagactgaacaagagaatgtacgacgccaagagattcaccgacgccggcttcgaccaccacgacctgttcttcgccgacggcagcacccccaccgacgccatcgtgaaggagttcctggacatctgcgagaacgccgagggcgccatcgccgtgcactgcaaggccggcctgggcagaaccggcaccctgatcgcctgctacatcatgaagcactacagaatgaccgccgccgagaccatcgcctgggtgagaatctgcagacccggcagcgtgatcggcccccagcagcagttcctggtgatgaagcagaccaacctgtggctggagggcgactacttcagacagaagctgaagggccaggagaacggccagcacagagccgccttcagcaagctgctgagcggcgtggacgacatcagcatcaacggcgtggagaaccaggaccagcaggagcccgagccctacagcgacgacgacgagatcaacggcgtgacccagggcgacagactgagagccctgaagagcagaagacagagcaagaccaacgccatccccctgaccctgagcatcagcagaaccaagaccgtgctgagatag

SEQ ID NO: 76084 - DNA, 1497 bp, synthetic construct
  misc_feature 1..1497: note = Description of Artificial Sequence: Synthetic coding sequence
  source 1..1497: mol_type = other DNA
atgaagagaaagagcgagagaagaagcagctgggccgccgcccccccctgcagcagaagatgcagcagcaccagccccggcgtgaagaagatcagaagcagcacccagcaggaccccagaagaagagacccccaggacgacgtgtacctggacatcaccgacagactgtgcttcgccatcctgtacagcagacccaagagcgccagcaacgtgcactacttcagcatcgacaacgagctggagtacgagaacttctacgccgacttcggccccctgaacctggccatggtgtacagatactgctgcaagatcaacaagaagctgaagagcatcaccatgctgagaaagaagatcgtgcacttcaccggcagcgaccagagaaagcaggccaacgccgccttcctggtgggctgctacatggtgatctacctgggcagaacccccgaggaggcctacagaatcctgatcttcggcgagaccagctacatccccttcagagacgccgcctacggcagctgcaacttctacatcaccctgctggactgcttccacgccgtgaagaaggccatgcagtacggcttcctgaacttcaacagcttcaacctggacgagtacgagcactacgagaaggccgagaacggcgacctgaactggatcatccccgacagattcatcgccttctgcggcccccacagcagagccagactggagagcggctaccaccagcacagccccgagacctacatccagtacttcaagaaccacaacgtgaccaccatcatcagactgaacaagagaatgtacgacgccaagagattcaccgacgccggcttcgaccaccacgacctgttcttcgccgacggcagcacccccaccgacgccatcgtgaaggagttcctggacatctgcgagaacgccgagggcgccatcgccgtgcactgcaaggccggcctgggcagaaccggcaccctgatcgcctgctacatcatgaagcactacagaatgaccgccgccgagaccatcgcctgggtgagaatctgcagacccggcagcgtgatcggcccccagcagcagttcctggtgatgaagcagaccaacctgtggctggagggcgactacttcagacagaagctgaagggccaggagaacggccagcacagagccgccttcagcaagctgctgagcggcgtggacgacatcagcatcaacggcgtggagaaccaggaccagcaggagcccgagccctacagcgacgacgacgagatcaacggcgtgacccagggcgacagactgagagccctgaagagcagaagacagagcaagaccaacgccatccccctgaccgtgatcctgcagagcagcgtgcagagctgcaagaccagcgagcccaacatcagcggcagcgccggcatcaccaagagaaccaccagaagcgccagcagaaagagcagcgtgaagagcctgagcatcagcagaaccaagaccgtgctgagatag

SEQ ID NO: 76085 - DNA, 1386 bp, synthetic construct
  misc_feature 1..1386: note = Description of Artificial Sequence: Synthetic coding sequence
  source 1..1386: mol_type = other DNA
atgagcagagagggcgccggcgccgccctggtggccgaggtgatcaaggacagactgtgcttcgccatcctgtacagcagacccaagagcgccagcaacgtgcactacttcagcatcgacaacgagctggagtacgagaacttctacgccgacttcggccccctgaacctggccatggtgtacagatactgctgcaagatcaacaagaagctgaagagcatcaccatgctgagaaagaagatcgtgcacttcaccggcagcgaccagagaaagcaggccaacgccgccttcctggtgggctgctacatggtgatctacctgggcagaacccccgaggaggcctacagaatcctgatcttcggcgagaccagctacatccccttcagagacgccgcctacggcagctgcaacttctacatcaccctgctggactgcttccacgccgtgaagaaggccatgcagtacggcttcctgaacttcaacagcttcaacctggacgagtacgagcactacgagaaggccgagaacggcgacctgaactggatcatccccgacagattcatcgccttctgcggcccccacagcagagccagactggagagcggctaccaccagcacagccccgagacctacatccagtacttcaagaaccacaacgtgaccaccatcatcagactgaacaagagaatgtacgacgccaagagattcaccgacgccggcttcgaccaccacgacctgttcttcgccgacggcagcacccccaccgacgccatcgtgaaggagttcctggacatctgcgagaacgccgagggcgccatcgccgtgcactgcaaggccggcctgggcagaaccggcaccctgatcgcctgctacatcatgaagcactacagaatgaccgccgccgagaccatcgcctgggtgagaatctgcagacccggcagcgtgatcggcccccagcagcagttcctggtgatgaagcagaccaacctgtggctggagggcgactacttcagacagaagctgaagggccaggagaacggccagcacagagccgccttcagcaagctgctgagcggcgtggacgacatcagcatcaacggcgtggagaaccaggaccagcaggagcccgagccctacagcgacgacgacgagatcaacggcgtgacccagggcgacagactgagagccctgaagagcagaagacagagcaagaccaacgccatccccctgaccgtgatcctgcagagcagcgtgcagagctgcaagaccagcgagcccaacatcagcggcagcgccggcatcaccaagagaaccaccagaagcgccagcagaaagagcagcgtgaagagcctgagcatcagcagaaccaagaccgtgctgagatag

SEQ ID NO: 76086 - DNA, 1458 bp, synthetic construct; identical to SEQ ID NO: 76082
  misc_feature 1..1458: note = Description of Artificial Sequence: Synthetic coding sequence
  source 1..1458: mol_type = other DNA

SEQ ID NO: 76087 - DNA, 5346 bp, synthetic construct
  misc_feature 1..5346: note = Description of Artificial Sequence: Synthetic coding sequence
  source 1..5346: mol_type = other DNA
atgagcggcgaggtgagactgagacagctggagcagttcatcctggacggccccgcccagaccaacggccagtgcttcagcgtggagaccctgctggacatcctgatctgcctgtacgacgagtgcaacaacagccccctgagaagagagaagaacatcctggagtacctggagtgggccaagcccttcaccagcaaggtgaagcagatgagactgcacagagaggacttcgagatcctgaaggtgatcggcagaggcgccttcggcgaggtggccgtggtgaagctgaagaacgccgacaaggtgttcgccatgaagatcctgaacaagtgggagatgctgaagagagccgagaccgcctgcttcagagaggagagagacgtgctggtgaacggcgacaacaagtggatcaccaccctgcactacgccttccaggacgacaacaacctgtacctggtgatggactactacgtgggcggcgacctgctgaccctgctgagcaagttcgaggacagactgcccgaggacatggccagattctacctggccgagatggtgatcgccatcgacagcgtgcaccagctgcactacgtgcacagagacatcaagcccgacaacatcctgatggacatgaacggccacatcagactggccgacttcggcagctgcctgaagctgatggaggacggcaccgtgcagagcagcgtggccgtgggcacccccgactacatcagccccgagatcctgcaggccatggaggacggcaagggcagatacggccccgagtgcgactggtggagcctgggcgtgtgcatgtacgagatgctgtacggcgagacccccttctacgccgagagcctggtggagacctacggcaagatcatgaaccacaaggagagattccagttccccgcccaggtgaccgacgtgagcgagaacgccaaggacctgatcagaagactgatctgcagcagagagcacagactgggccagaacggcatcgaggacttcaagaagcaccccttcttcagcggcatcgactgggacaacatcagaaactgcgaggccccctacatccccgaggtgagcagccccaccgacaccagcaacttcgacgtggacgacgactgcctgaagaacagcgagaccatgcccccccccacccacaccgccttcagcggccaccacctgcccttcgtgggcttcacctacaccagcagctgcgtgctgagcgacagaagctgcctgagagtgaccgccggccccaccagcctggacctggacgtgaacgtgcagagaaccctggacaacaacctggccaccgaggcctacgagagaagaatcaagagactggagcaggagaagctggagctgagcagaaagctgcaggagagcacccagaccgtgcaggccctgcagtacagcaccgtggacggccccctgaccgccagcaaggacctggagatcaagaacctgaaggaggagatcgagaagctgagaaagcaggtgaccgagagcagccacctggagcagcagctggaggaggccaacgccgtgagacaggagctggacgacgccttcagacagatcaaggcctacgagaagcagatcaagaccctgcagcaggagagagaggacctgaacaaggagctggtgcaggccagcgagagactgaagaaccagagcaaggagctgaaggacgcccactgccagagaaagctggccatgcaggagttcatggagatcaacgagagactgaccgagctgcacacccagaagcagaagctggccagacacgtgagagacaaggaggaggaggtggacctggtgatgcagaaggtggagagcctgagacaggagctgagaagaaccgagagagccaagaaggagctggaggtgcacaccgaggccctggccgccgaggccagcaaggacagaaagctgagagagcagagcgagcactacagcaagcagctggagaacgagctggagggcctgaagcagaagcagatcagctacagccccggcgtgtgcagcatcgagcaccagcaggagatcaccaagctgaagaccgacctggagaagaagagcatcttctacgaggaggagctgagcaagagagagggcatccacgccaacgagatcaagaacctgaagaaggagctgcacgacagcgagggccagcagctggccctgaacaaggagatcatgatcctgaaggacaagctggagaagaccagaagagagagccagagcgagagagaggagttcgagagcgagttcaagcagcagtacgagagagagaaggtgctgctgaccgaggagaacaagaagctgaccagcgagctggacaagctgaccaccctgtacgagaacctgagcatccacaaccagcagctggaggaggaggtgaaggacctggccgacaagaaggagagcgtggcccactgggaggcccagatcaccgagatcatccagtgggtgagcgacgagaaggacgccagaggctacctgcaggccctggccagcaagatgaccgaggagctggaggccctgagaaacagcagcctgggcaccagagccaccgacatgccctggaagatgagaagattcgccaagctggacatgagcgccagactggagctgcagagcgccctggacgccgagatcagagccaagcaggccatccaggaggagctgaacaaggtgaaggccagcaacatcatcaccgagtgcaagctgaaggacagcgagaagaagaacctggagctgctgagcgagatcgagcagctgatcaaggacaccgaggagctgagaagcgagaagggcatcgagcaccaggacagccagcacagcttcctggccttcctgaacacccccaccgacgccctggaccagttcgagaccgtggacagcacccccctgagcgtgcacacccccaccctgagaaagaagggctgccccggcagcaccggcttcccccccaagagaaagacccaccagttcttcgtgaagagcttcaccacccccaccaagtgccaccagtgcaccagcctgatggtgggcctgatcagacagggctgcagctgcgaggtgtgcggcttcagctgccacatcacctgcgtgaacaaggcccccaccacctgccccgtgccccccgagcagaccaagggccccctgggcatcgacccccagaagggcatcggcaccgcctacgagggccacgtgagaatccccaagcccgccggcgtgaagaagggctggcagagagccctggccatcgtgtgcgacttcaagctgttcctgtacgacatcgccgagggcaaggccagccagcccagcgtggtgatcagccaggtgatcgacatgagagacgaggagttcagcgtgagcagcgtgctggccagcgacgtgatccacgccagcagaaaggacatcccctgcatcttcagagtgaccgccagccagctgagcgccagcaacaacaagtgcagcatcctgatgctggccgacaccgagaacgagaagaacaagtgggtgggcgtgctgagcgagctgcacaagatcctgaagaagaacaagttcagagacagaagcgtgtacgtgcccaaggaggcctacgacagcaccctgcccctgatcaagaccacccaggccgccgccatcatcgaccacgagagaatcgccctgggcaacgaggagggcctgttcgtggtgcacgtgaccaaggacgagatcatcagagtgggcgacaacaagaagatccaccagatcgagctgatccccaacgaccagctggtggccgtgatcagcggcagaaacagacacgtgagactgttccccatgagcgccctggacggcagagagaccgacttctacaagctgagcgagaccaagggctgccagaccgtgaccagcggcaaggtgagacacggcgccctgacctgcctgtgcgtggccatgaagagacaggtgctgtgctacgagctgttccagagcaagaccagacacagaaagttcaaggagatccaggtgccctacaacgtgcagtggatggccatcttcagcgagcagctgtgcgtgggcttccagagcggcttcctgagataccccctgaacggcgagggcaacccctacagcatgctgcacagcaacgaccacaccctgagcttcatcgcccaccagcccatggacgccatctgcgccgtggagatcagcagcaaggagtacctgctgtgcttcaacagcatcggcatctacaccgactgccagggcagaagaagcagacagcaggagctgatgtggcccgccaaccccagcagctgctgctacaacgccccctacctgagcgtgtacagcgagaacgccgtggacatcttcgacgtgaacagcatggagtggatccagaccctgcccctgaagaaggtgagacccctgaacaacgagggcagcctgaacctgctgggcctggagaccatcagactgatctacttcaagaacaagatggccgagggcgacgagctggtggtgcccgagaccagcgacaacagcagaaagcagatggtgagaaacatcaacaacaagagaagatacagcttcagagtgcccgaggaggagagaatgcagcagagaagagagatgctgagagaccccgagatgagaaacaagctgatcagcaaccccaccaacttcaaccacatcgcccacatgggccccggcgacggcatccagatcctgaaggacctgcccatgcccggcttcccctaccccagcccccaccaccacagcggcctgatcagcagccccatcaacttcgagcacatctaccacatgaccgtgaacagcgccgagaagttcctgagccccgacagcatcaaccccgagtacagccccagcctgagaagcgtgcccggcacccccagcttcatgaccctgagaaaccccagaccccaggagagcagaaccgtgttcagcggcagcgtgagcatccccagcatcaccaagagcagacccgagcccggcagaagcatgagcgccagcagcggcctgagcgccagaagcagcgcccagaacggcagcgccctgaagagagagttcagcggcggcagctacagcgccaagagacagcccatgcccagccccagcgagggcagcctgagcagcggcggcatggaccagggcagcgacgcccccgccagagacttcgacggcgaggacagcgacagccccagacacagcaccgccagcaacagcagcaacctgagcagcccccccagccccgccagccccagaaagaccaagagcctgagcctggagagcaccgacagaggcagctgggacccctag

SEQ ID NO: 76088 - DNA, 2457 bp, synthetic construct
  misc_feature 1..2457: note = Description of Artificial Sequence: Synthetic coding sequence
  source 1..2457: mol_type = other DNA
atgatcctgaaggacaagctggagaagaccagaagagagagccagagcgagagagaggagttcgagagcgagttcaagcagcagtacgagagagagaaggtgctgctgaccgaggagaacaagaagctgaccagcgagctggacaagctgaccaccctgtacgagaacctgagcatccacaaccagcagctggaggaggaggtgaaggacctggccgacaagaaggagagcgtggcccactgggaggcccagatcaccgagatcatccagtgggtgagcgacgagaaggacgccagaggctacctgcaggccctggccagcaagatgaccgaggagctggaggccctgagaaacagcagcctgggcaccagagccaccgacatgccctggaagatgagaagattcgccaagctggacatgagcgccagactggagctgcagagcgccctggacgccgagatcagagccaagcaggccatccaggaggagctgaacaaggtgaaggccagcaacatcatcaccgagtgcaagctgaaggacagcgagaagaagaacctggagctgctgagcgagatcgagcagctgatcaaggacaccgaggagctgagaagcgagaagggcatcgagcaccaggacagccagcacagcttcctggccttcctgaacacccccaccgacgccctggaccagttcgaggacagcttcagcagcagcagcagcagcctgatcgacttcctggacgacaccgaccccgtggagaacacctacgtgtggaaccccagcgtgaagttccacatccagagcagaagcaccagccccagcaccagcagcgaggccgagcccgtgaagaccgtggacagcacccccctgagcgtgcacacccccaccctgagaaagaagggctgccccggcagcaccggcttcccccccaagagaaagacccaccagttcttcgtgaagagcttcaccacccccaccaagtgccaccagtgcaccagcctgatggtgggcctgatcagacagggctgcagctgcgaggtgtgcggcttcagctgccacatcacctgcgtgaacaaggcccccaccacctgccccgtgccccccgagcagaccaagggccccctgggcatcgacccccagaagggcatcggcaccgcctacgagggccacgtgagaatccccaagcccgccggcgtgaagaagggctggcagagagccctggccatcgtgtgcgacttcaagctgttcctgtacgacatcgccgagggcaaggccagccagcccagcgtggtgatcagccaggtgatcgacatgagagacgaggagttcagcgtgagcagcgtgctggccagcgacgtgatccacgccagcagaaaggacatcccctgcatcttcagagtgaccgccagccagctgagcgccagcaacaacaagtgcagcatcctgatgctggccgacaccgagaacgagaagaacaagtgggtgggcgtgctgagcgagctgcacaagatcctgaagaagaacaagttcagagacagaagcgtgtacgtgcccaaggaggcctacgacagcaccctgcccctgatcaagaccacccaggccgccgccatcatcgaccacgagagaatcgccctgggcaacgaggagggcctgttcgtggtgcacgtgaccaaggacgagatcatcagagtgggcgacaacaagaagatccaccagatcgagctgatccccaacgaccagctggtggccgtgatcagcggcagaaacagacacgtgagactgttccccatgagcgccctggacggcagagagaccgacttctacaagctgagcgagaccaagggctgccagaccgtgaccagcggcaaggtgagacacggcgccctgacctgcctgtgcgtggccatgaagagacaggtgctgtgctacgagctgttccagagcaagaccagacacagaaagttcaaggagatccaggtgccctacaacgtgcagtggatggccatcttcagcgagcagctgtgcgtgggcttccagagcggcttcctgagataccccctgaacggcgagggcaacccctacagcatgctgcacagcaacgaccacaccctgagcttcatcgcccaccagcccatggacgccatctgcgccgtggagatcagcagcaaggagtacctgctgtgcttcaacagcatcggcatctacaccgactgccagggcagaagaagcagacagcaggagctgatgtggcccgccaaccccagcagctgctgctacaacgccccctacctgagcgtgtacagcgagaacgccgtggacatcttcgacgtgaacagcatggagtggatccagaccctgcccctgaagaaggtgagacccctgaacaacgagggcagcctgaacctgctgggcctggagaccatcagactgatctacttcaagaacaagatggcctag

SEQ ID NO: 76089 - DNA, 5076 bp, synthetic construct
  misc_feature 1..5076: note = Description of Artificial Sequence: Synthetic coding sequence
  source 1..5076: mol_type = other DNA
atgagcggcgaggtgagactgagacagctggagcagttcatcctggacggccccgcccagaccaacggccagtgcttcagcgtggagaccctgctggacatcctgatctgcctgtacgacgagtgcaacaacagccccctgagaagagagaagaacatcctggagtacctggagtgggccaagcccttcaccagcaaggtgaagcagatgagactgcacagagaggacttcgagatcctgaaggtgatcggcagaggcgccttcggcgaggtggccgtggtgaagctgaagaacgccgacaaggtgttcgccatgaagatcctgaacaagtgggagatgctgaagagagccgagaccgcctgcttcagagaggagagagacgtgctggtgaacggcgacaacaagtggatcaccaccctgcactacgccttccaggacgacaacaacctgtacctggtgatggactactacgtgggcggcgacctgctgaccctgctgagcaagttcgaggacagactgcccgaggacatggccagattctacctggccgagatggtgatcgccatcgacagcgtgcaccagctgcactacgtgcacagagacatcaagcccgacaacatcctgatggacatgaacggccacatcagactggccgacttcggcagctgcctgaagctgatggaggacggcaccgtgcagagcagcgtggccgtgggcacccccgactacatcagccccgagatcctgcaggccatggaggacggcaagggcagatacggccccgagtgcgactggtggagcctgggcgtgtgcatgtacgagatgctgtacggcgagacccccttctacgccgagagcctggtggagacctacggcaagatcatgaaccacaaggagagattccagttccccgcccaggtgaccgacgtgagcgagaacgccaaggacctgatcagaagactgatctgcagcagagagcacagactgggccagaacggcatcgaggacttcaagaagcaccccttcttcagcggcatcgactgggacaacatcagaaactgcgaggccccctacatccccgaggtgagcagccccaccgacaccagcaacttcgacgtggacgacgactgcctgaagaacagcgagaccatgcccccccccacccacaccgccttcagcggccaccacctgcccttcgtgggcttcacctacaccagcagctgcgtgctgagcgacagaagctgcctgagagtgaccgccggccccaccagcctggacctggacgtgaacgtgcagagaaccctggacaacaacctggccaccgaggcctacgagagaagaatcaagagactggagcaggagaagctggagctgagcagaaagctgcaggagagcacccagaccgtgcaggccctgcagtacagcaccgtggacggccccctgaccgccagcaaggacctggagatcaagaacctgaaggaggagatcgagaagctgagaaagcaggtgaccgagagcagccacctggagcagcagctggaggaggccaacgccgtgagacaggagctggacgacgccttcagacagatcaaggcctacgagaagcagatcaagaccctgcagcaggagagagaggacctgaacaaggagctggtgcaggccagcgagagactgaagaaccagagcaaggagctgaaggacgcccactgccagagaaagctggccatgcaggagttcatggagatcaacgagagactgaccgagctgcacacccagaagcagaagctggccagacacgtgagagacaaggaggaggaggtggacctggtgatgcagaaggtggagagcctgagacaggagctgagaagaaccgagagagccaagaaggagctggaggtgcacaccgaggccctggccgccgaggccagcaaggacagaaagctgagagagcagagcgagcactacagcaagcagctggagaacgagctggagggcctgaagcagaagcagatcagctacagccccggcgtgtgcagcatcgagcaccagcaggagatcaccaagctgaagaccgacctggagaagaagagcatcttctacgaggaggagctgagcaagagagagggcatccacgccaacgagatcaagaacctgaagaaggagctgcacgacagcgagggccagcagctggccctgaacaaggagatcatgatcctgaaggacaagctggagaagaccagaagagagagccagagcgagagagaggagttcgagagcgagttcaagcagcagtacgagagagagaaggtgctgctgaccgaggagaacaagaagctgaccagcgagctggacaagctgaccaccctgtacgagaacctgagcatccacaaccagcagctggaggaggaggtgaaggacctggccgacaagaaggagagcgtggcccactgggaggcccagatcaccgagatcatccagtgggtgagcgacgagaaggacgccagaggctacctgcaggccctggccagcaagatgaccgaggagctggaggccctgagaaacagcagcctgggcaccagagccaccgacatgccctggaagatgagaagattcgccaagctggacatgagcgccagactggagctgcagagcgccctggacgccgagatcagagccaagcaggccatccaggaggagctgaacaaggtgaaggccagcaacatcatcaccgagtgcaagctgaaggacagcgagaagaagaacctggagctgctgagcgagatcgagcagctgatcaaggacaccgaggagctgagaagcgagaagggcatcgagcaccaggacagccagcacagcttcctggccttcctgaacacccccaccgacgccctggaccagttcgagagaaagacccaccagttcttcgtgaagagcttcaccacccccaccaagtgccaccagtgcaccagcctgatggtgggcctgatcagacagggctgcagctgcgaggtgtgcggcttcagctgccacatcacctgcgtgaacaaggcccccaccacctgccccgtgccccccgagcagaccaagggccccctgggcatcgacccccagaagggcatcggcaccgcctacgagggccacgtgagaatccccaagcccgccggcgtgaagaagggctggcagagagccctggccatcgtgtgcgacttcaagctgttcctgtacgacatcgccgagggcaaggccagccagcccagcgtggtgatcagccaggtgatcgacatgagagacgaggagttcagcgtgagcagcgtgctggccagcgacgtgatccacgccagcagaaaggacatcccctgcatcttcagagtgaccgccagccagctgagcgccagcaacaacaagtgcagcatcctgatgctggccgacaccgagaacgagaagaacaagtgggtgggcgtgctgagcgagctgcacaagatcctgaagaagaacaagttcagagacagaagcgtgtacgtgcccaaggaggcctacgacagcaccctgcccctgatcaagaccacccaggccgccgccatcatcgaccacgagagaatcgccctgggcaacgaggagggcctgttcgtggtgcacgtgaccaaggacgagatcatcagagtgggcgacaacaagaagatccaccagatcgagctgatccccaacgaccagctggtggccgtgatcagcggcagaaacagacacgtgagactgttccccatgagcgccctggacggcagagagaccgacttctacaagctgagcgagaccaagggctgccagaccgtgaccagcggcaaggtgagacacggcgccctgacctgcctgtgcgtggccatgaagagacaggtgctgtgctacgagctgttccagagcaagaccagacacagaaagttcaaggagatccaggtgccctacaacgtgcagtggatggccatcttcagcgagcagctgtgcgtgggcttccagagcggcttcctgagataccccctgaacggcgagggcaacccctacagcatgctgcacagcaacgaccacaccctgagcttcatcgcccaccagcccatggacgccatctgcgccgtggagatcagcagcaaggagtacctgctgtgcttcaacagcatcggcatctacaccgactgccagggcagaagaagcagacagcaggagctgatgtggcccgccaaccccagcagctgctgctacaacgccccctacctgagcgtgtacagcgagaacgccgtggacatcttcgacgtgaacagcatggagtggatccagaccctgcccctgaagaaggtgagacccctgaacaacgagggcagcctgaacctgctgggcctggagaccatcagactgatctacttcaagaacaagatggccgagggcgacgagctggtggtgcccgagaccagcgacaacagcagaaagcagatggtgagaaacatcaacaacaagagaagatacagcttcagagtgcccgaggaggagagaatgcagcagagaagagagatgctgagagaccccgagatgagaaacaagctgatcagcaaccccaccaacttcaaccacatcgcccacatgggccccggcgacggcatccagatcctgaaggacctgcccatgaaccccagaccccaggagagcagaaccgtgttcagcggcagcgtgagcatccccagcatcaccaagagcagacccgagcccggcagaagcatgagcgccagcagcggcctgagcgccagaagcagcgcccagaacggcagcgccctgaagagagagttcagcggcggcagctacagcgccaagagacagcccatgcccagccccagcgagggcagcctgagcagcggcggcatggaccagggcagcgacgcccccgccagagacttcgacggcgaggacagcgacagccccagacacagcaccgccagcaacagcagcaacctgagcagcccccccagccccgccagccccagaaagaccaagagcctgagcctggagagcaccgacagaggcagctgggacccctag

SEQ ID NO: 76090 - DNA, 5199 bp, synthetic construct
  misc_feature 1..5199: note = Description of Artificial Sequence: Synthetic coding sequence
  source 1..5199: mol_type = other DNA
atgagcggcgaggtgagactgagacagctggagcagttcatcctggacggccccgcccagaccaacggccagtgcttcagcgtggagaccctgctggacatcctgatctgcctgtacgacgagtgcaacaacagccccctgagaagagagaagaacatcctggagtacctggagtgggccaagcccttcaccagcaaggtgaagcagatgagactgcacagagaggacttcgagatcctgaaggtgatcggcagaggcgccttcggcgaggtggccgtggtgaagctgaagaacgccgacaaggtgttcgccatgaagatcctgaacaagtgggagatgctgaagagagccgagaccgcctgcttcagagaggagagagacgtgctggtgaacggcgacaacaagtggatcaccaccctgcactacgccttccaggacgacaacaacctgtacctggtgatggactactacgtgggcggcgacctgctgaccctgctgagcaagttcgaggacagactgcccgaggacatggccagattctacctggccgagatggtgatcgccatcgacagcgtgcaccagctgcactacgtgcacagagacatcaagcccgacaacatcctgatggacatgaacggccacatcagactggccgacttcggcagctgcctgaagctgatggaggacggcaccgtgcagagcagcgtggccgtgggcacccccgactacatcagccccgagatcctgcaggccatggaggacggcaagggcagatacggccccgagtgcgactggtggagcctgggcgtgtgcatgtacgagatgctgtacggcgagacccccttctacgccgagagcctggtggagacctacggcaagatcatgaaccacaaggagagattccagttccccgcccaggtgaccgacgtgagcgagaacgccaaggacctgatcagaagactgatctgcagcagagagcacagactgggccagaacggcatcgaggacttcaagaagcaccccttcttcagcggcatcgactgggacaacatcagaaactgcgaggccccctacatccccgaggtgagcagccccaccgacaccagcaacttcgacgtggacgacgactgcctgaagaacagcgagaccatgcccccccccacccacaccgccttcagcggccaccacctgcccttcgtgggcttcacctacaccagcagctgcgtgctgagcgacagaagctgcctgagagtgaccgccggccccaccagcctggacctggacgtgaacgtgcagagaaccctggacaacaacctggccaccgaggcctacgagagaagaatcaagagactggagcaggagaagctggagctgagcagaaagctgcaggagagcacccagaccgtgcaggccctgcagtacagcaccgtggacggccccctgaccgccagcaaggacctggagatcaagaacctgaaggaggagatcgagaagctgagaaagcaggtgaccgagagcagccacctggagcagcagctggaggaggccaacgccgtgagacaggagctggacgacgccttcagacagatcaaggcctacgagaagcagatcaagaccctgcagcaggagagagaggacctgaacaaggagctggtgcaggccagcgagagactgaagaaccagagcaaggagctgaaggacgcccactgccagagaaagctggccatgcaggagttcatggagatcaacgagagactgaccgagctgcacacccagaagcagaagctggccagacacgtgagagacaaggaggaggaggtggacctggtgatgcagaaggtggagagcctgagacaggagctgagaagaaccgagagagccaagaaggagctggaggtgcacaccgaggccctggccgccgaggccagcaaggacagaaagctgagagagcagagcgagcactacagcaagcagctggagaacgagctggagggcctgaagcagaagcagatcagctacagccccggcgtgtgcagcatcgagcaccagcaggagatcaccaagctgaagaccgacctggagaagaagagcatcttctacgaggaggagctgagcaagagagagggcatccacgccaacgagatcaagaacctgaagaaggagctgcacgacagcgagggccagcagctggccctgaacaaggagatcatgatcctgaaggacaagctggagaagaccagaagagagagccagagcgagagagaggagttcgagagcgagttcaagcagcagtacgagagagagaaggtgctgctgaccgaggagaacaagaagctgaccagcgagctggacaagctgaccaccctgtacgagaacctgagcatccacaaccagcagctggaggaggaggtgaaggacctggccgacaagaaggagagcgtggcccactgggaggcccagatcaccgagatcatccagtgggtgagcgacgagaaggacgccagaggctacctgcaggccctggccagcaagatgaccgaggagctggaggccctgagaaacagcagcctgggcaccagagccaccgacatgccctggaagatgagaagattcgccaagctggacatgagcgccagactggagctgcagagcgccctggacgccgagatcagagccaagcaggccatccaggaggagctgaacaaggtgaaggccagcaacatcatcaccgagtgcaagctgaaggacagcgagaagaagaacctggagctgctgagcgagatcgagcagctgatcaaggacaccgaggagctgagaagcgagaagggcatcgagcaccaggacagccagcacagcttcctggccttcctgaacacccccaccgacgccctggaccagttcgagagaagccccagctgcacccccgccagcaagggcagaagaaccgtggacagcacccccctgagcgtgcacacccccaccctgagaaagaagggctgccccggcagcaccggcttcccccccaagagaaagacccaccagttcttcgtgaagagcttcaccacccccaccaagtgccaccagtgcaccagcctgatggtgggcctgatcagacagggctgcagctgcgaggtgtgcggcttcagctgccacatcacctgcgtgaacaaggcccccaccacctgccccgtgccccccgagcagaccaagggccccctgggcatcgacccccagaagggcatcggcaccgcctacgagggccacgtgagaatccccaagcccgccggcgtgaagaagggctggcagagagccctggccatcgtgtgcgacttcaagctgttcctgtacgacatcgccgagggcaaggccagccagcccagcgtggtgatcagccaggtgatcgacatgagagacgaggagttcagcgtgagcagcgtgctggccagcgacgtgatccacgccagcagaaaggacatcccctgcatcttcagagtgaccgccagccagctgagcgccagcaacaacaagtgcagcatcctgatgctggccgacaccgagaacgagaagaacaagtgggtgggcgtgctgagcgagctgcacaagatcctgaagaagaacaagttcagagacagaagcgtgtacgtgcccaaggaggcctacgacagcaccctgcccctgatcaagaccacccaggccgccgccatcatcgaccacgagagaatcgccctgggcaacgaggagggcctgttcgtggtgcacgtgaccaaggacgagatcatcagagtgggcgacaacaagaagatccaccagatcgagctgatccccaacgaccagctggtggccgtgatcagcggcagaaacagacacgtgagactgttccccatgagcgccctggacggcagagagaccgacttctacaagctgagcgagaccaagggctgccagaccgtgaccagcggcaaggtgagacacggcgccctgacctgcctgtgcgtggccatgaagagacaggtgctgtgctacgagctgttccagagcaagaccagacacagaaagttcaaggagatccaggtgccctacaacgtgcagtggatggccatcttcagcgagcagctgtgcgtgggcttccagagcggcttcctgagataccccctgaacggcgagggcaacccctacagcatgctgcacagcaacgaccacaccctgagcttcatcgcccaccagcccatggacgccatctgcgccgtggagatcagcagcaaggagtacctgctgtgcttcaacagcatcggcatctacaccgactgccagggcagaagaagcagacagcaggagctgatgtggcccgccaaccccagcagctgctgctacaacgccccctacctgagcgtgtacagcgagaacgccgtggacatcttcgacgtgaacagcatggagtggatccagaccctgcccctgaagaaggtgagacccctgaacaacgagggcagcctgaacctgctgggcctggagaccatcagactgatctacttcaagaacaagatggccgagggcgacgagctggtggtgcccgagaccagcgacaacagcagaaagcagatggtgagaaacatcaacaacaagagaagatacagcttcagagtgcccgaggaggagagaatgcagcagagaagagagatgctgagagaccccgagatgagaaacaagctgatcagcaaccccaccaacttcaaccacatcgcccacatgggccccggcgacggcatccagatcctgaaggacctgcccatgaaccccagaccccaggagagcagaaccgtgttcagcggcagcgtgagcatccccagcatcaccaagagcagacccgagcccggcagaagcatgagcgccagcagcggcctgagcgccagaagcagcgcccagaacggcagcgccctgaagagagagttcagcggcggcagctacagcgccaagagacagcccatgcccagccccagcgagggcagcctgagcagcggcggcatggaccagggcagcgacgcccccgccagagacttcgacggcgaggacagcgacagccccagacacagcaccgccagcaacagcagcaacctgagcagcccccccagccccgccagccccagaaagaccaagagcctgagcctggagagcaccgacagaggcagctgggacccctag

SEQ ID NO: 76091 - DNA, 5265 bp, synthetic construct
  misc_feature 1..5265: note = Description of Artificial Sequence: Synthetic coding sequence
  source 1..5265: mol_type = other DNA
atgagcggcgaggtgagactgagacagctggagcagttcatcctggacggccccgcccagaccaacggccagtgcttcagcgtggagaccctgctggacatcctgatctgcctgtacgacgagtgcaacaacagccccctgagaagagagaagaacatcctggagtacctggagtgggccaagcccttcaccagcaaggtgaagcagatgagactgcacagagaggacttcgagatcctgaaggtgatcggcagaggcgccttcggcgaggtggccgtggtgaagctgaagaacgccgacaaggtgttcgccatgaagatcctgaacaagtgggagatgctgaagagagccgagaccgcctgcttcagagaggagagagacgtgctggtgaacggcgacaacaagtggatcaccaccctgcactacgccttccaggacgacaacaacctgtacctggtgatggactactacgtgggcggcgacctgctgaccctgctgagcaagttcgaggacagactgcccgaggacatggccagattctacctggccgagatggtgatcgccatcgacagcgtgcaccagctgcactacgtgcacagagacatcaagcccgacaacatcctgatggacatgaacggccacatcagactggccgacttcggcagctgcctgaagctgatggaggacggcaccgtgcagagcagcgtggccgtgggcacccccgactacatcagccccgagatcctgcaggccatggaggacggcaagggcagatacggccccgagtgcgactggtggagcctgggcgtgtgcatgtacgagatgctgtacggcgagacccccttctacgccgagagcctggtggagacctacggcaagatcatgaaccacaaggagagattccagttccccgcccaggtgaccgacgtgagcgagaacgccaaggacctgatcagaagactgatctgcagcagagagcacagactgggccagaacggcatcgaggacttcaagaagcaccccttcttcagcggcatcgactgggacaacatcagaaactgcgaggccccctacatccccgaggtgagcagccccaccgacaccagcaacttcgacgtggacgacgactgcctgaagaacagcgagaccatgcccccccccacccacaccgccttcagcggccaccacctgcccttcgtgggcttcacctacaccagcagctgcgtgctgagcgacagaagctgcctgagagtgaccgccggccccaccagcctggacctggacgtgaacgtgcagagaaccctggacaacaacctggccaccgaggcctacgagagaagaatcaagagactggagcaggagaagctggagctgagcagaaagctgcaggagagcacccagaccgtgcaggccctgcagtacagcaccgtggacggccccctgaccgccagcaaggacctggagatcaagaacctgaaggaggagatcgagaagctgagaaagcaggtgaccgagagcagccacctggagcagcagctggaggaggccaacgccgtgagacaggagctggacgacgccttcagacagatcaaggcctacgagaagcagatcaagaccctgcagcaggagagagaggacctgaacaaggagctggtgcaggccagcgagagactgaagaaccagagcaaggagctgaaggacgcccactgccagagaaagctggccatgcaggagttcatggagatcaacgagagactgaccgagctgcacacccagaagcagaagctggccagacacgtgagagacaaggaggaggaggtggacctggtgatgcagaaggtggagagcctgagacaggagctgagaagaaccgagagagccaagaaggagctggaggtgcacaccgaggccctggccgccgaggccagcaaggacagaaagctgagagagcagagcgagcactacagcaagcagctggagaacgagctggagggcctgaagcagaagcagatcagctacagccccggcgtgtgcagcatcgagcaccagcaggagatcaccaagctgaagaccgacctggagaagaagagcatcttctacgaggaggagctgagcaagagagagggcatccacgccaacgagatcaagaacctgaagaaggagctgcacgacagcgagggccagcagctggccctgaacaaggagatcatgatcctgaaggacaagctggagaagaccagaagagagagccagagcgagagagaggagttcgagagcgagttcaagcagcagtacgagagagagaaggtgctgctgaccgaggagaacaagaagctgaccagcgagctggacaagctgaccaccctgtacgagaacctgagcatccacaaccagcagctggaggaggaggtgaaggacctggccgacaagaaggagagcgtggcccactgggaggcccagatcaccgagatcatccagtgggtgagcgacgagaaggacgccagaggctacctgcaggccctggccagcaagatgaccgaggagctggaggccctgagaaacagcagcctgggcaccagagccaccgacatgccctggaagatgagaagattcgccaagctggacatgagcgccagactggagctgcagagcgccctggacgccgagatcagagccaagcaggccatccaggaggagctgaacaaggtgaaggccagcaacatcatcaccgagtgcaagctgaaggacagcgagaagaagaacctggagctgctgagcgagatcgagcagctgatcaaggacaccgaggagctgagaagcgagaagggcatcgagcaccaggacagccagcacagcttcctggccttcctgaacacccccaccgacgccctggaccagttcgagaccgaccccgtggagaacacctacgtgtggaaccccagcgtgaagttccacatccagagcagaagcaccagccccagcaccagcagcgaggccgagcccgtgaagaccgtggacagcacccccctgagcgtgcacacccccaccctgagaaagaagggctgccccggcagcaccggcttcccccccaagagaaagacccaccagttcttcgtgaagagcttcaccacccccaccaagtgccaccagtgcaccagcctgatggtgggcctgatcagacagggctgcagctgcgaggtgtgcggcttcagctgccacatcacctgcgtgaacaaggcccccaccacctgccccgtgccccccgagcagaccaagggccccctgggcatcgacccccagaagggcatcggcaccgcctacgagggccacgtgagaatccccaagcccgccggcgtgaagaagggctggcagagagccctggccatcgtgtgcgacttcaagctgttcctgtacgacatcgccgagggcaaggccagccagcccagcgtggtgatcagccaggtgatcgacatgagagacgaggagttcagcgtgagcagcgtgctggccagcgacgtgatccacgccagcagaaaggacatcccctgcatcttcagagtgaccgccagccagctgagcgccagcaacaacaagtgcagcatcctgatgctggccgacaccgagaacgagaagaacaagtgggtgggcgtgctgagcgagctgcacaagatcctgaagaagaacaagttcagagacagaagcgtgtacgtgcccaaggaggcctacgacagcaccctgcccctgatcaagaccacccaggccgccgccatcatcgaccacgagagaatcgccctgggcaacgaggagggcctgttcgtggtgcacgtgaccaaggacgagatcatcagagtgggcgacaacaagaagatccaccagatcgagctgatccccaacgaccagctggtggccgtgatcagcggcagaaacagacacgtgagactgttccccatgagcgccctggacggcagagagaccgacttctacaagctgagcgagaccaagggctgccagaccgtgaccagcggcaaggtgagacacggcgccctgacctgcctgtgcgtggccatgaagagacaggtgctgtgctacgagctgttccagagcaagaccagacacagaaagttcaaggagatccaggtgccctacaacgtgcagtggatggccatcttcagcgagcagctgtgcgtgggcttccagagcggcttcctgagataccccctgaacggcgagggcaacccctacagcatgctgcacagcaacgaccacaccctgagcttcatcgcccaccagcccatggacgccatctgcgccgtggagatcagcagcaaggagtacctgctgtgcttcaacagcatcggcatctacaccgactgccagggcagaagaagcagacagcaggagctgatgtggcccgccaaccccagcagctgctgctacaacgccccctacctgagcgtgtacagcgagaacgccgtggacatcttcgacgtgaacagcatggagtggatccagaccctgcccctgaagaaggtgagacccctgaacaacgagggcagcctgaacctgctgggcctggagaccatcagactgatctacttcaagaacaagatggccgagggcgacgagctggtggtgcccgagaccagcgacaacagcagaaagcagatggtgagaaacatcaacaacaagagaagatacagcttcagagtgcccgaggaggagagaatgcagcagagaagagagatgctgagagaccccgagatgagaaacaagctgatcagcaaccccaccaacttcaaccacatcgcccacatgggccccggcgacggcatccagatcctgaaggacctgcccatgaaccccagaccccaggagagcagaaccgtgttcagcggcagcgtgagcatccccagcatcaccaagagcagacccgagcccggcagaagcatgagcgccagcagcggcctgagcgccagaagcagcgcccagaacggcagcgccctgaagagagagttcagcggcggcagctacagcgccaagagacagcccatgcccagccccagcgagggcagcctgagcagcggcggcatggaccagggcagcgacgcccccgccagagacttcgacggcgaggacagcgacagccccagacacagcaccgccagcaacagcagcaacctgagcagcccccccagccccgccagccccagaaagaccaagagcctgagcctggagagcaccgacagaggcagctgggacccctag

SEQ ID NO: 76092 - DNA, 4917 bp, synthetic construct
  misc_feature 1..4917: note = Description of Artificial Sequence: Synthetic coding sequence
  source 1..4917: mol_type = other DNA
atgagcggcgaggtgagactgagacagctggagcagttcatcctggacggccccgcccagaccaacggccagtgcttcagcgtggagaccctgctggacatcctgatctgcctgtacgacgagtgcaacaacagccccctgagaagagagaagaacatcctggagtacctggagtgggccaagcccttcaccagcaaggtgaagcagatgagactgcacagagaggacttcgagatcctgaaggtgatcggcagaggcgccttcggcgaggtggccgtggtgaagctgaagaacgccgacaaggtgttcgccatgaagatcctgaacaagtgggagatgctgaagagagccgagaccgcctgcttcagagaggagagagacgtgctggtgaacggcgacaacaagtggatcaccaccctgcactacgccttccaggacgacaacaacctgtacctggtgatggactactacgtgggcggcgacctgctgaccctgctgagcaagttcgaggacagactgcccgaggacatggccagattctacctggccgagatggtgatcgccatcgacagcgtgcaccagctgcactacgtgcacagagacatcaagcccgacaacatcctgatggacatgaacggccacatcagactggccgacttcggcagctgcctgaagctgatggaggacggcaccgtgcagagcagcgtggccgtgggcacccccgactacatcagccccgagatcctgcaggccatggaggacggcaagggcagatacggccccgagtgcgactggtggagcctgggcgtgtgcatgtacgagatgctgtacggcgagacccccttctacgccgagagcctggtggagacctacggcaagatcatgaaccacaaggagagattccagttccccgcccaggtgaccgacgtgagcgagaacgccaaggacctgatcagaagactgatctgcagcagagagcacagactgggccagaacggcatcgaggacttcaagaagcaccccttcttcagcggcatcgactgggacaacatcagaaactgcgaggccccctacatccccgaggtgagcagccccaccgacaccagcaacttcgacgtggacgacgactgcctgaagaacagcgagaccatgcccccccccacccacaccgccttcagcggccaccacctgcccttcgtgggcttcacctacaccagcagctgcgtgctgagcgacagaagctgcctgagagtgaccgccggccccaccagcctggacctggacgtgaacgtgcagagaaccctggacaacaacctggccaccgaggcctacgagagaagaatcaagagactggagcaggagaagctggagctgagcagaaagctgcaggagagcacccagaccgtgcaggccctgcagtacagcaccgtggacggccccctgaccgccagcaaggacctggagatcaagaacctgaaggaggagatcgagaagctgagaaagcaggtgaccgagagcagccacctggagcagcagctggaggaggccaacgccgtgagacaggagctggacgacgccttcagacagatcaaggcctacgagaagcagatcaagaccctgcagcaggagagagaggacctgaacaagctggaggtgcacaccgaggccctggccgccgaggccagcaaggacagaaagctgagagagcagagcgagcactacagcaagcagctggagaacgagctggagggcctgaagcagaagcagatcagctacagccccggcgtgtgcagcatcgagcaccagcaggagatcaccaagctgaagaccgacctggagaagaagagcatcttctacgaggaggagctgagcaagagagagggcatccacgccaacgagatcaagaacctgaagaaggagctgcacgacagcgagggccagcagctggccctgaacaaggagatcatgatcctgaaggacaagctggagaagaccagaagagagagccagagcgagagagaggagttcgagagcgagttcaagcagcagtacgagagagagaaggtgctgctgaccgaggagaacaagaagctgaccagcgagctggacaagctgaccaccctgtacgagaacctgagcatccacaaccagcagctggaggaggaggtgaaggacctggccgacaagaaggagagcgtggcccactgggaggcccagatcaccgagatcatccagtgggtgagcgacgagaaggacgccagaggctacctgcaggccctggccagcaagatgaccgaggagctggaggccctgagaaacagcagcctgggcaccagagccaccgacatgccctggaagatgagaagattcgccaagctggacatgagcgccagactggagctgcagagcgccctggacgccgagatcagagccaagcaggccatccaggaggagctgaacaaggtgaaggccagcaacatcatcaccgagtgcaagctgaaggacagcgagaagaagaacctggagctgctgagcgagatcgagcagctgatcaaggacaccgaggagctgagaagcgagaagggcatcgagcaccaggacagccagcacagcttcctggccttcctgaacacccccaccgacgccctggaccagttcgagaccgtggacagcacccccctgagcgtgcacacccccaccctgagaaagaagggctgccccggcagcaccggcttcccccccaagagaaagacccaccagttcttcgtgaagagcttcaccacccccaccaagtgccaccagtgcaccagcctgatggtgggcctgatcagacagggctgcagctgcgaggtgtgcggcttcagctgccacatcacctgcgtgaacaaggcccccaccacctgccccgtgccccccgagcagaccaagggccccctgggcatcgacccccagaagggcatcggcaccgcctacgagggccacgtgagaatccccaagcccgccggcgtgaagaagggctggcagagagccctggccatcgtgtgcgacttcaagctgttcctgtacgacatcgccgagggcaaggccagccagcccagcgtggtgatcagccaggtgatcgacatgagagacgaggagttcagcgtgagcagcgtgctggccagcgacgtgatccacgccagcagaaaggacatcccctgcatcttcagagtgaccgccagccagctgagcgccagcaacaacaagtgcagcatcctgatgctggccgacaccgagaacgagaagaacaagtgggtgggcgtgctgagcgagctgcacaagatcctgaagaagaacaagttcagagacagaagcgtgtacgtgcccaaggaggcctacgacagcaccctgcccctgatcaagaccacccaggccgccgccatcatcgaccacgagagaatcgccctgggcaacgaggagggcctgttcgtggtgcacgtgaccaaggacgagatcatcagagtgggcgacaacaagaagatccaccagatcgagctgatccccaacgaccagctggtggccgtgatcagcggcagaaacagacacgtgagactgttccccatgagcgccctggacggcagagagaccgacttctacaagctgagcgagaccaagggctgccagaccgtgaccagcggcaaggtgagacacggcgccctgacctgcctgtgcgtggccatgaagagacaggtgctgtgctacgagctgttccagagcaagaccagacacagaaagttcaaggagatccaggtgccctacaacgtgcagtggatggccatcttcagcgagcagctgtgcgtgggcttccagagcggcttcctgagataccccctgaacggcgagggcaacccctacagcatgctgcacagcaacgaccacaccctgagcttcatcgcccaccagcccatggacgccatctgcgccgtggagatcagcagcaaggagtacctgctgtgcttcaacagcatcggcatctacaccgactgccagggcagaagaagcagacagcaggagctgatgtggcccgccaaccccagcagctgctgctacaacgccccctacctgagcgtgtacagcgagaacgccgtggacatcttcgacgtgaacagcatggagtggatccagaccctgcccctgaagaaggtgagacccctgaacaacgagggcagcctgaacctgctgggcctggagaccatcagactgatctacttcaagaacaagatggccgagggcgacgagctggtggtgcccgagaccagcgacaacagcagaaagcagatggtgagaaacatcaacaacaagagaagatacagcttcagagtgcccgaggaggagagaatgcagcagagaagagagatgctgagagaccccgagatgagaaacaagctgatcagcaaccccaccaacttcaaccacatcgcccacatgggccccggcgacggcatccagatcctgaaggacctgcccatgaaccccagaccccaggagagcagaaccgtgttcagcggcagcgtgagcatccccagcatcaccaagagcagacccgagcccggcagaagcatgagcgccagcagcggcctgagcgccagaagcagcgcccagaacggcagcgccctgaagagagagttcagcggcggcagctacagcgccaagagacagcccatgcccagccccagcgagggcagcctgagcagcggcggcatggaccagggcagcgacgcccccgccagagacttcgacggcgaggacagcgacagccccagacacagcaccgccagcaacagcagcaacctgagcagcccccccagccccgccagccccagaaagaccaagagcctgagcctggagagcaccgacagaggcagctgggacccctag

SEQ ID NO: 76093 - DNA, 5160 bp, synthetic construct
  misc_feature 1..5160: note = Description of Artificial Sequence: Synthetic coding sequence
  source 1..5160: mol_type = other DNA
atgagcggcgaggtgagactgagacagctggagcagttcatcctggacggccccgcccagaccaacggccagtgcttcagcgtggagaccctgctggacatcctgatctgcctgtacgacgagtgcaacaacagccccctgagaagagagaagaacatcctggagtacctggagtgggccaagcccttcaccagcaaggtgaagcagatgagactgcacagagaggacttcgagatcctgaaggtgatcggcagaggcgccttcggcgaggtggccgtggtgaagctgaagaacgccgacaaggtgttcgccatgaagatcctgaacaagtgggagatgctgaagagagccgagaccgcctgcttcagagaggagagagacgtgctggtgaacggcgacaacaagtggatcaccaccctgcactacgccttccaggacgacaacaacctgtacctggtgatggactactacgtgggcggcgacctgctgaccctgctgagcaagttcgaggacagactgcccgaggacatggccagattctacctggccgagatggtgatcgccatcgacagcgtgcaccagctgcactacgtgcacagagacatcaagcccgacaacatcctgatggacatgaacggccacatcagactggccgacttcggcagctgcctgaagctgatggaggacggcaccgtgcagagcagcgtggccgtgggcacccccgactacatcagccccgagatcctgcaggccatggaggacggcaagggcagatacggccccgagtgcgactggtggagcctgggcgtgtgcatgtacgagatgctgtacggcgagacccccttctacgccgagagcctggtggagacctacggcaagatcatgaaccacaaggagagattccagttccccgcccaggtgaccgacgtgagcgagaacgccaaggacctgatcagaagactgatctgcagcagagagcacagactgggccagaacggcatcgaggacttcaagaagcaccccttcttcagcggcatcgactgggacaacatcagaaactgcgaggccccctacatccccgaggtgagcagccccaccgacaccagcaacttcgacgtggacgacgactgcctgaagaacagcgagaccatgcccccccccacccacaccgccttcagcggccaccacctgcccttcgtgggcttcacctacaccagcagctgcgtgctgagcgacagaagctgcctgagagtgaccgccggccccaccagcctggacctggacgtgaacgtgcagagaaccctggacaacaacctggccaccgaggcctacgagagaagaatcaagagactggagcaggagaagctggagctgagcagaaagctgcaggagagcacccagaccgtgcaggccctgcagtacagcaccgtggacggccccctgaccgccagcaaggacctggagatcaagaacctgaaggaggagatcgagaagctgagaaagcaggtgaccgagagcagccacctggagcagcagctggaggaggccaacgccgtgagacaggagctggacgacgccttcagacagatcaaggcctacgagaagcagatcaagaccctgcagcaggagagagaggacctgaacaaggagctggtgcaggccagcgagagactgaagaaccagagcaaggagctgaaggacgcccactgccagagaaagctggccatgcaggagttcatggagatcaacgagagactgaccgagctgcacacccagaagcagaagctggccagacacgtgagagacaaggaggaggaggtggacctggtgatgcagaaggtggagagcctgagacaggagctgagaagaaccgagagagccaagaaggagctggaggtgcacaccgaggccctggccgccgaggccagcaaggacagaaagctgagagagcagagcgagcactacagcaagcagctggagaacgagctggagggcctgaagcagaagcagatcagctacagccccggcgtgtgcagcatcgagcaccagcaggagatcaccaagctgaagaccgacctggagaagaagagcatcttctacgaggaggagctgagcaagagagagggcatccacgccaacgagatcaagaacctgaagaaggagctgcacgacagcgagggccagcagctggccctgaacaaggagatcatgatcctgaaggacaagctggagaagaccagaagagagagccagagcgagagagaggagttcgagagcgagttcaagcagcagtacgagagagagaaggtgctgctgaccgaggagaacaagaagctgaccagcgagctggacaagctgaccaccctgtacgagaacctgagcatccacaaccagcagctggaggaggaggtgaaggacctggccgacaagaaggagagcgtggcccactgggaggcccagatcaccgagatcatccagtgggtgagcgacgagaaggacgccagaggctacctgcaggccctggccagcaagatgaccgaggagctggaggccctgagaaacagcagcctgggcaccagagccaccgacatgccctggaagatgagaagattcgccaagctggacatgagcgccagactggagctgcagagcgccctggacgccgagatcagagccaagcaggccatccaggaggagctgaacaaggtgaaggccagcaacatcatcaccgagtgcaagctgaaggacagcgagaagaagaacctggagctgctgagcgagatcgagcagctgatcaaggacaccgaggagctgagaagcgagaagggcatcgagcaccaggacagccagcacagcttcctggccttcctgaacacccccaccgacgccctggaccagttcgagaccgtggacagcacccccctgagcgtgcacacccccaccctgagaaagaagggctgccccggcagcaccggcttcccccccaagagaaagacccaccagttcttcgtgaagagcttcaccacccccaccaagtgccaccagtgcaccagcctgatggtgggcctgatcagacagggctgcagctgcgaggtgtgcggcttcagctgccacatcacctgcgtgaacaaggcccccaccacctgccccgtgccccccgagcagaccaagggccccctgggcatcgacccccagaagggcatcggcaccgcctacgagggccacgtgagaatccccaagcccgccggcgtgaagaagggctggcagagagccctggccatcgtgtgcgacttcaagctgttcctgtacgacatcgccgagggcaaggccagccagcccagcgtggtgatcagccaggtgatcgacatgagagacgaggagttcagcgtgagcagcgtgctggccagcgacgtgatccacgccagcagaaaggacatcccctgcatcttcagagtgaccgccagccagctgagcgccagcaacaacaagtgcagcatcctgatgctggccgacaccgagaacgagaagaacaagtgggtgggcgtgctgagcgagctgcacaagatcctgaagaagaacaagttcagagacagaagcgtgtacgtgcccaaggaggcctacgacagcaccctgcccctgatcaagaccacccaggccgccgccatcatcgaccacgagagaatcgccctgggcaacgaggagggcctgttcgtggtgcacgtgaccaaggacgagatcatcagagtgggcgacaacaagaagatccaccagatcgagctgatccccaacgaccagctggtggccgtgatcagcggcagaaacagacacgtgagactgttccccatgagcgccctggacggcagagagaccgacttctacaagctgagcgagaccaagggctgccagaccgtgaccagcggcaaggtgagacacggcgccctgacctgcctgtgcgtggccatgaagagacaggtgctgtgctacgagctgttccagagcaagaccagacacagaaagttcaaggagatccaggtgccctacaacgtgcagtggatggccatcttcagcgagcagctgtgcgtgggcttccagagcggcttcctgagataccccctgaacggcgagggcaacccctacagcatgctgcacagcaacgaccacaccctgagcttcatcgcccaccagcccatggacgccatctgcgccgtggagatcagcagcaaggagtacctgctgtgcttcaacagcatcggcatctacaccgactgccagggcagaagaagcagacagcaggagctgatgtggcccgccaaccccagcagctgctgctacaacgccccctacctgagcgtgtacagcgagaacgccgtggacatcttcgacgtgaacagcatggagtggatccagaccctgcccctgaagaaggtgagacccctgaacaacgagggcagcctgaacctgctgggcctggagaccatcagactgatctacttcaagaacaagatggccgagggcgacgagctggtggtgcccgagaccagcgacaacagcagaaagcagatggtgagaaacatcaacaacaagagaagatacagcttcagagtgcccgaggaggagagaatgcagcagagaagagagatgctgagagaccccgagatgagaaacaagctgatcagcaaccccaccaacttcaaccacatcgcccacatgggccccggcgacggcatccagatcctgaaggacctgcccatgaaccccagaccccaggagagcagaaccgtgttcagcggcagcgtgagcatccccagcatcaccaagagcagacccgagcccggcagaagcatgagcgccagcagcggcctgagcgccagaagcagcgcccagaacggcagcgccctgaagagagagttcagcggcggcagctacagcgccaagagacagcccatgcccagccccagcgagggcagcctgagcagcggcggcatggaccagggcagcgacgcccccgccagagacttcgacggcgaggacagcgacagccccagacacagcaccgccagcaacagcagcaacctgagcagcccccccagccccgccagccccagaaagaccaagagcctgagcctggagagcaccgacagaggcagctgggacccctag

SEQ ID NO: 76094 - DNA, 1641 bp, synthetic construct
  misc_feature 1..1641: note = Description of Artificial Sequence: Synthetic coding sequence
  source 1..1641: mol_type = other DNA
tgagacatcgccgagggcaaggccagccagcccagcgtggtgatcagccaggtgatcgacatgagagacgaggagttcagcgtgagcagcgtgctggccagcgacgtgatccacgccagcagaaaggacatcccctgcatcttcagagtgaccgccagccagctgagcgccagcaacaacaagtgcagcatcctgatgctggccgacaccgagaacgagaagaacaagtgggtgggcgtgctgagcgagctgcacaagatcctgaagaagaacaagttcagagacagaagcgtgtacgtgcccaaggaggcctacgacagcaccctgcccctgatcaagaccacccaggccgccgccatcatcgaccacgagagaatcgccctgggcaacgaggagggcctgttcgtggtgcacgtgaccaaggacgagatcatcagagtgggcgacaacaagaagatccaccagatcgagctgatccccaacgaccagctggtggccgtgatcagcggcagaaacagacacgtgagactgttccccatgagcgccctggacggcagagagaccgacttctacaagctgagcgagaccaagggctgccagaccgtgaccagcggcaaggtgagacacggcgccctgacctgcctgtgcgtggccatgaagagacaggtgctgtgctacgagctgttccagagcaagaccagacacagaaagttcaaggagatccaggtgccctacaacgtgcagtggatggccatcttcagcgagcagctgtgcgtgggcttccagagcggcttcctgagataccccctgaacggcgagggcaacccctacagcatgctgcacagcaacgaccacaccctgagcttcatcgcccaccagcccatggacgccatctgcgccgtggagatcagcagcaaggagtacctgctgtgcttcaacagcatcggcatctacaccgactgccagggcagaagaagcagacagcaggagctgatgtggcccgccaaccccagcagctgctgctacaacgccccctacctgagcgtgtacagcgagaacgccgtggacatcttcgacgtgaacagcatggagtggatccagaccctgcccctgaagaaggtgagacccctgaacaacgagggcagcctgaacctgctgggcctggagaccatcagactgatctacttcaagaacaagatggccgagggcgacgagctggtggtgcccgagaccagcgacaacagcagaaagcagatggtgagaaacatcaacaacaagagaagatacagcttcagagtgcccgaggaggagagaatgcagcagagaagagagatgctgagagaccccgagatgagaaacaagctgatcagcaaccccaccaacttcaaccacatcgcccacatgggccccggcgacggcatccagatcctgaaggacctgcccatgaaccccagaccccaggagagcagaaccgtgttcagcggcagcgtgagcatccccagcatcaccaagagcagacccgagcccggcagaagcatgagcgccagcagcggcctgagcgccagcaagtgcagaggctacagaaaggtgcccctgagacagggcgacccccagctgccccccctgctgagcagaggctag

SEQ ID NO: 76095 - DNA, 2187 bp, synthetic construct
  misc_feature 1..2187: note = Description of Artificial Sequence: Synthetic coding sequence
  source 1..2187: mol_type = other DNA
tgagtgagcgacgagaaggacgccagaggctacctgcaggccctggccagcaagatgaccgaggagctggaggccctgagaaacagcagcctgggcaccagagccaccgacatgccctggaagatgagaagattcgccaagctggacatgagcgccagactggagctgcagagcgccctggacgccgagatcagagccaagcaggccatccaggaggagctgaacaaggtgaaggccagcaacatcatcaccgagtgcaagctgaaggacagcgagaagaagaacctggagctgctgagcgagatcgagcagctgatcaaggacaccgaggagctgagaagcgagaagggcatcgagcaccaggacagccagcacagcttcctggccttcctgaacacccccaccgacgccctggaccagttcgaggacagcttcagcagcagcagcagcagcctgatcgacttcctggacgacaccgaccccgtggagaacacctacgtgtggaaccccagcgtgaagttccacatccagagcagaagcaccagccccagcaccagcagcgaggccgagcccgtgaagaccgtggacagcacccccctgagcgtgcacacccccaccctgagaaagaagggctgccccggcagcaccggcttcccccccaagagaaagacccaccagttcttcgtgaagagcttcaccacccccaccaagtgccaccagtgcaccagcctgatggtgggcctgatcagacagggctgcagctgcgaggtgtgcggcttcagctgccacatcacctgcgtgaacaaggcccccaccacctgccccgtgccccccgagcagaccaagggccccctgggcatcgacccccagaagggcatcggcaccgcctacgagggccacgtgagaatccccaagcccgccggcgtgaagaagggctggcagagagccctggccatcgtgtgcgacttcaagctgttcctgtacgacatcgccgagggcaaggccagccagcccagcgtggtgatcagccaggtgatcgacatgagagacgaggagttcagcgtgagcagcgtgctggccagcgacgtgatccacgccagcagaaaggacatcccctgcatcttcagagtgaccgccagccagctgagcgccagcaacaacaagtgcagcatcctgatgctggccgacaccgagaacgagaagaacaagtgggtgggcgtgctgagcgagctgcacaagatcctgaagaagaacaagttcagagacagaagcgtgtacgtgcccaaggaggcctacgacagcaccctgcccctgatcaagaccacccaggccgccgccatcatcgaccacgagagaatcgccctgggcaacgaggagggcctgttcgtggtgcacgtgaccaaggacgagatcatcagagtgggcgacaacaagaagatccaccagatcgagctgatccccaacgaccagctggtggccgtgatcagcggcagaaacagacacgtgagactgttccccatgagcgccctggacggcagagagaccgacttctacaagctgagcgagaccaagggctgccagaccgtgaccagcggcaaggtgagacacggcgccctgacctgcctgtgcgtggccatgaagagacaggtgctgtgctacgagctgttccagagcaagaccagacacagaaagttcaaggagatccaggtgccctacaacgtgcagtggatggccatcttcagcgagcagctgtgcgtgggcttccagagcggcttcctgagataccccctgaacggcgagggcaacccctacagcatgctgcacagcaacgaccacaccctgagcttcatcgcccaccagcccatggacgccatctgcgccgtggagatcagcagcaaggagtacctgctgtgcttcaacagcatcggcatctacaccgactgccagggcagaagaagcagacagcaggagctgatgtggcccgccaaccccagcagctgctgctacaacgccccctacctgagcgtgtacagcgagaacgccgtggacatcttcgacgtgaacagcatggagtggatccagaccctgcccctgaagaaggtgagacccctgaacaacgagggcagcctgaacctgctgggcctggagaccatcagactgatctacttcaagaacaagatggcctag

SEQ ID NO: 76096 - DNA, 3147 bp, synthetic construct
  misc_feature 1..3147: note = Description of Artificial Sequence: Synthetic coding sequence
  source 1..3147: mol_type = other DNA
tgagagggcatccacgccaacgagatcaagaacctgaagaaggagctgcacgacagcgagggccagcagctggccctgaacaaggagatcatgatcctgaaggacaagctggagaagaccagaagagagagccagagcgagagagaggagttcgagagcgagttcaagcagcagtacgagagagagaaggtgctgctgaccgaggagaacaagaagctgaccagcgagctggacaagctgaccaccctgtacgagaacctgagcatccacaaccagcagctggaggaggaggtgaaggacctggccgacaagaaggagagcgtggcccactgggaggcccagatcaccgagatcatccagtgggtgagcgacgagaaggacgccagaggctacctgcaggccctggccagcaagatgaccgaggagctggaggccctgagaaacagcagcctgggcaccagagccaccgacatgccctggaagatgagaagattcgccaagctggacatgagcgccagactggagctgcagagcgccctggacgccgagatcagagccaagcaggccatccaggaggagctgaacaaggtgaaggccagcaacatcatcaccgagtgcaagctgaaggacagcgagaagaagaacctggagctgctgagcgagatcgagcagctgatcaaggacaccgaggagctgagaagcgagaagggcatcgagcaccaggacagccagcacagcttcctggccttcctgaacacccccaccgacgccctggaccagttcgagaccgaccccgtggagaacacctacgtgtggaaccccagcgtgaagttccacatccagagcagaagcaccagccccagcaccagcagcgaggccgagcccgtgaagaccgtggacagcacccccctgagcgtgcacacccccaccctgagaaagaagggctgccccggcagcaccggcttcccccccaagagaaagacccaccagttcttcgtgaagagcttcaccacccccaccaagtgccaccagtgcaccagcctgatggtgggcctgatcagacagggctgcagctgcgaggtgtgcggcttcagctgccacatcacctgcgtgaacaaggcccccaccacctgccccgtgccccccgagcagaccaagggccccctgggcatcgacccccagaagggcatcggcaccgcctacgagggccacgtgagaatccccaagcccgccggcgtgaagaagggctggcagagagccctggccatcgtgtgcgacttcaagctgttcctgtacgacatcgccgagggcaaggccagccagcccagcgtggtgatcagccaggtgatcgacatgagagacgaggagttcagcgtgagcagcgtgctggccagcgacgtgatccacgccagcagaaaggacatcccctgcatcttcagagtgaccgccagccagctgagcgccagcaacaacaagtgcagcatcctgatgctggccgacaccgagaacgagaagaacaagtgggtgggcgtgctgagcgagctgcacaagatcctgaagaagaacaagttcagagacagaagcgtgtacgtgcccaaggaggcctacgacagcaccctgcccctgatcaagaccacccaggccgccgccatcatcgaccacgagagaatcgccctgggcaacgaggagggcctgttcgtggtgcacgtgaccaaggacgagatcatcagagtgggcgacaacaagaagatccaccagatcgagctgatccccaacgaccagctggtggccgtgatcagcggcagaaacagacacgtgagactgttccccatgagcgccctggacggcagagagaccgacttctacaagctgagcgagaccaagggctgccagaccgtgaccagcggcaaggtgagacacggcgccctgacctgcctgtgcgtggccatgaagagacaggtgctgtgctacgagctgttccagagcaagaccagacacagaaagttcaaggagatccaggtgccctacaacgtgcagtggatggccatcttcagcgagcagctgtgcgtgggcttccagagcggcttcctgagataccccctgaacggcgagggcaacccctacagcatgctgcacagcaacgaccacaccctgagcttcatcgcccaccagcccatggacgccatctgcgccgtggagatcagcagcaaggagtacctgctgtgcttcaacagcatcggcatctacaccgactgccagggcagaagaagcagacagcaggagctgatgtggcccgccaaccccagcagctgctgctacaacgccccctacctgagcgtgtacagcgagaacgccgtggacatcttcgacgtgaacagcatggagtggatccagaccctgcccctgaagaaggtgagacccctgaacaacgagggcagcctgaacctgctgggcctggagaccatcagactgatctacttcaagaacaagatggccgagggcgacgagctggtggtgcccgagaccagcgacaacagcagaaagcagatggtgagaaacatcaacaacaagagaagatacagcttcagagtgcccgaggaggagagaatgcagcagagaagagagatgctgagagaccccgagatgagaaacaagctgatcagcaaccccaccaacttcaaccacatcgcccacatgggccccggcgacggcatccagatcctgaaggacctgcccatgaaccccagaccccaggagagcagaaccgtgttcagcggcagcgtgagcatccccagcatcaccaagagcagacccgagcccggcagaagcatgagcgccagcagcggcctgagcgccagaagcagcgcccagaacggcagcgccctgaagagagagttcagcggcggcagctacagcgccaagagacagcccatgcccagccccagcgagggcagcctgagcagcggcggcatggaccagggcagcgacgcccccgccagagacttcgacggcgaggacagcgacagccccagacacagcaccgccagcaacagcagcaacctgagcagcccccccagccccgccagccccagaaagaccaagagcctgagcctggagagcaccgacagaggcagctgggacccctag

SEQ ID NO: 76097 - DNA, 2955 bp, synthetic construct
  misc_feature 1..2955: note = Description of Artificial Sequence: Synthetic coding sequence
  source 1..2955: mol_type = other DNA
tgacagctggaggaggaggtgaaggacctggccgacaagaaggagagcgtggcccactgggaggcccagatcaccgagatcatccagtgggtgagcgacgagaaggacgccagaggctacctgcaggccctggccagcaagatgaccgaggagctggaggccctgagaaacagcagcctgggcaccagagccaccgacatgccctggaagatgagaagattcgccaagctggacatgagcgccagactggagctgcagagcgccctggacgccgagatcagagccaagcaggccatccaggaggagctgaacaaggtgaaggccagcaacatcatcaccgagtgcaagctgaaggacagcgagaagaagaacctggagctgctgagcgagatcgagcagctgatcaaggacaccgaggagctgagaagcgagaagggcatcgagcaccaggacagccagcacagcttcctggccttcctgaacacccccaccgacgccctggaccagttcgagaccgtggacagcacccccctgagcgtgcacacccccaccctgagaaagaagggctgccccggcagcaccggcttcccccccaagagaaagacccaccagttcttcgtgaagagcttcaccacccccaccaagtgccaccagtgcaccagcctgatggtgggcctgatcagacagggctgcagctgcgaggtgtgcggcttcagctgccacatcacctgcgtgaacaaggcccccaccacctgccccgtgccccccgagcagaccaagggccccctgggcatcgacccccagaagggcatcggcaccgcctacgagggccacgtgagaatccccaagcccgccggcgtgaagaagggctggcagagagccctggccatcgtgtgcgacttcaagctgttcctgtacgacatcgccgagggcaaggccagccagcccagcgtggtgatcagccaggtgatcgacatgagagacgaggagttcagcgtgagcagcgtgctggccagcgacgtgatccacgccagcagaaaggacatcccctgcatcttcagagtgaccgccagccagctgagcgccagcaacaacaagtgcagcatcctgatgctggccgacaccgagaacgagaagaacaagtgggtgggcgtgctgagcgagctgcacaagatcctgaagaagaacaagttcagagacagaagcgtgtacgtgcccaaggaggcctacgacagcaccctgcccctgatcaagaccacccaggccgccgccatcatcgaccacgagagaatcgccctgggcaacgaggagggcctgttcgtggtgcacgtgaccaaggacgagatcatcagagtgggcgacaacaagaagatccaccagatcgagctgatccccaacgaccagctggtggccgtgatcagcggcagaaacagacacgtgagactgttccccatgagcgccctggacggcagagagaccgacttctacaagctgagcgagaccaagggctgccagaccgtgaccagcggcaaggtgagacacggcgccctgacctgcctgtgcgtggccatgaagagacaggtgctgtgctacgagctgttccagagcaagaccagacacagaaagttcaaggagatccaggtgccctacaacgtgcagtggatggccatcttcagcgagcagctgtgcgtgggcttccagagcggcttcctgagataccccctgaacggcgagggcaacccctacagcatgctgcacagcaacgaccacaccctgagcttcatcgcccaccagcccatggacgccatctgcgccgtggagatcagcagcaaggagtacctgctgtgcttcaacagcatcggcatctacaccgactgccagggcagaagaagcagacagcaggagctgatgtggcccgccaaccccagcagctgctgctacaacgccccctacctgagcgtgtacagcgagaacgccgtggacatcttcgacgtgaacagcatggagtggatccagaccctgcccctgaagaaggtgagacccctgaacaacgagggcagcctgaacctgctgggcctggagaccatcagactgatctacttcaagaacaagatggccgagggcgacgagctggtggtgcccgagaccagcgacaacagcagaaagcagatggtgagaaacatcaacaacaagagaagatacagcttcagagtgcccgaggaggagagaatgcagcagagaagagagatgctgagagaccccgagatgagaaacaagctgatcagcaaccccaccaacttcaaccacatcgcccacatgggccccggcgacggcatccagatcctgaaggacctgcccatgcccggcttcccctaccccagcccccaccaccacagcggcctgatcagcagccccatcaacttcgagcacatctaccacatgaccgtgaacagcgccgagaagttcctgagccccgacagcatcaaccccgagtacagccccagcctgagaagcgtgcccggcacccccagcttcatgaccctgagaaaccccagaccccaggagagcagaaccgtgttcagcggcagcgtgagcatccccagcatcaccaagagcagacccgagcccggcagaagcatgagcgccagcagcggcctgagcgccagaagcagcgcccagaacggcagcgccctgaagagagagttcagcggcggcagctacagcgccaagagacagcccatgcccagccccagcgagggcagcctgagcagcggcggcatggaccagggcagcgacgcccccgccagagacttcgacggcgaggacagcgacagccccagacacagcaccgccagcaacagcagcaacctgagcagcccccccagccccgccagccccagaaagaccaagagcctgagcctggagagcaccgacagaggcagctgggacccctag

SEQ ID NO: 76098 - DNA, 5100 bp, synthetic construct
  misc_feature 1..5100: note = Description of Artificial Sequence: Synthetic coding sequence
  source 1..5100: mol_type = other DNA
atgagcggcgaggtgagactgagacagctggagcagttcatcctggacggccccgcccagaccaacggccagtgcttcagcgtggagaccctgctggacatcctgatctgcctgtacgacgagtgcaacaacagccccctgagaagagagaagaacatcctggagtacctggagtgggccaagcccttcaccagcaaggtgaagcagatgagactgcacagagaggacttcgagatcctgaaggtgatcggcagaggcgccttcggcgaggtggccgtggtgaagctgaagaacgccgacaaggtgttcgccatgaagatcctgaacaagtgggagatgctgaagagagccgagaccgcctgcttcagagaggagagagacgtgctggtgaacggcgacaacaagtggatcaccaccctgcactacgccttccaggacgacaacaacctgtacctggtgatggactactacgtgggcggcgacctgctgaccctgctgagcaagttcgaggacagactgcccgaggacatggccagattctacctggccgagatggtgatcgccatcgacagcgtgcaccagctgcactacgtgcacagagacatcaagcccgacaacatcctgatggacatgaacggccacatcagactggccgacttcggcagctgcctgaagctgatggaggacggcaccgtgcagagcagcgtggccgtgggcacccccgactacatcagccccgagatcctgcaggccatggaggacggcaagggcagatacggccccgagtgcgactggtggagcctgggcgtgtgcatgtacgagatgctgtacggcgagacccccttctacgccgagagcctggtggagacctacggcaagatcatgaaccacaaggagagattccagttccccgcccaggtgaccgacgtgagcgagaacgccaaggacctgatcagaagactgatctgcagcagagagcacagactgggccagaacggcatcgaggacttcaagaagcaccccttcttcagcggcatcgactgggacaacatcagaaactgcgaggccccctacatccccgaggtgagcagccccaccgacaccagcaacttcgacgtggacgacgactgcctgaagaacagcgagaccatgcccccccccacccacaccgccttcagcggccaccacctgcccttcgtgggcttcacctacaccagcagctgcgtgctgagcgacagaagctgcctgagagtgaccgccggccccaccagcctggacctggacgtgaacgtgcagagaaccctggacaacaacctggccaccgaggcctacgagagaagaatcaagagactggagcaggagaagctggagctgagcagaaagctgcaggagagcacccagaccgtgcaggccctgcagtacagcaccgtggacggccccctgaccgccagcaaggacctggagatcaagaacctgaaggaggagatcgagaagctgagaaagcaggtgaccgagagcagccacctggagcagcagctggaggaggccaacgccgtgagacaggagctggacgacgccttcagacagatcaaggcctacgagaagcagatcaagaccctgcagcaggagagagaggacctgaacaaggagctggtgcaggccagcgagagactgaagaaccagagcaaggagctgaaggacgcccactgccagagaaagctggccatgcaggagttcatggagatcaacgagagactgaccgagctgcacacccagaagcagaagctggccagacacgtgagagacaaggaggaggaggtggacctggtgatgcagaaggtggagagcctgagacaggagctgagaagaaccgagagagccaagaaggagctggaggtgcacaccgaggccctggccgccgaggccagcaaggacagaaagctgagagagcagagcgagcactacagcaagcagctggagaacgagctggagggcctgaagcagaagcagatcagctacagccccggcgtgtgcagcatcgagcaccagcaggagatcaccaagctgaagaccgacctggagaagaagagcatcttctacgaggaggagctgagcaagagagagggcatccacgccaacgagatcaagaacctgaagaaggagctgcacgacagcgagggccagcagctggccctgaacaaggagatcatgatcctgaaggacaagctggagaagaccagaagagagagccagagcgagagagaggagttcgagagcgagttcaagcagcagtacgagagagagaaggtgctgctgaccgaggagaacaagaagctgaccagcgagctggacaagctgaccaccctgtacgagaacctgagcatccacaaccagcagctggaggaggaggtgaaggacctggccgacaagaaggagagcgtggcccactgggaggcccagatcaccgagatcatccagtgggtgagcgacgagaaggacgccagaggctacctgcaggccctggccagcaagatgaccgaggagctggaggccctgagaaacagcagcctgggcaccagagccaccgacatgccctggaagatgagaagattcgccaagctggacatgagcgccagactggagctgcagagcgccctggacgccgagatcagagccaagcaggccatccaggaggagctgaacaaggtgaaggccagcaacatcatcaccgagtgcaagctgaaggacagcgagaagaagaacctggagctgctgagcgagatcgagcagctgatcaaggacaccgaggagctgagaagcgagaaggccagcaagggcagaagaaccgtggacagcacccccctgagcgtgcacacccccaccctgagaaagaagggctgccccggcagcaccggcttcccccccaagagaaagacccaccagttcttcgtgaagagcttcaccacccccaccaagtgccaccagtgcaccagcctgatggtgggcctgatcagacagggctgcagctgcgaggtgtgcggcttcagctgccacatcacctgcgtgaacaaggcccccaccacctgccccgtgccccccgagcagaccaagggccccctgggcatcgacccccagaagggcatcggcaccgcctacgagggccacgtgagaatccccaagcccgccggcgtgaagaagggctggcagagagccctggccatcgtgtgcgacttcaagctgttcctgtacgacatcgccgagggcaaggccagccagcccagcgtggtgatcagccaggtgatcgacatgagagacgaggagttcagcgtgagcagcgtgctggccagcgacgtgatccacgccagcagaaaggacatcccctgcatcttcagagtgaccgccagccagctgagcgccagcaacaacaagtgcagcatcctgatgctggccgacaccgagaacgagaagaacaagtgggtgggcgtgctgagcgagctgcacaagatcctgaagaagaacaagttcagagacagaagcgtgtacgtgcccaaggaggcctacgacagcaccctgcccctgatcaagaccacccaggccgccgccatcatcgaccacgagagaatcgccctgggcaacgaggagggcctgttcgtggtgcacgtgaccaaggacgagatcatcagagtgggcgacaacaagaagatccaccagatcgagctgatccccaacgaccagctggtggccgtgatcagcggcagaaacagacacgtgagactgttccccatgagcgccctggacggcagagagaccgacttctacaagctgagcgagaccaagggctgccagaccgtgaccagcggcaaggtgagacacggcgccctgacctgcctgtgcgtggccatgaagagacaggtgctgtgctacgagctgttccagagcaagaccagacacagaaagttcaaggagatccaggtgccctacaacgtgcagtggatggccatcttcagcgagcagctgtgcgtgggcttccagagcggcttcctgagataccccctgaacggcgagggcaacccctacagcatgctgcacagcaacgaccacaccctgagcttcatcgcccaccagcccatggacgccatctgcgccgtggagatcagcagcaaggagtacctgctgtgcttcaacagcatcggcatctacaccgactgccagggcagaagaagcagacagcaggagctgatgtggcccgccaaccccagcagctgctgctacaacgccccctacctgagcgtgtacagcgagaacgccgtggacatcttcgacgtgaacagcatggagtggatccagaccctgcccctgaagaaggtgagacccctgaacaacgagggcagcctgaacctgctgggcctggagaccatcagactgatctacttcaagaacaagatggccgagggcgacgagctggtggtgcccgagaccagcgacaacagcagaaagcagatggtgagaaacatcaacaacaagagaagatacagcttcagagtgcccgaggaggagagaatgcagcagagaagagagatgctgagagaccccgagatgagaaacaagctgatcagcaaccccaccaacttcaaccacatcgcccacatgggccccggcgacggcatccagatcctgaaggacctgcccatgaaccccagaccccaggagagcagaaccgtgttcagcggcagcgtgagcatccccagcatcaccaagagcagacccgagcccggcagaagcatgagcgccagcagcggcctgagcgccagaagcagcgcccagaacggcagcgccctgaagagagagttcagcggcggcagctacagcgccaagagacagcccatgcccagccccagcgagggcagcctgagcagcggcggcatggaccagggcagcgacgcccccgccagagacttcgacggcgaggacagcgacagccccagacacagcaccgccagcaacagcagcaacctgagcagcccccccagccccgccagccccagaaagaccaagagcctgagcctggagagcaccgacagaggcagctgggacccctag

SEQ ID NO: 76099 - DNA, 5136 bp, synthetic construct
  misc_feature 1..5136: note = Description of Artificial Sequence: Synthetic coding sequence
  source 1..5136: mol_type = other DNA
atgagcgccaaggtgagactgaagaagctggagcagctgctgctggacggcccctggagaaacgagagcgccctgagcgtggagaccctgctggacgtgctggtgtgcctgtacaccgagtgcagccacagcgccctgagaagagacaagtacgtggccgagttcctggagtgggccaagcccttcacccagctggtgaaggagatgcagctgcacagagaggacttcgagatcatcaaggtgatcggcagaggcgccttcggcgaggtggccgtggtgaagatgaagaacaccgagagaatctacgccatgaagatcctgaacaagtgggagatgctgaagagagccgagaccgcctgcttcagagaggagagagacgtgctggtgaacggcgactgccagtggatcaccgccctgcactacgccttccaggacgagaaccacctgtacctggtgatggactactacgtgggcggcgacctgctgaccctgctgagcaagttcgaggacaagctgcccgaggacatggccagattctacatcggcgagatggtgctggccatcgacagcatccaccagctgcactacgtgcacagagacatcaagcccgacaacgtgctgctggacgtgaacggccacatcagactggccgacttcggcagctgcctgaagatgaacgacgacggcaccgtgcagagcagcgtggccgtgggcacccccgactacatcagccccgagatcctgcaggccatggaggacggcatgggcaagtacggccccgagtgcgactggtggagcctgggcgtgtgcatgtacgagatgctgtacggcgagacccccttctacgccgagagcctggtggagacctacggcaagatcatgaaccacgaggagagattccagttccccagccacgtgaccgacgtgagcgaggaggccaaggacctgatccagagactgatctgcagcagagagagaagactgggccagaacggcatcgaggacttcaagaagcacgccttcttcgagggcctgaactgggagaacatcagaaacctggaggccccctacatccccgacgtgagcagccccagcgacaccagcaacttcgacgtggacgacgacgtgctgagaaacaccgagatcctgccccccggcagccacaccggcttcagcggcctgcacctgcccttcatcggcttcaccttcaccaccgagagctgcttcagcgacagaggcagcctgaagagcatcatgcagagcaacaccctgaccaaggacgaggacgtgcagagagacctggagcacagcctgcagatggaggcctacgagagaagaatcagaagactggagcaggagaagctggagctgagcagaaagctgcaggagagcacccagaccgtgcagagcctgcacggcagcagcagagccctgagcaacagcaacagagacaaggagatcaagaagctgaacgaggagatcgagagactgaagaacaagatcgccgacagcaacagactggagagacagctggaggacaccgtggccctgagacaggagagagaggacagcacccagagactgagaggcctggagaagcagcacagagtggtgagacaggagaaggaggagctgcacaagcagctggtggaggccagcgagagactgaagagccaggccaaggagctgaaggacgcccaccagcagagaaagctggccctgcaggagttcagcgagctgaacgagagaatggccgagctgagagcccagaagcagaaggtgagcagacagctgagagacaaggaggaggagatggaggtggccacccagaaggtggacgccatgagacaggagatgagaagagccgagaagctgagaaaggagctggaggcccagctggacgacgccgtggccgaggccagcaaggagagaaagctgagagagcacagcgagaacttctgcaagcagatggagagcgagctggaggccctgaaggtgaagcagggcggcagaggcgccggcgccaccctggagcaccagcaggagatcagcaagatcaagagcgagctggagaagaaggtgctgttctacgaggaggagctggtgagaagagaggccagccacgtgctggaggtgaagaacgtgaagaaggaggtgcacgacagcgagagccaccagctggccctgcagaaggagatcctgatgctgaaggacaagctggagaagagcaagagagagagacacaacgagatggaggaggccgtgggcaccatcaaggacaagtacgagagagagagagccatgctgttcgacgagaacaagaagctgaccgccgagaacgagaagctgtgcagcttcgtggacaagctgaccgcccagaacagacagctggaggacgagctgcaggacctggccgccaagaaggagagcgtggcccactgggaggcccagatcgccgagatcatccagtgggtgagcgacgagaaggacgccagaggctacctgcaggccctggccagcaagatgaccgaggagctggaggccctgagaagcagcagcctgggcagcagaaccctggaccccctgtggaaggtgagaagaagccagaagctggacatgagcgccagactggagctgcagagcgccctggaggccgagatcagagccaagcagctggtgcaggaggagctgagaaaggtgaaggacgccaacctgaccctggagagcaagctgaaggacagcgaggccaagaacagagagctgctggaggagatggagatcctgaagaagaagatggaggagaagttcagagccgacaccggcctgaagctgcccgacttccaggacagcatcttcgagtacttcaacaccgcccccctggcccacgacctgaccttcagaaccagcagcgccagcgagcaggagacccaggcccccaagcccgaggccagccccagcatgagcgtggccgccagcgagcagcaggaggacatggccagacccccccagagacccagcgccgtgcccctgcccaccacccaggccctggccctggccggccccaagcccaaggcccaccagttcagcatcaagagcttcagcagccccacccagtgcagccactgcaccagcctgatggtgggcctgatcagacagggctacgcctgcgaggtgtgcagcttcgcctgccacgtgagctgcaaggacggcgccccccaggtgtgccccatcccccccgagcagagcaagagacccctgggcgtggacgtgcagagaggcatcggcaccgcctacaagggccacgtgaaggtgcccaagcccaccggcgtgaagaagggctggcagagagcctacgccgtggtgtgcgactgcaagctgttcctgtacgacctgcccgagggcaagagcacccagcccggcgtgatcgccagccaggtgctggacctgagagacgacgagttcagcgtgagcagcgtgctggccagcgacgtgatccacgccaccagaagagacatcccctgcatcttcagagtgaccgccagcctgctgggcgcccccagcaagaccagcagcctgctgatcctgaccgagaacgagaacgagaagagaaagtgggtgggcatcctggagggcctgcagagcatcctgcacaagaacagactgagaaaccaggtggtgcacgtgcccctggaggcctacgacagcagcctgcccctgatcaaggccatcctgaccgccgccatcgtggacgccgacagaatcgccgtgggcctggaggagggcctgtacgtgatcgaggtgaccagagacgtgatcgtgagagccgccgactgcaagaaggtgcaccagatcgagctggcccccagagagaagatcgtgatcctgctgtgcggcagaaaccaccacgtgcacctgtacccctggagcagcctggacggcgccgagggcagcttcgacatcaagctgcccgagaccaagggctgccagctgatggccaccgccaccctgaagagaaacagcggcacctgcctgttcgtggccgtgaagagactgatcctgtgctacgagatccagagaaccaagcccttccacagaaagttcaacgagatcgtggcccccggcagcgtgcagtgcctggccgtgctgagagacagactgtgcgtgggctaccccagcggcttctgcctgctgagcatccagggcgacggccagcccctgaacctggtgaaccccaacgaccccagcctggccttcctgagccagcagagcttcgacgccctgtgcgccgtggagctggagagcgaggagtacctgctgtgcttcagccacatgggcctgtacgtggacccccagggcagaagagccagagcccaggagctgatgtggcccgccgcccccgtggcctgcagctgcagccccacccacgtgaccgtgtacagcgagtacggcgtggacgtgttcgacgtgagaaccatggagtgggtgcagaccatcggcctgagaagaatcagacccctgaacagcgagggcaccctgaacctgctgaactgcgagccccccagactgatctacttcaagagcaagttcagcggcgccgtgctgaacgtgcccgacaccagcgacaacagcaagaagcagatgctgagaaccagaagcaagagaagattcgtgttcaaggtgcccgaggaggagagactgcagcagagaagagagatgctgagagaccccgagctgagaagcaagatgatcagcaaccccaccaacttcaaccacgtggcccacatgggccccggcgacggcatgcaggtgctgatggacctgcccctgagcgccgtgccccccagccaggaggagagacccggccccgcccccaccaacctggccagacagccccccagcagaaacaagccctacatcagctggcccagcagcggcggcagcgagcccagcgtgaccgtgcccctgagaagcatgagcgaccccgaccaggacttcgacaaggagcccgacagcgacagcaccaagcacagcacccccagcaacagcagcaaccccagcggcccccccagccccaacagcccccacagaagccagctgcccctggagggcctggagcagcccgcctgcgacacctag

SEQ ID NO: 76100 - DNA, 1593 bp, synthetic construct
  misc_feature 1..1593: note = Description of Artificial Sequence: Synthetic coding sequence
  source 1..1593: mol_type = other DNA
aaggtgagaagaagccagaagctggacatgagcgccagactggagctgcagagcgccctggaggccgagatcagagccaagcagctggtgcaggaggagctgagaaaggtgaaggacgccaacctgaccctggagagcaagctgaaggacagcgaggccaagaacagagagctgctggaggagatggagatcctgaagaagaagatggaggagaagttcagagccgacaccggcctgaagctgcccgacttccaggacagcatcttcgagtacttcaacaccgcccccctggcccacgacctgaccttcagaaccagcagcgccagcgagcaggagacccaggcccccaagcccgaggccagccccagcatgagcgtggccgccagcgagcagcaggagcccaaggcccaccagttcagcatcaagagcttcagcagccccacccagtgcagccactgcaccagcctgatggtgggcctgatcagacagggctacgcctgcgaggtgtgcagcttcgcctgccacgtgagctgcaaggacggcgccccccaggtgtgccccatcccccccgagcagagcaagagacccctgggcgtggacgtgcagagaggcatcggcaccgcctacaagggccacgtgaaggtgcccaagcccaccggcgtgaagaagggctggcagagagcctacgccgtggtgtgcgactgcaagctgttcctgtacgacctgcccgagggcaagagcacccagcccggcgtgatcgccagccaggtgctggacctgagagacgacgagttcagcgtgagcagcgtgctggccagcgacgtgatccacgccaccagaagagacatcccctgcatcttcagagtgaccgccagcctgctgggcgcccccagcaagaccagcagcctgctgatcctgaccgagaacgagaacgagaagagaaagtgggtgggcatcctggagggcctgcagagcatcctgcacaagaacagactgagaaaccaggtggtgcacgtgcccctggaggcctacgacagcagcctgcccctgatcaaggccatcctgaccgccgccatcgtggacgccgacagaatcgccgtgggcctggaggagggcctgtacgtgatcgaggtgaccagagacgtgatcgtgagagccgccgactgcaagaaggtgcaccagatcgagctggcccccagagagaagatcgtgatcctgctgtgcggcagaaaccaccacgtgcacctgtacccctggagcagcctggacggcgccgagggcagcttcgacatcaagctgcccgagaccaagggctgccagctgatggccaccgccaccctgaagagaaacagcggcacctgcctgttcgtggccgtgaagagactgatcctgtgctacgagatccagagaaccaagcccttccacagaaagttcaacgagatcgtggcccccggcagcgtgcagtgcctggccgtgctgagagacagactgtgcgtgggctaccccagcggcttctgcctgctgagcatccagggcgacggccagcccctgaacctggtgaaccccaacgaccccagcctggccttcctgtag

SEQ ID NO: 76101 - DNA, 4656 bp, synthetic construct
  misc_feature 1..4656: note = Description of Artificial Sequence: Synthetic coding sequence
  source 1..4656: mol_type = other DNA
atggagagaagactgagagccctggagcagctggccagaggcgaggccggcggctgccccggcctggacggcctgctggacctgctgctggccctgcaccacgagctgagcagcggccccctgagaagagagagaagcgtggcccagttcctgagctgggccagccccttcgtgagcaaggtgaaggagctgagactgcagagagacgacttcgagatcctgaaggtgatcggcagaggcgccttcggcgaggtgaccgtggtgagacagagagacaccggccagatcttcgccatgaagatgctgcacaagtgggagatgctgaagagagccgagaccgcctgcttcagagaggagagagacgtgctggtgaagggcgacagcagatgggtgaccaccctgcactacgccttccaggacgaggagtacctgtacctggtgatggactactacgccggcggcgacctgctgaccctgctgagcagattcgaggacagactgccccccgagctggcccagttctacctggccgagatggtgctggccatccacagcctgcaccagctgggctacgtgcacagagacgtgaagcccgacaacgtgctgctggacgtgaacggccacatcagactggccgacttcggcagctgcctgagactgaacaccaacggcatggtggacagcagcgtggccgtgggcacccccgactacatcagccccgagatcctgcaggccatggaggagggcaagggccactacggcccccagtgcgactggtggagcctgggcgtgtgcgcctacgagctgctgttcggcgagacccccttctacgccgagagcctggtggagacctacggcaagatcatgaaccacgaggaccacctgcagttcccccccgacgtgcccgacgtgcccgccagcgcccaggacctgatcagacagctgctgtgcagacaggaggagagactgggcagaggcggcctggacgacttcagaaaccaccccttcttcgagggcgtggactgggagagactggccagcagcaccgccccctacatccccgagctgagaggccccatggacaccagcaacttcgacgtggacgacgacaccctgaaccaccccggcaccctgcccccccccagccacggcgccttcagcggccaccacctgcccttcgtgggcttcacctacaccagcggcagccacagccccgagagcagcagcgaggcctgggccgccctggagagaaagctgcagtgcctggagcaggagaaggtggagctgagcagaaagcaccaggaggccctgcacgcccccaccgaccacagagagctggagcagctgagaaaggaggtgcagaccctgagagacagactgcccgagatgctgagagacaaggccagcctgagccagaccgacggcccccccgccggcagccccggccaggacagcgacctgagacaggagctggacagactgcacagagagctggccgagggcagagccggcctgcaggcccaggagcaggagctgtgcagagcccagggccagcaggaggagctgctgcagagactgcaggaggcccaggagagagaggccgccaccgccagccagaccagagccctgagcagccagctggaggaggccagagccgcccagagagagctggaggcccaggtgagcagcctgagcagacaggtgacccagctgcagggccagtgggagcagagactggaggagagcagccaggccaagaccatccacaccgccagcgagaccaacggcatgggcccccccgagggcggcccccaggaggcccagctgagaaaggaggtggccgccctgagagagcagctggagcaggcccacagccacagacccagcggcaaggaggaggccctgtgccagctgcaggaggagaacagaagactgagcagagagcaggagagactggaggccgagctggcccaggagcaggagagcaagcagagactggagggcgagagaagagagaccgagagcaactgggaggcccagctggccgacatcctgagctgggtgaacgacgagaaggtgagcagaggctacctgcaggccctggccaccaagatggccgaggagctggagagcctgagaaacgtgggcacccagaccctgcccgccagacccctggaccaccagtggaaggccagaagactgcagaagatggaggccagcgccagactggagctgcagagcgccctggaggccgagatcagagccaagcagggcctgcaggagagactgacccaggtgcaggaggcccagctgcaggccgagagaagactgcaggaggccgagaagcagagccaggccctgcagcaggagctggccatgctgagagaggagctgagagccagaggccccgtggacaccaagcccagcaacagcctgatccccttcctgagcttcagaagcagcgagaaggacagcgccaaggaccccggcatcagcggcgaggccaccagacacggcggcgagcccgacctgagacccgagggcagaagaagcctgagaatgggcgccgtgttccccagagcccccaccgccaacaccgccagcaccgagggcctgcccgccaagcccggcagccacaccctgagacccagaagcttccccagccccaccaagtgcctgagatgcaccagcctgatgctgggcctgggcagacagggcctgggctgcgacgcctgcggctacttctgccacaccacctgcgccccccaggcccccccctgccccgtgccccccgacctgctgagaaccgccctgggcgtgcaccccgagaccggcaccggcaccgcctacgagggcttcctgagcgtgcccagacccagcggcgtgagaagaggctggcagagagtgttcgccgccctgagcgacagcagactgctgctgttcgacgcccccgacctgagactgagcccccccagcggcgccctgctgcaggtgctggacctgagagacccccagttcagcgccacccccgtgctggccagcgacgtgatccacgcccagagcagagacctgcccagaatcttcagagtgaccaccagccagctggccgtgccccccaccacctgcaccgtgctgctgctggccgagagcgagggcgagagagagagatggctgcaggtgctgggcgagctgcagagactgctgctggacgccagacccagacccagacccgtgtacaccctgaaggaggcctacgacaacggcctgcccctgctgccccacaccctgtgcgccgccatcctggaccaggacagactggccctgggcaccgaggagggcctgttcgtgatccacctgagaagcaacgacatcttccaggtgggcgagtgcagaagagtgcagcagctgaccctgagccccagcgccggcctgctggtggtgctgtgcggcagaggccccagcgtgagactgttcgccctggccgagctggagaacatcgaggtggccggcgccaagatccccgagagcagaggctgccaggtgctggccgccggcagcatcctgcaggccagaacccccgtgctgtgcgtggccgtgaagagacaggtgctgtgctaccagctgggccccggccccggcccctggcagagaagaatcagagagctgcaggcccccgccaccgtgcagagcctgggcctgctgggcgacagactgtgcgtgggcgccgccggcggcttcgccctgtaccccctgctgaacgaggccgcccccctggccctgggcgccggcctggtgcccgaggagctgccccccagcagaggcggcctgggcgaggccctgggcgccgtggagctgagcctgagcgagttcctgctgctgttcaccaccgccggcatctacgtggacggcgccggcagaaagagcagaggccacgagctgctgtggcccgccgcccccatgggctggggctacgccgccccctacctgaccgtgttcagcgagaacagcatcgacgtgttcgacgtgagaagagccgagtgggtgcagaccgtgcccctgaagaaggtgagacccctgaaccccgagggcagcctgttcctgtacggcaccgagaaggtgagactgacctacctgagaaaccagctggccgagaaggacgagttcgacatccccgacctgaccgacaacagcagaagacagctgttcagaaccaagagcaagagaagattcttcttcagagtgagcgaggagcagcagaagcagcagagaagagagatgctgaaggaccccttcgtgagaagcaagctgatcagcccccccaccaacttcaaccacctggtgcacgtgggccccgccaacggcagacccggcgccagagacaagagccccgcccccgaggagaagggcagagtggccagaggcagcggcccccagagaccccacagcttcagcgaggccctgagaagacccgccagcatgggcagcgagggcctgggcggcgacgccgaccccatgaagagaaagccctggaccagcctgagcagcgagagcgtgagctgcccccagggcagcctgagccccgccaccagcctgatgcaggtgagcgagagacccagaagcctgcccctgagccccgagctggagagcagcccctag

SEQ ID NO: 76102 - DNA, 1176 bp, synthetic construct
  misc_feature 1..1176: note = Description of Artificial Sequence: Synthetic coding sequence
  source 1..1176: mol_type = other DNA
atgcccggcccccagggcggcagaggcgccgccaccatgagcctgggcaagctgagccccgtgggctgggtgagcagcagccagggcaagagaagactgaccgccgacatgatcagccaccccctgggcgacttcagacacaccatgcacgtgggcagaggcggcgacgtgttcggcgacaccagcttcctgagcaaccacggcggcagcagcggcagcacccacagaagccccagaagcttcctggccaagaagctgcagctggtgagaagagtgggcgccccccccagaagaatggccagcccccccgcccccagccccgccccccccgccatcagccccatcatcaagaacgccatcagcctgccccagctgaaccaggccgcctacgacagcctggtggtgggcaagctgagcttcgacagcagccccaccagcagcaccgacggccacagcagctacggcctggacagcggcttctgcaccatcagcagactgcccagaagcgagaagccccacgacagagacagagacggcagcttccccagcgagcccggcctgagaagaagcgacagcctgctgagcttcagactggacctggacctgggccccagcctgctgagcgagctgctgggcgtgatgagcctgcccgaggcccccgccgccgagacccccgcccccgccgccaacccccccgcccccaccgccaaccccaccggccccgccgccaacccccccgccaccaccgccaacccccccgcccccgccgccaaccccagcgcccccgccgccacccccaccggccccgccgccaacccccccgcccccgccgccagcagcaccccccacggccactgccccaacggcgtgaccgccggcctgggccccgtggccgaggtgaagagcagccccgtgggcggcggccccagaggccccgccggccccgccctgggcagacactggggcgccggctgggacggcggccaccactaccccgagatggacgccagacaggagagagtggaggtgctgccccaggccagagccagctgggagagcctggacgaggagtggagagccccccaggccggcagcagaacccccgtgcccagcaccgtgcaggccaacaccttcgagttcgccgacgccgaggaggacgacgaggtgaaggtgtag

SEQ ID NO: 76103 - DNA, 183 bp, synthetic construct
  misc_feature 1..183: note = Description of Artificial Sequence: Synthetic coding sequence
  source 1..183: mol_type = other DNA
atgcccggcccccagggcggcagaggcgccgccaccatgagcctgggcaagctgagccccgtgggctgggtgagcagcagccagggcaagagaagactgaccgccgacatgatcagccaccccctgggcgacttcagacacaccatgcacgtgggcagaggcggcgacgtgttcggcgactag

SEQ ID NO: 76104 - DNA, 213 bp, synthetic construct
  misc_feature 1..213: note = Description of Artificial Sequence: Synthetic coding sequence
  source 1..213: mol_type = other DNA
atgcccggcccccagggcggcagaggcgccgccaccatgagcctgggcaagctgagccccgtgggctgggtgagcagcagccagggcaagagaagactgaccgccgacatgatcagccaccccctgggcgacttcagacacaccatgcacgtgggcagaggcggcgacgtgttcggcgacaccagcttcctgagcaaccacggcggcagctag

SEQ ID NO: 76105 - DNA, 147 bp, synthetic construct
  misc_feature 1..147: note = Description of Artificial Sequence: Synthetic coding sequence
  source 1..147: mol_type = other DNA
atgcccggcccccagggcggcagaggcgccgccaccatgagcctgggcaagctgagccccgtgggctgggtgagcagcagccagggcaagagaagactgaccgccgacatgatcagccaccccctgggcgacttcagacacacctag

SEQ ID NO: 76106 - DNA, 633 bp, synthetic construct
  misc_feature 1..633: note = Description of Artificial Sequence: Synthetic coding sequence
  source 1..633: mol_type = other DNA
atgagcaccaaggtgcccatctacctgaagagaggcagcagaaagggcaagaaggagaagctgagagacctgctgagcagcgacatgatcagcccccccctgggcgacttcagacacaccatccacatcggcagcggcggcggcagcgacatgttcggcgacatcagcttcctgcagggcaagttccacctgctgcccggcaccatggtggagggccccgaggaggacggcaccttcgacctgcccttccagttcaccagaaccgccaccgtgtgcggcagagagctgcccgacggccccagccccctgctgaagaacgccatcagcctgcccgtgatcggcggcccccaggccctgaccctgcccaccgcccaggccccccccaagccccccagactgcacctggagaccccccagcccagcccccaggagggcggcagcgtggacatctggagaatccccgagaccggcagccccaacagcggcctgacccccgagagcggcgccgaggagcccttcctgagcaacgccagcagcctgctgagcctgcacgtggacctgggccccagcatcctggacgacgtgctgcagatcatggaccaggacctggacagcatgcagatccccacctag

SEQ ID NO: 76107 - DNA, 633 bp, synthetic construct; identical to SEQ ID NO: 76106
  misc_feature 1..633: note = Description of Artificial Sequence: Synthetic coding sequence
  source 1..633: mol_type = other DNA

SEQ ID NO: 76108 - DNA, 633 bp, synthetic construct; identical to SEQ ID NO: 76106
  misc_feature 1..633: note = Description of Artificial Sequence: Synthetic coding sequence
  source 1..633: mol_type = other DNA

SEQ ID NO: 76109 - DNA, 765 bp, synthetic construct
  misc_feature 1..765: note = Description of Artificial Sequence: Synthetic coding sequence
  source 1..765: mol_type = other DNA
atgcccgccaagacccccatctacctgaaggccgccaacaacaagaagggcaagaagttcaagctgagagacatcctgagccccgacatgatcagcccccccctgggcgacttcagacacaccatccacatcggcaaggagggccagcacgacgtgttcggcgacatcagcttcctgcagggcaactacgagctgctgcccggcaaccaggagaaggcccacctgggccagttccccggccacaacgagttcttcagagccaacagcaccagcgacagcgtgttcaccgagacccccagccccgtgctgaagaacgccatcagcctgcccaccatcggcggcagccaggccctgatgctgcccctgctgagccccgtgaccttcaacagcaagcaggagagcttcggccccgccaagctgcccagactgagctgcgagcccgtgatggaggagaaggcccaggagaagagcagcctgctggagaacggcaccgtgcaccagggcgacaccagctggggcagcagcggcagcgccagccagagcagccagggcagagacagccacagcagcagcctgagcgagcagtaccccgactggcccgccgaggacatgttcgaccaccccaccccctgcgagctgatcaagggcaagaccaagagcgaggagagcctgagcgacctgaccggcagcctgctgagcctgcagctggacctgggccccagcctgctggacgaggtgctgaacgtgatggacaagaacaagtag

SEQ ID NO: 76110 - DNA, 45 bp, synthetic construct
  misc_feature 1..45: note = Description of Artificial Sequence: Synthetic coding sequence
  source 1..45: mol_type = other DNA
atgcccgccaagacccccatctacctgaaggccgccaacaactag

SEQ ID NO: 76111 - DNA, 108 bp, synthetic construct
  misc_feature 1..108: note = Description of Artificial Sequence: Synthetic coding sequence
  source 1..108: mol_type = other DNA
atgcccgccaagacccccatctacctgaaggccgccaacaacaagaagggcaagaagttcaagctgagagacatcctgagccccgacatgatcagcccccccctgtag

SEQ ID NO: 76112 - DNA, 651 bp, synthetic construct
  misc_feature 1..651: note = Description of Artificial Sequence: Synthetic coding sequence
  source 1..651: mol_type = other DNA
atgcccgccaagacccccatctacctgaaggccgccaacaacaagaagggcaagaagttcaagctgagagacatcctgagccccgacatgatcagcccccccctgggcgacttcagacacaccatccacatcggcaaggagggccagcacgacgtgttcggcgacatcagcttcctgcagggcaactacgagctgctgcccggcaaccaggagaaggcccacctgggccagttccccggccacaacgagttcttcagagccaacagcaccagcgacagcgtgttcaccgagacccccagccccgtgctgaagaacgccatcagcctgcccaccatcggcggcagccaggccctgatgctgcccctgctgagccccgtgaccttcaacagcaagcaggagagcttcggccccgccaagctgcccagactgagctgcgagcccgtgatggaggagaaggcccaggagaagagcagcctgctggagaacggcaccgtgcaccagggcgacaccagctggggcagcagcggcagcgccagccagagcagccagggcagagacagccacagcagcagcctgagcgagcagtaccccgactggcccgccgaggacatgttcgaccaccccaccccctgcgagctgatcaagggctag

SEQ ID NO: 76113 - DNA, 1071 bp, synthetic construct
  misc_feature 1..1071: note = Description of Artificial Sequence: Synthetic coding sequence
  source 1..1071: mol_type = other DNA
atgcccatcctgaagcagctggtgagcagcagcgtgcacagcaagagaagaagcagagccgacctgaccgccgagatgatcagcgcccccctgggcgacttcagacacaccatgcacgtgggcagagccggcgacgccttcggcgacaccagcttcctgaacagcaaggccggcgagcccgacggcgagagcctggacgagcagcccagcagcagcagcagcaagagaagcctgctgagcagaaagttcagaggcagcaagagaagccagagcgtgaccagaggcgagagagagcagagagacatgctgggcagcctgagagacagcgccctgttcgtgaagaacgccatgagcctgccccagctgaacgagaaggaggccgccgagaagggcaccagcaagctgcccaagagcctgagcagcagccccgtgaagaaggccaacgacggcgagggcggcgacgaggaggccggcaccgaggaggccgtgcccagaagaaacggcgccgccggcccccacagccccgaccccctgctggacgagcaggccttcggcgacctgaccgacctgcccgtggtgcccaaggccacctacggcctgaagcacgccgagagcatcatgagcttccacatcgacctgggccccagcatgctgggcgacgtgctgagcatcatggacaaggaggagtgggaccccgaggagggcgagggcggctaccacggcgacgagggcgccgccggcaccatcacccaggcccccccctacgccgtggccgccccccccctggccagacaggagggcaaggccggccccgacctgcccagcctgcccagccacgccctggaggacgagggctgggccgccgccgcccccagccccggcagcgccagaagcatgggcagccacaccaccagagacagcagcagcctgagcagctgcaccagcggcatcctggaggagagaagccccgccttcagaggccccgacagagccagagccgccgtgagcagacagcccgacaaggagttcagcttcatggacgaggaggaggaggacgagatcagagtgtag

SEQ ID NO: 76114 - DNA, 861 bp, synthetic construct
  misc_feature 1..861: note = Description of Artificial Sequence: Synthetic coding sequence
  source 1..861: mol_type = other DNA
atgcccatcctgaagcagctggtgagcagcagcgtgcacagcaagagaagaagcagagccgacctgaccgccgagatgatcagcgcccccctgggcgacttcagacacaccatgcacgtgggcagagccggcgacgccttcggcgacaccagcttcctgaacagcaaggccgccgagaagggcaccagcaagctgcccaagagcctgagcagcagccccgtgaagaaggccaacgacggcgagggcggcgacgaggaggccggcaccgaggaggccgtgcccagaagaaacggcgccgccggcccccacagccccgaccccctgctggacgagcaggccttcggcgacctgaccgacctgcccgtggtgcccaaggccacctacggcctgaagcacgccgagagcatcatgagcttccacatcgacctgggccccagcatgctgggcgacgtgctgagcatcatggacaaggaggagtgggaccccgaggagggcgagggcggctaccacggcgacgagggcgccgccggcaccatcacccaggcccccccctacgccgtggccgccccccccctggccagacaggagggcaaggccggccccgacctgcccagcctgcccagccacgccctggaggacgagggctgggccgccgccgcccccagccccggcagcgccagaagcatgggcagccacaccaccagagacagcagcagcctgagcagctgcaccagcggcatcctggaggagagaagccccgccttcagaggccccgacagagccagagccgccgtgagcagacagcccgacaaggagttcagcttcatggacgaggaggaggaggacgagatcagagtgtag

SEQ ID NO: 76115 - DNA, 1551 bp, synthetic construct
  misc_feature 1..1551: note = Description of Artificial Sequence: Synthetic coding sequence
  source 1..1551: mol_type = other DNA
atgaccctgctgatcaccggcgacagcatcgtgagcgccgaggccgtgtgggaccacgtgaccatggccaacagagagctggccttcaaggccggcgacgtgatcaaggtgctggacgccagcaacaaggactggtggtggggccagatcgacgacgaggagggctggttccccgccagcttcgtgagactgtgggtgaaccaggaggacgaggtggaggagggccccagcgacgtgcagaacggccacctggaccccaacagcgactgcctgtgcctgggcagacccctgcagaacagagaccagatgagagccaacgtgatcaacgagatcatgagcaccgagagacactacatcaagcacctgaaggacatctgcgagggctacctgaagcagtgcagaaagagaagagacatgttcagcgacgagcagctgaaggtgatcttcggcaacatcgaggacatctacagattccagatgggcttcgtgagagacctggagaagcagtacaacaacgacgacccccacctgagcgagatcggcccctgcttcctggagcaccaggacggcttctggatctacagcgagtactgcaacaaccacctggacgcctgcatggagctgagcaagctgatgaaggacagcagataccagcacttcttcgaggcctgcagactgctgcagcagatgatcgacatcgccatcgacggcttcctgctgacccccgtgcagaagatctgcaagtaccccctgcagctggccgagctgctgaagtacaccgcccaggaccacagcgactacagatacgtggccgccgccctggccgtgatgagaaacgtgacccagcagatcaacgagagaaagagaagactggagaacatcgacaagatcgcccagtggcaggccagcgtgctggactgggagggcgaggacatcctggacagaagcagcgagctgatctacaccggcgagatggcctggatctaccagccctacggcagaaaccagcagagagtgttcttcctgttcgaccaccagatggtgctgtgcaagaaggacctgatcagaagagacatcctgtactacaagggcagaatcgacatggacaagtacgaggtggtggacatcgaggacggcagagacgacgacttcaacgtgagcatgaagaacgccttcaagctgcacaacaaggagaccgaggagatccacctgttcttcgccaagaagctggaggagaagatcagatggctgagagccttcagagaggagagaaagatggtgcaggaggacgagaagatcggcttcgagatcagcgagaaccagaagagacaggccgccatgaccgtgagaaaggtgcccaagcagaagggcgtgaacagcgccagaagcgtgccccccagctacccccccccccaggaccccctgaaccacggccagtacctggtgcccgacggcatcgcccagagccaggtgttcgagttcaccgagcccaagagaagccagagccccttctggcagaacttcagcagactgacccccttcaagaagtag

SEQ ID NO: 76116 - DNA, 1245 bp, synthetic construct
  misc_feature 1..1245: note = Description of Artificial Sequence: Synthetic coding sequence
  source 1..1245: mol_type = other DNA
atgagagccaacgtgatcaacgagatcatgagcaccgagagacactacatcaagcacctgaaggacatctgcgagggctacctgaagcagtgcagaaagagaagagacatgttcagcgacgagcagctgaaggtgatcttcggcaacatcgaggacatctacagattccagatgggcttcgtgagagacctggagaagcagtacaacaacgacgacccccacctgagcgagatcggcccctgcttcctggagcaccaggacggcttctggatctacagcgagtactgcaacaaccacctggacgcctgcatggagctgagcaagctgatgaaggacagcagataccagcacttcttcgaggcctgcagactgctgcagcagatgatcgacatcgccatcgacggcttcctgctgacccccgtgcagaagatctgcaagtaccccctgcagctggccgagctgctgaagtacaccgcccaggaccacagcgactacagatacgtggccgccgccctggccgtgatgagaaacgtgacccagcagatcaacgagagaaagagaagactggagaacatcgacaagatcgcccagtggcaggccagcgtgctggactgggagggcgaggacatcctggacagaagcagcgagctgatctacaccggcgagatggcctggatctaccagccctacggcagaaaccagcagagagtgttcttcctgttcgaccaccagatggtgctgtgcaagaaggacctgatcagaagagacatcctgtactacaagggcagaatcgacatggacaagtacgaggtggtggacatcgaggacggcagagacgacgacttcaacgtgagcatgaagaacgccttcaagctgcacaacaaggagaccgaggagatccacctgttcttcgccaagaagctggaggagaagatcagatggctgagagccttcagagaggagagaaagatggtgcaggaggacgagaagatcggcttcgagatcagcgagaaccagaagagacaggccgccatgaccgtgagaaaggtgcccaagcagaagggcgtgaacagcgccagaagcgtgccccccagctacccccccccccaggaccccctgaaccacggccagtacctggtgcccgacggcatcgcccagagccaggtgttcgagttcaccgagcccaagagaagccagagccccttctggcagaacttcagcagactgacccccttcaagaagtag

SEQ ID NO: 76117 - DNA, 1488 bp, synthetic construct
  misc_feature 1..1488: note = Description of Artificial Sequence: Synthetic coding sequence
  source 1..1488: mol_type = other DNA
atggccaacagagagctggccttcaaggccggcgacgtgatcaaggtgctggacgccagcaacaaggactggtggtggggccagatcgacgacgaggagggctggttccccgccagcttcgtgagactgtgggtgaaccaggaggacgaggtggaggagggccccagcgacgtgcagaacggccacctggaccccaacagcgactgcctgtgcctgggcagacccctgcagaacagagaccagatgagagccaacgtgatcaacgagatcatgagcaccgagagacactacatcaagcacctgaaggacatctgcgagggctacctgaagcagtgcagaaagagaagagacatgttcagcgacgagcagctgaaggtgatcttcggcaacatcgaggacatctacagattccagatgggcttcgtgagagacctggagaagcagtacaacaacgacgacccccacctgagcgagatcggcccctgcttcctggagcaccaggacggcttctggatctacagcgagtactgcaacaaccacctggacgcctgcatggagctgagcaagctgatgaaggacagcagataccagcacttcttcgaggcctgcagactgctgcagcagatgatcgacatcgccatcgacggcttcctgctgacccccgtgcagaagatctgcaagtaccccctgcagctggccgagctgctgaagtacaccgcccaggaccacagcgactacagatacgtggccgccgccctggccgtgatgagaaacgtgacccagcagatcaacgagagaaagagaagactggagaacatcgacaagatcgcccagtggcaggccagcgtgctggactgggagggcgaggacatcctggacagaagcagcgagctgatctacaccggcgagatggcctggatctaccagccctacggcagaaaccagcagagagtgttcttcctgttcgaccaccagatggtgctgtgcaagaaggacctgatcagaagagacatcctgtactacaagggcagaatcgacatggacaagtacgaggtggtggacatcgaggacggcagagacgacgacttcaacgtgagcatgaagaacgccttcaagctgcacaacaaggagaccgaggagatccacctgttcttcgccaagaagctggaggagaagatcagatggctgagagccttcagagaggagagaaagatggtgcaggaggacgagaagatcggcttcgagatcagcgagaaccagaagagacaggccgccatgaccgtgagaaaggtgcccaagcagaagggcgtgaacagcgccagaagcgtgccccccagctacccccccccccaggaccccctgaaccacggccagtacctggtgcccgacggcatcgcccagagccaggtgttcgagttcaccgagcccaagagaagccagagccccttctggcagaacttcagcagactgacccccttcaagaagtag

SEQ ID NO: 76118 - DNA, 1437 bp, synthetic construct
  misc_feature 1..1437: note = Description of Artificial Sequence: Synthetic coding sequence
  source 1..1437: mol_type = other DNA
atgctgatcaccggcgacagcatcgtgagcgccgaggccgtgtgggaccacgtgaccatggccaacagagagctggccttcaaggccggcgacgtgatcaaggtgctggacgccagcaacaaggactggtggtggggccagatcgacgacgaggagggctggttccccgccagcttcgtgagactgtgggtgaaccaggaggacgaggtggaggagggccccagcgacgtgcagaacggccacctggaccccaacagcgactgcctgtgcctgggcagacccctgcagaacagagaccagatgagagccaacgtgatcaacgagatcatgagcaccgagagacactacatcaagcacctgaaggacatctgcgagggctacctgaagcagtgcagaaagagaagagacatgttcagcgacgagcagctgaaggtgatcttcggcaacatcgaggacatctacagattccagatgggcttcgtgagagacctggagaagcagtacaacaacgacgacccccacctgagcgagatcggcccctgcttcctggagcaccaggacggcttctggatctacagcgagtactgcaacaaccacctggacgcctgcatggagctgagcaagctgatgaaggacagcagataccagcacttcttcgaggcctgcagactgctgcagcagatgatcgacatcgccatcgacggcttcctgctgacccccgtgcagaagatctgcaagtaccccctgcagctggccgagctgctgaagtacaccgcccaggaccacagcgactacagatacgtggccgccgccctggccgtgatgagaaacgtgacccagcagatcaacgagagaaagagaagactggagaacatcgacaagatcgcccagtggcaggccagcgtgctggactgggagggcgaggacatcctggacagaagcagcgagctgatctacaccggcgagatggcctggatctaccagccctacggcagaaaccagcagagagtgttcttcctgttcgaccaccagatggtgctgtgcaagaaggacctgatcagaagagacatcctgtactacaagggcagaatcgacatggacaagtacgaggtggtggacatcgaggacggcagagacgacgacttcaacgtgagcatgaagaacgccttcaagctgcacaacaaggagaccgaggagatccacctgttcttcgccaagaagctggaggagaagatcagatggctgagagccttcagagaggagagaaagatggtgcaggaggacgagaagatcggcttcgagatcagcgagaaccagaagagacaggccgccatgaccgtgagaaagctgcccttcccccagctgagcgaggccagaatctgcagccccaagggcttcgccagcgtgttcaacggcacctgctgcggcgagagctag

SEQ ID NO: 76119 - DNA, 732 bp, synthetic construct
  misc_feature 1..732: note = Description of Artificial Sequence: Synthetic coding sequence
  source 1..732: mol_type = other DNA
atgatcgacatcgccatcgacggcttcctgctgacccccgtgcagaagatctgcaagtaccccctgcagctggccgagctgctgaagtacaccgcccaggaccacagcgactacagatacgtggccgccgccctggccgtgatgagaaacgtgacccagcagatcaacgagagaaagagaagactggagaacatcgacaagatcgcccagtggcaggccagcgtgctggactgggaggacctgatcagaagagacatcctgtactacaagggcagaatcgacatggacaagtacgaggtggtggacatcgaggacggcagagacgacgacttcaacgtgagcatgaagaacgccttcaagctgcacaacaaggagaccgaggagatccacctgttcttcgccaagaagctggaggagaagatcagatggctgagagccttcagagaggagagaaagatggtgcaggaggacgagaagatcggcttcgagatcagcgagaaccagaagagacaggccgccatgaccgtgagaaaggtgcccaagcagaagggcgtgaacagcgccagaagcgtgccccccagctacccccccccccaggaccccctgaaccacggccagtacctggtgcccgacggcatcgcccagagccaggtgttcgagttcaccgagcccaagagaagccagagccccttctggcagaacttcagcagactgacccccttcaagaagtag

SEQ ID NO: 76120 - DNA, 1392 bp, synthetic construct
  misc_feature 1..1392: note = Description of Artificial Sequence: Synthetic coding sequence
  source 1..1392: mol_type = other DNA
atgcagtggatcagaggcggcagcggcatgctgtgggtgaaccaggaggacgaggtggaggagggccccagcgacgtgcagaacggccacctggaccccaacagcgactgcctgtgcctgggcagacccctgcagaacagagaccagatgagagccaacgtgatcaacgagatcatgagcaccgagagacactacatcaagcacctgaaggacatctgcgagggctacctgaagcagtgcagaaagagaagagacatgttcagcgacgagcagctgaaggtgatcttcggcaacatcgaggacatctacagattccagatgggcttcgtgagagacctggagaagcagtacaacaacgacgacccccacctgagcgagatcggcccctgcttcctggagcaccaggacggcttctggatctacagcgagtactgcaacaaccacctggacgcctgcatggagctgagcaagctgatgaaggacagcagataccagcacttcttcgaggcctgcagactgctgcagcagatgatcgacatcgccatcgacggcttcctgctgacccccgtgcagaagatctgcaagtaccccctgcagctggccgagctgctgaagtacaccgcccaggaccacagcgactacagatacgtggccgccgccctggccgtgatgagaaacgtgacccagcagatcaacgagagaaagagaagactggagaacatcgacaagatcgcccagtggcaggccagcgtgctggactgggagggcgaggacatcctggacagaagcagcgagctgatctacaccggcgagatggcctggatctaccagccctacggcagaaaccagcagagagtgttcttcctgttcgaccaccagatggtgctgtgcaagaaggacctgatcagaagagacatcctgtactacaagggcagaatcgacatggacaagtacgaggtggtggacatcgaggacggcagagacgacgacttcaacgtgagcatgaagaacgccttcaagctgcacaacaaggagaccgaggagatccacctgttcttcgccaagaagctggaggagaagatcagatggctgagagccttcagagaggagagaaagatggtgcaggaggacgagaagatcggcttcgagatcagcgagaaccagaagagacaggccgccatgaccgtgagaaaggtgcccaagcagaagggcgtgaacagcgccagaagcgtgccccccagctacccccccccccaggaccccctgaaccacggccagtacctggtgcccgacggcatcgcccagagccaggtgttcgagttcaccgagcccaagagaagccagagccccttctggcagaacttcagcagactgacccccttcaagaagtag

SEQ ID NO: 76121 - DNA, 2409 bp, synthetic construct
  misc_feature 1..2409: note = Description of Artificial Sequence: Synthetic coding sequence
  source 1..2409: mol_type = other DNA
atgcccagaatcatgatcaagggcggcgtgtggagaaacaccgaggacgagatcctgaaggccgccgtgatgaagtacggcaagaaccagtggagcagaatcgccagcctgctgcacagaaagagcgccaagcagtgcaaggccagatggtacgagtggctggaccccagcatcaagaagaccgagtggagcagagaggaggaggagaagctgctgcacctggccaagctgatgcccacccagtggagaaccatcgcccccatcatcggcagaaccgccgcccagtgcctggagcactacgagttcctgctggacaaggccgcccagagagacaacgaggaggagaccaccgacgaccccagaaagctgaagcccggcgagatcgaccccaaccccgagaccaagcccgccagacccgaccccatcgacatggacgaggacgagctggagatgctgagcgaggccagagccagactggccaacacccagggcaagaaggccaagagaaaggccagagagaagcagctggaggaggccagaagactggccgccctgcagaagagaagagagctgagagccgccggcatcgagatccagaagaagagaaagagaaagagaggcgtggactacaacgccgagatccccttcgagaagaagcccgccctgggcttctacgacaccagcgaggagaactaccaggccctggacgccgacttcagaaagctgagacagcaggacctggacggcgagctgagaagcgagaaggagggcagagacagaaagaaggacaagcagcacctgaagagaaagaaggagagcgacctgcccagcgccatcctgcagaccagcggcgtgagcgagttcaccaagaagagaagcaagctggtgctgcccgccccccagatcagcgacgccgagctgcaggaggtggtgaaggtgggccaggccagcgagatcgccagacagaccgccgaggagagcggcatcaccaacagcgccagcagcaccctgctgagcgagtacaacgtgaccaacaacagcgtggccctgagaacccccagaacccccgccagccaggacagaatcctgcaggaggcccagaacctgatggccctgaccaacgtggacacccccctgaagggcggcctgaacacccccctgcacgagagcgacttcagcggcgtgaccccccagagacaggtggtgcagacccccaacaccgtgctgagcacccccttcagaacccccagcaacggcgccgagggcctgacccccagaagcggcaccacccccaagcccgtgatcaacagcacccccggcagaacccccctgagagacaagctgaacatcaaccccgaggacggcatggccgactacagcgaccccagctacgtgaagcagatggagagagagagcagagagcacctgagactgggcctgctgggcctgcccgcccccaagaacgacttcgagatcgtgctgcccgagaacgccgagaaggagctggaggagagagagatcgacgacacctacatcgaggacgccgccgacgtggacgccagaaagcaggccatcagagacgccgagagagtgaaggagatgaagagaatgcacaaggccgtgcagaaggacctgcccagacccagcgaggtgaacgagaccatcctgagacccctgaacgtggagccccccctgaccgacctgcagaagagcgaggagctgatcaagaaggagatgatcaccatgctgcactacgacctgctgcaccacccctacgagcccagcggcaacaagaagggcaagaccgtgggcttcggcaccaacaacagcgagcacatcacctacctggagcacaacccctacgagaagttcagcaaggaggagctgaagaaggcccaggacgtgctggtgcaggagatggaggtggtgaagcagggcatgagccacggcgagctgagcagcgaggcctacaaccaggtgtgggaggagtgctacagccaggtgctgtacctgcccggccagagcagatacaccagagccaacctggccagcaagaaggacagaatcgagagcctggagaagagactggagatcaacagaggccacatgaccaccgaggccaagagagccgccaagatggagaagaagatgaagatcctgctgggcggctaccagagcagagccatgggcctgatgaagcagctgaacgacctgtgggaccagatcgagcaggcccacctggagctgagaaccttcgaggagctgaagaagcacgaggacagcgccatccccagaagactggagtgcctgaaggaggacgtgcagagacagcaggagagagagaaggagctgcagcacagatacgccgacctgctgctggagaaggagaccctgaagagcaagttctag

SEQ ID NO: 76122 - DNA, 1455 bp, synthetic construct
  misc_feature 1..1455: note = Description of Artificial Sequence: Synthetic coding sequence
  source 1..1455: mol_type = other DNA
atgagacacagcaagagaacctactgccccgactgggacgacaaggactgggactacggcaagtggagaagcagcagcagccacaagagaagaaagagaagccacagcagcgcccaggagaacaagagatgcaagtacaaccacagcaagatgtgcgacagccactacctggagagcagaagcatcaacgagaaggactaccacagcagaagatacatcgacgagtacagaaacgactacacccagggctgcgagcccggccacagacagagagaccacgagagcagataccagaaccacagcagcaagagcagcggcagaagcggcagaagcagctacaagagcaagcacagaatccaccacagcaccagccacagaagaagccacggcaagagccacagaagaaagagaaccagaagcgtggaggacgacgaggagggccacctgatctgccagagcggcgacgtgctgagcgccagatacgagatcgtggacaccctgggcgagggcgccttcggcaaggtggtggagtgcatcgaccacaaggccggcggcagacacgtggccgtgaagatcgtgaagaacgtggacagatactgcgaggccgccagaagcgagatccaggtgctggagcacctgaacaccaccgaccccaacagcaccttcagatgcgtgcagatgctggagtggttcgagcaccacggccacatctgcatcgtgttcgagctgctgggcctgagcacctacgacttcatcaaggagaacggcttcctgcccttcagactggaccacatcagaaagatggcctaccagatctgcaagagcgtgaacttcctgcacagcaacaagctgacccacaccgacctgaagcccgagaacatcctgttcgtgcagagcgactacaccgaggcctacaaccccaagatcaagagagacgagagaaccctgatcaaccccgacatcaaggtggtggacttcggcagcgccacctacgacgacgagcaccacagcaccctggtgagcaccagacactacagagcccccgaggtgatcctggccctgggctggagccagccctgcgacgtgtggagcatcggctgcatcctgatcgagtactacctgggcttcaccgtgttccccacccacgacagcaaggagcacctggccatgatggagagaatcctgggccccctgcccaagcacatgatccagaagaccagaaagagaaagtacttccaccacgacagactggactgggacgagcacagcagcgccggcagatacgtgagcagaagatgcaagcccctgaaggagttcatgctgagccaggacgtggagcacgagagactgttcgacctgatccagaagatgctggagtacgaccccgccaagagaatcaccctgagagaggccctgaagcaccccttcttcgacctgctgaagaagagcatctag

SEQ ID NO: 76123 - DNA, 1365 bp, synthetic construct
  misc_feature 1..1365: note = Description of Artificial Sequence: Synthetic coding sequence
  source 1..1365: mol_type = other DNA
atgagacacagcaagagaacctactgccccgactgggacgacaaggactgggactacggcaagtggagaagcagcagcagccacaagagaagaaagagaagccacagcagcgcccaggagaacaagagatgcaagtacaaccacagcaagatgtgcgacagccactacctggagagcagaagcatcaacgagaaggactaccacagcagaagatacatcgacgagtacagaaacgactacacccagggctgcgagcccggccacagacagagagaccacgagagcagataccagaaccacagcagcaagagcagcggcagaagcggcagaagcagctacaagagcaagcacagaatccaccacagcaccagccacagaagaagccacggcgacgagatcgtggacaccctgggcgagggcgccttcggcaaggtggtggagtgcatcgaccacaaggccggcggcagacacgtggccgtgaagatcgtgaagaacgtggacagatactgcgaggccgccagaagcgagatccaggtgctggagcacctgaacaccaccgaccccaacagcaccttcagatgcgtgcagatgctggagtggttcgagcaccacggccacatctgcatcgtgttcgagctgctgggcctgagcacctacgacttcatcaaggagaacggcttcctgcccttcagactggaccacatcagaaagatggcctaccagatctgcaagagcgtgaacttcctgcacagcaacaagctgacccacaccgacctgaagcccgagaacatcctgttcgtgcagagcgactacaccgaggcctacaaccccaagatcaagagagacgagagaaccctgatcaaccccgacatcaaggtggtggacttcggcagcgccacctacgacgacgagcaccacagcaccctggtgagcaccagacactacagagcccccgaggtgatcctggccctgggctggagccagccctgcgacgtgtggagcatcggctgcatcctgatcgagtactacctgggcttcaccgtgttccccacccacgacagcaaggagcacctggccatgatggagagaatcctgggccccctgcccaagcacatgatccagaagaccagaaagagaaagtacttccaccacgacagactggactgggacgagcacagcagcgccggcagatacgtgagcagaagatgcaagcccctgaaggagttcatgctgagccaggacgtggagcacgagagactgttcgacctgatccagaagatgctggagtacgaccccgccaagagaatcaccctgagagaggccctgaagcaccccttcttcgacctgctgaagaagagcatctag

SEQ ID NO: 76124 - DNA, 1581 bp, synthetic construct
  misc_feature 1..1581: note = Description of Artificial Sequence: Synthetic coding sequence
  source 1..1581: mol_type = other DNA
atggccgccggcagaagacccgccagcgccctgtggcccgagagaagaggcagccccctgagaggcgacctgctgggcttccagaacgtgagagagcccagcagctgcggcgagaccctgagcggcatgagacacagcaagagaacctactgccccgactgggacgacaaggactgggactacggcaagtggagaagcagcagcagccacaagagaagaaagagaagccacagcagcgcccaggagaacaagagatgcaagtacaaccacagcaagatgtgcgacagccactacctggagagcagaagcatcaacgagaaggactaccacagcagaagatacatcgacgagtacagaaacgactacacccagggctgcgagcccggccacagacagagagaccacgagagcagataccagaaccacagcagcaagagcagcggcagaagcggcagaagcagctacaagagcaagcacagaatccaccacagcaccagccacagaagaagccacggcaagagccacagaagaaagagaaccagaagcgtggaggacgacgaggagggccacctgatctgccagagcggcgacgtgctgagcgccagatacgagatcgtggacaccctgggcgagggcgccttcggcaaggtggtggagtgcatcgaccacaaggccggcggcagacacgtggccgtgaagatcgtgaagaacgtggacagatactgcgaggccgccagaagcgagatccaggtgctggagcacctgaacaccaccgaccccaacagcaccttcagatgcgtgcagatgctggagtggttcgagcaccacggccacatctgcatcgtgttcgagctgctgggcctgagcacctacgacttcatcaaggagaacggcttcctgcccttcagactggaccacatcagaaagatggcctaccagatctgcaagagcgtgaacttcctgcacagcaacaagctgacccacaccgacctgaagcccgagaacatcctgttcgtgcagagcgactacaccgaggcctacaaccccaagatcaagagagacgagagaaccctgatcaaccccgacatcaaggtggtggacttcggcagcgccacctacgacgacgagcaccacagcaccctggtgagcaccagacactacagagcccccgaggtgatcctggccctgggctggagccagccctgcgacgtgtggagcatcggctgcatcctgatcgagtactacctgggcttcaccgtgttccccacccacgacagcaaggagcacctggccatgatggagagaatcctgggccccctgcccaagcacatgatccagaagaccagaaagagaaagtacttccaccacgacagactggactgggacgagcacagcagcgccggcagatacgtgagcagaagatgcaagcccctgaaggagttcatgctgagccaggacgtggagcacgagagactgttcgacctgatccagaagatgctggagtacgaccccgccaagagaatcaccctgagagaggccctgaagcaccccttcttcgacctgctgaagaagagcatctag

SEQ ID NO: 76125 - DNA, 1494 bp, synthetic construct
  misc_feature 1..1494: note = Description of Artificial Sequence: Synthetic coding sequence
  source 1..1494: mol_type = other DNA
atgccccaccccagaagataccacagcagcgagagaggcagcagaggcagctacagagagcactacagaagcagaaagcacaagagaagaagaagcagaagctggagcagcagcagcgacagaaccagaagaagaagaagagaggacagctaccacgtgagaagcagaagctacgacgacagaagcagcgacagaagagtgtacgacagaagatactgcggcagctacagaagaaacgactacagcagagacagaggcgacgcctactacgacaccgactacagacacagctacgagtaccagagagagaacagcagctacagaagccagagaagcagcagaagaaagcacagaagaagaagaagaagaagcagaaccttcagcagaagcagcagccacagcagcagaagagccaagagcgtggaggacgacgccgagggccacctgatctaccacgtgggcgactggctgcaggagagatacgagatcgtgagcaccctgggcgagggcaccttcggcagagtggtgcagtgcgtggaccacagaagaggcggcgccagagtggccctgaagatcatcaagaacgtggagaagtacaaggaggccgccagactggagatcaacgtgctggagaagatcaacgagaaggaccccgacaacaagaacctgtgcgtgcagatgttcgactggttcgactaccacggccacatgtgcatcagcttcgagctgctgggcctgagcaccttcgacttcctgaaggacaacaactacctgccctaccccatccaccaggtgagacacatggccttccagctgtgccaggccgtgaagttcctgcacgacaacaagctgacccacaccgacctgaagcccgagaacatcctgttcgtgaacagcgactacgagctgacctacaacctggagaagaagagagacgagagaagcgtgaagagcaccgccgtgagagtggtggacttcggcagcgccaccttcgaccacgagcaccacagcaccatcgtgagcaccagacactacagagcccccgaggtgatcctggagctgggctggagccagccctgcgacgtgtggagcatcggctgcatcatcttcgagtactacgtgggcttcaccctgttccagacccacgacaacagagagcacctggccatgatggagagaatcctgggccccatccccagcagaatgatcagaaagaccagaaagcagaagtacttctacagaggcagactggactgggacgagaacaccagcgccggcagatacgtgagagagaactgcaagcccctgagaagatacctgaccagcgaggccgaggagcaccaccagctgttcgacctgatcgagagcatgctggagtacgagcccgccaagagactgaccctgggcgaggccctgcagcaccccttcttcgccagactgagagccgagccccccaacaagctgtgggacagcagcagagacatcagcagatag

SEQ ID NO: 76126 - DNA, 1497 bp, synthetic construct
  misc_feature 1..1497: note = Description of Artificial Sequence: Synthetic coding sequence
  source 1..1497: mol_type = other DNA
atgccccaccccagaagataccacagcagcgagagaggcagcagaggcagctacagagagcactacagaagcagaaagcacaagagaagaagaagcagaagctggagcagcagcagcgacagaaccagaagaagaagaagagaggacagctaccacgtgagaagcagaagcagctacgacgacagaagcagcgacagaagagtgtacgacagaagatactgcggcagctacagaagaaacgactacagcagagacagaggcgacgcctactacgacaccgactacagacacagctacgagtaccagagagagaacagcagctacagaagccagagaagcagcagaagaaagcacagaagaagaagaagaagaagcagaaccttcagcagaagcagcagccacagcagcagaagagccaagagcgtggaggacgacgccgagggccacctgatctaccacgtgggcgactggctgcaggagagatacgagatcgtgagcaccctgggcgagggcaccttcggcagagtggtgcagtgcgtggaccacagaagaggcggcgccagagtggccctgaagatcatcaagaacgtggagaagtacaaggaggccgccagactggagatcaacgtgctggagaagatcaacgagaaggaccccgacaacaagaacctgtgcgtgcagatgttcgactggttcgactaccacggccacatgtgcatcagcttcgagctgctgggcctgagcaccttcgacttcctgaaggacaacaactacctgccctaccccatccaccaggtgagacacatggccttccagctgtgccaggccgtgaagttcctgcacgacaacaagctgacccacaccgacctgaagcccgagaacatcctgttcgtgaacagcgactacgagctgacctacaacctggagaagaagagagacgagagaagcgtgaagagcaccgccgtgagagtggtggacttcggcagcgccaccttcgaccacgagcaccacagcaccatcgtgagcaccagacactacagagcccccgaggtgatcctggagctgggctggagccagccctgcgacgtgtggagcatcggctgcatcatcttcgagtactacgtgggcttcaccctgttccagacccacgacaacagagagcacctggccatgatggagagaatcctgggccccatccccagcagaatgatcagaaagaccagaaagcagaagtacttctacagaggcagactggactgggacgagaacaccagcgccggcagatacgtgagagagaactgcaagcccctgagaagatacctgaccagcgaggccgaggagcaccaccagctgttcgacctgatcgagagcatgctggagtacgagcccgccaagagactgaccctgggcgaggccctgcagcaccccttcttcgccagactgagagccgagccccccaacaagctgtgggacagcagcagagacatcagcagatag

SEQ ID NO: 76127 - DNA, 1500 bp, synthetic construct
  misc_feature 1..1500: note = Description of Artificial Sequence: Synthetic coding sequence
  source 1..1500: mol_type = other DNA
atgccccaccccagaagataccacagcagcgagagaggcagcagaggcagctacagagagcactacagaagcagaaagcacaagagaagaagaagcagaagctggagcagcagcagcgacagaaccagaagaagaagaagagaggacagctaccacgtgagaagcagaagcagctacgacgacagaagcagcgacagaagagtgtacgacagaagatactgcggcagctacagaagaaacgactacagcagagacagaggcgacgcctactacgacaccgactacagacacagctacgagtaccagagagagaacagcagctacagaagccagagaagcagcagaagaaagcacagaagaagaagaagaagaagcagaaccttcagcagaagcagcagccagcacagcagcagaagagccaagagcgtggaggacgacgccgagggccacctgatctaccacgtgggcgactggctgcaggagagatacgagatcgtgagcaccctgggcgagggcaccttcggcagagtggtgcagtgcgtggaccacagaagaggcggcgccagagtggccctgaagatcatcaagaacgtggagaagtacaaggaggccgccagactggagatcaacgtgctggagaagatcaacgagaaggaccccgacaacaagaacctgtgcgtgcagatgttcgactggttcgactaccacggccacatgtgcatcagcttcgagctgctgggcctgagcaccttcgacttcctgaaggacaacaactacctgccctaccccatccaccaggtgagacacatggccttccagctgtgccaggccgtgaagttcctgcacgacaacaagctgacccacaccgacctgaagcccgagaacatcctgttcgtgaacagcgactacgagctgacctacaacctggagaagaagagagacgagagaagcgtgaagagcaccgccgtgagagtggtggacttcggcagcgccaccttcgaccacgagcaccacagcaccatcgtgagcaccagacactacagagcccccgaggtgatcctggagctgggctggagccagccctgcgacgtgtggagcatcggctgcatcatcttcgagtactacgtgggcttcaccctgttccagacccacgacaacagagagcacctggccatgatggagagaatcctgggccccatccccagcagaatgatcagaaagaccagaaagcagaagtacttctacagaggcagactggactgggacgagaacaccagcgccggcagatacgtgagagagaactgcaagcccctgagaagatacctgaccagcgaggccgaggagcaccaccagctgttcgacctgatcgagagcatgctggagtacgagcccgccaagagactgaccctgggcgaggccctgcagcaccccttcttcgccagactgagagccgagccccccaacaagctgtgggacagcagcagagacatcagcagatag

SEQ ID NO: 76128 - DNA, 816 bp, synthetic construct
  misc_feature 1..816: note = Description of Artificial Sequence: Synthetic coding sequence
  source 1..816: mol_type = other DNA
atgttcgactggttcgactaccacggccacatgtgcatcagcttcgagctgctgggcctgagcaccttcgacttcctgaaggacaacaactacctgccctaccccatccaccaggtgagacacatggccttccagctgtgccaggccgtgaagttcctgcacgacaacaagctgacccacaccgacctgaagcccgagaacatcctgttcgtgaacagcgactacgagctgacctacaacctggagaagaagagagacgagagaagcgtgaagagcaccgccgtgagagtggtggacttcggcagcgccaccttcgaccacgagcaccacagcaccatcgtgagcaccagacactacagagcccccgaggtgatcctggagctgggctggagccagccctgcgacgtgtggagcatcggctgcatcatcttcgagtactacgtgggcttcaccctgttccagacccacgacaacagagagcacctggccatgatggagagaatcctgggccccatccccagcagaatgatcagaaagaccagaaagcagaagtacttctacagaggcagactggactgggacgagaacaccagcgccggcagatacgtgagagagaactgcaagcccctgagaagatacctgaccagcgaggccgaggagcaccaccagctgttcgacctgatcgagagcatgctggagtacgagcccgccaagagactgaccctgggcgaggccctgcagcaccccttcttcgccagactgagagccgagccccccaacaagctgtgggacagcagcagagacatcagcagatag

SEQ ID NO: 76129 - DNA, 1500 bp, synthetic construct; identical to SEQ ID NO: 76127
  misc_feature 1..1500: note = Description of Artificial Sequence: Synthetic coding sequence
  source 1..1500: mol_type = other DNA

SEQ ID NO: 76130 - DNA, 1473 bp, synthetic construct
  misc_feature 1..1473: note = Description of Artificial Sequence: Synthetic coding sequence
  source 1..1473: mol_type = other DNA
atgcaccactgcaagagatacagaagccccgagcccgacccctacctgagctacagatggaagagaagaagaagctacagcagagagcacgagggcagactgagataccccagcagaagagagcccccccccagaagaagcagaagcagaagccacgacagactgccctaccagagaagatacagagagagaagagacagcgacacctacagatgcgaggagagaagccccagcttcggcgaggactactacggccccagcagaagcagacacagaagaagaagcagagagagaggcccctacagaaccagaaagcacgcccaccactgccacaagagaagaaccagaagctgcagcagcgccagcagcagaagccagcagagcagcaagagaagcagcagaagcgtggaggacgacaaggagggccacctggtgtgcagaatcggcgactggctgcaggagagatacgagatcgtgggcaacctgggcgagggcaccttcggcaaggtggtggagtgcctggaccacgccagaggcaagagccaggtggccctgaagatcatcagaaacgtgggcaagtacagagaggccgccagactggagatcaacgtgctgaagaagatcaaggagaaggacaaggagaacaagttcctgtgcgtgctgatgagcgactggttcaacttccacggccacatgtgcatcgccttcgagctgctgggcaagaacaccttcgagttcctgaaggagaacaacttccagccctaccccctgccccacgtgagacacatggcctaccagctgtgccacgccctgagattcctgcacgagaaccagctgacccacaccgacctgaagcccgagaacatcctgttcgtgaacagcgagttcgagaccctgtacaacgagcacaagagctgcgaggagaagagcgtgaagaacaccagcatcagagtggccgacttcggcagcgccaccttcgaccacgagcaccacaccaccatcgtggccaccagacactacagaccccccgaggtgatcctggagctgggctgggcccagccctgcgacgtgtggagcatcggctgcatcctgttcgagtactacagaggcttcaccctgttccagacccacgagaacagagagcacctggtgatgatggagaagatcctgggccccatccccagccacatgatccacagaaccagaaagcagaagtacttctacaagggcggcctggtgtgggacgagaacagcagcgacggcagatacgtgaaggagaactgcaagcccctgaagagctacatgctgcaggacagcctggagcacgtgcagctgttcgacctgatgagaagaatgctggagttcgaccccgcccagagaatcaccctggccgaggccctgctgcaccccttcttcgccggcctgacccccgaggagagaagcttccacaccagcagaaaccccagcagatag

SEQ ID NO: 76131 - DNA, 459 bp, synthetic construct
  misc_feature 1..459: note = Description of Artificial Sequence: Synthetic coding sequence
  source 1..459: mol_type = other DNA
atgcaccactgcaagagatacagaagccccgagcccgacccctacctgagctacagatggaagagaagaagaagctacagcagagagcacgagggcagactgagataccccagcagaagagagcccccccccagaagaagcagaagcagaagccacgacagactgccctaccagagaagatacagagagagaagagacagcgacacctacagatgcgaggagagaagccccagcttcggcgaggactactacggccccagcagaagcagacacagaagaagaagcagagagagaggcccctacagaaccagaaagcacgcccaccactgccacaagagaagaaccagaagctgcagcagcgccagcagcatgagactgtggggcacctgggtgaaggcccccctggccagatggtggagcgcctggaccatgcccgagggcagcctgagactgccctag

SEQ ID NO: 76132 - DNA, 1404 bp, synthetic construct
  misc_feature 1..1404: note = Description of Artificial Sequence: Synthetic coding sequence
  source 1..1404: mol_type = other DNA
atgcaccactgcaagagatacagaagccccgagcccgacccctacctgagctacagatggaagagaagaagaagctacagcagagagcacgagggcagactgagataccccagcagaagagagcccccccccagaagaagcagaagcagaagccacgacagactgccctaccagagaagatacagagagagaagagacagcgacacctacagatgcgaggagagaagccccagcttcggcgaggactactacggccccagcagaagcagacacagaagaagaagcagagagagaggcccctacagaaccagaaagcacgcccaccactgccacaagagaagaaccagaagctgcagcagcgccagcagcagaagccagcagagcagcaagagaagcagcagaagcgtggaggacgacaaggagggccacctggtgtgcagaatcggcgactggctgcaggagagatggaagagccaggtggccctgaagatcatcagaaacgtgggcaagtacagagaggccgccagactggagatcaacgtgctgaagaagatcaaggagaaggacaaggagaacaagttcctgtgcgtgctgatgagcgactggttcaacttccacggccacatgtgcatcgccttcgagctgctgggcaagaacaccttcgagttcctgaaggagaacaacttccagccctaccccctgccccacgtgagacacatggcctaccagctgtgccacgccctgagattcctgcacgagaaccagctgacccacaccgacctgaagcccgagaacatcctgttcgtgaacagcgagttcgagaccctgtacaacgagcacaagagctgcgaggagaagagcgtgaagaacaccagcatcagagtggccgacttcggcagcgccaccttcgaccacgagcaccacaccaccatcgtggccaccagacactacagaccccccgaggtgatcctggagctgggctgggcccagccctgcgacgtgtggagcatcggctgcatcctgttcgagtactacagaggcttcaccctgttccagacccacgagaacagagagcacctggtgatgatggagaagatcctgggccccatccccagccacatgatccacagaaccagaaagcagaagtacttctacaagggcggcctggtgtgggacgagaacagcagcgacggcagatacgtgaaggagaactgcaagcccctgaagagctacatgctgcaggacagcctggagcacgtgcagctgttcgacctgatgagaagaatgctggagttcgaccccgcccagagaatcaccctggccgaggccctgctgcaccccttcttcgccggcctgacccccgaggagagaagcttccacaccagcagaaaccccagcagatag

SEQ ID NO: 76133 - DNA, 1473 bp, synthetic construct; identical to SEQ ID NO: 76130
  misc_feature 1..1473: note = Description of Artificial Sequence: Synthetic coding sequence
  source 1..1473: mol_type = other DNA

SEQ ID NO: 76134 - DNA, 1917 bp, synthetic construct
  misc_feature 1..1917: note = Description of Artificial Sequence: Synthetic coding sequence
  source 1..1917: mol_type = other DNA
atgcccgtgctgagcgccagaagaagagagctggccgaccacgccggcagcggcagaagaagcggccccagccccaccgccagaagcggcccccacctgagcgccctgagagcccagcccgccagagccgcccacctgagcggcagaggcacctacgtgagaagagacaccgccggcggcggccccggccaggccagacccctgggcccccccggcaccagcctgctgggcagaggcgccagaagaagcggcgagggctggtgccccggcgccttcgagagcggcgccagagccgccagaccccccagcagagtggagcccagactggccaccgccgccagcagagagggcgccggcctgcccagagccgaggtggccgccggcagcggcagaggcgccagaagcggcgagtggggcctggccgccgccggcgcctgggagaccatgcaccactgcaagagatacagaagccccgagcccgacccctacctgagctacagatggaagagaagaagaagctacagcagagagcacgagggcagactgagataccccagcagaagagagcccccccccagaagaagcagaagcagaagccacgacagactgccctaccagagaagatacagagagagaagagacagcgacacctacagatgcgaggagagaagccccagcttcggcgaggactactacggccccagcagaagcagacacagaagaagaagcagagagagaggcccctacagaaccagaaagcacgcccaccactgccacaagagaagaaccagaagctgcagcagcgccagcagcagaagccagcagagcagcaagagaagcagcagaagcgtggaggacgacaaggagggccacctggtgtgcagaatcggcgactggctgcaggagagatacgagatcgtgggcaacctgggcgagggcaccttcggcaaggtggtggagtgcctggaccacgccagaggcaagagccaggtggccctgaagatcatcagaaacgtgggcaagtacagagaggccgccagactggagatcaacgtgctgaagaagatcaaggagaaggacaaggagaacaagttcctgtgcgtgctgatgagcgactggttcaacttccacggccacatgtgcatcgccttcgagctgctgggcaagaacaccttcgagttcctgaaggagaacaacttccagccctaccccctgccccacgtgagacacatggcctaccagctgtgccacgccctgagattcctgcacgagaaccagctgacccacaccgacctgaagcccgagaacatcctgttcgtgaacagcgagttcgagaccctgtacaacgagcacaagagctgcgaggagaagagcgtgaagaacaccagcatcagagtggccgacttcggcagcgccaccttcgaccacgagcaccacaccaccatcgtggccaccagacactacagaccccccgaggtgatcctggagctgggctgggcccagccctgcgacgtgtggagcatcggctgcatcctgttcgagtactacagaggcttcaccctgttccagacccacgagaacagagagcacctggtgatgatggagaagatcctgggccccatccccagccacatgatccacagaaccagaaagcagaagtacttctacaagggcggcctggtgtgggacgagaacagcagcgacggcagatacgtgaaggagaactgcaagcccctgaagagctacatgctgcaggacagcctggagcacgtgcagctgttcgacctgatgagaagaatgctggagttcgaccccgcccagagaatcaccctggccgaggccctgctgcaccccttcttcgccggcctgacccccgaggagagaagcttccacaccagcagaaaccccagcagatag

SEQ ID NO: 76135 - DNA, 327 bp, synthetic construct
  misc_feature 1..327: note = Description of Artificial Sequence: Synthetic coding sequence
  source 1..327: mol_type = other DNA
atgagcctgaccagcagcagcagcgtgagagtggagtggatcgccgccgtgaccatcgccgccggcaccgccgccatcggctacctggcctacaagagattctacgtgaaggaccacagaaacaaggccatgatcaacctgcacatccagaaggacaaccccaagatcgtgcacgccttcgacatggaggacctgggcgacaaggccgtgtactgcagatgctggagaagcaagaagttccccttctgcgacggcgcccacaccaagcacaacgaggagaccggcgacaacgtgggccccctgatcatcaagaagaaggagacctag

SEQ ID NO: 76136 - DNA, 408 bp, synthetic construct
  misc_feature 1..408: note = Description of Artificial Sequence: Synthetic coding sequence
  source 1..408: mol_type = other DNA
atggtgctggagagcgtggccagaatcgtgaaggtgcagctgcccgcctacctgaagagactgcccgtgcccgagagcatcaccggcttcgccagactgaccgtgagcgagtggctgagactgctgcccttcctgggcgtgctggccctgctgggctacctggccgtgagacccttcctgcccaagaagaagcagcagaaggacagcctgatcaacctgaagatccagaaggagaaccccaaggtggtgaacgagatcaacatcgaggacctgtgcctgaccaaggccgcctactgcagatgctggagaagcaagaccttccccgcctgcgacggcagccacaacaagcacaacgagctgaccggcgacaacgtgggccccctgatcctgaagaagaaggaggtgtag

SEQ ID NO: 76137 - DNA, 384 bp, synthetic construct
  misc_feature 1..384: note = Description of Artificial Sequence: Synthetic coding sequence
  source 1..384: mol_type = other DNA
atgagaggcgccggcgccatcctgagacccgccgccagaggcgccagagacctgaaccccagaagagacatcagcagctggctggcccagtggttccccagaacccccgccagaagcgtggtggccctgaagacccccatcaaggtggagctggtggccggcaagacctacagatggtgcgtgtgcggcagaagcaagaagcagcccttctgcgacggcagccacttcttccagagaaccggcctgagccccctgaagttcaaggcccaggagaccagaatggtggccctgtgcacctgcaaggccacccagagacccccctactgcgacggcacccacagaagcgagagagtgcagaaggccgaggtgggcagccccctgtag

SEQ ID NO: 76138 - DNA, 1740 bp, synthetic construct
  misc_feature 1..1740: note = Description of Artificial Sequence: Synthetic coding sequence
  source 1..1740: mol_type = other DNA
atgcccagcgccagctgcgacaccctgctggacgacatcgaggacatcgtgagccaggaggacagcaagccccaggacagacacttcgtgagaaaggacgtggtgcccaaggtgagaagaagaaacacccagaagtacctgcaggaggaggagaacagcccccccagcgacagcaccatccccggcatccagaagatctggatcagaacctggggctgcagccacaacaacagcgacggcgagtacatggccggccagctggccgcctacggctacaagatcaccgagaacgccagcgacgccgacctgtggctgctgaacagctgcaccgtgaagaaccccgccgaggaccacttcagaaacagcatcaagaaggcccaggaggagaacaagaagatcgtgctggccggctgcgtgccccaggcccagcccagacaggactacctgaagggcctgagcatcatcggcgtgcagcagatcgacagagtggtggaggtggtggaggagaccatcaagggccacagcgtgagactgctgggccagaagaaggacaacggcagaagactgggcggcgccagactggacctgcccaagatcagaaagaaccccctgatcgagatcatcagcatcaacaccggctgcctgaacgcctgcacctactgcaagaccaagcacgccagaggcaacctggccagctaccccatcgacgagctggtggacagagccaagcagagcttccaggagggcgtgtgcgagatctggctgaccagcgaggacaccggcgcctacggcagagacatcggcaccaacctgcccaccctgctgtggaagctggtggaggtgatccccgagggcgccatgctgagactgggcatgaccaaccccccctacatcctggagcacctggaggagatggccaagatcctgaaccaccccagagtgtacgccttcctgcacatccccgtgcagagcgccagcgacagcgtgctgatggagatgaagagagagtactgcgtggccgacttcaagagagtggtggacttcctgaaggagaaggtgcccggcatcaccatcgccaccgacatcatctgcggcttccccggcgagaccgaccaggacttccaggagaccgtgaagctggtggaggagtacaagttccccagcctgttcatcaaccagttctaccccagacccggcacccccgccgccaagatggagcaggtgcccgcccaggtgaagaagcagagaaccaaggacctgagcagagtgttccacagctacagcccctacgaccacaagatcggcgagagacagcaggtgctggtgaccgaggagagcttcgacagcaagttctacgtggcccacaaccagttctacgagcaggtgctggtgcccaagaaccccgccttcatgggcaagatggtggaggtggacatctacgagagcggcaagcacttcatgaagggccagcccgtgagcgacgccaaggtgtacacccccagcatcagcaagcccctggccaagggcgaggtgagcggcctgaccaaggacttcagaaacggcctgggcaaccagctgagcagcggcagccacaccagcgccgccagccagtgcgacagcgccagcagcagaatggtgctgcccatgcccagactgcaccaggactgcgccctgagaatgagcgtgggcctggccctgctgggcctgctgttcgccttcttcgtgaaggtgtacaactag

SEQ ID NO: 76139 - DNA, 1740 bp, synthetic construct; identical to SEQ ID NO: 76138
  misc_feature 1..1740: note = Description of Artificial Sequence: Synthetic coding sequence
  source 1..1740: mol_type = other DNA

SEQ ID NO: 76140 - DNA, 1467 bp, synthetic construct
  misc_feature 1..1467: note = Description of Artificial Sequence: Synthetic coding sequence
  source 1..1467: mol_type = other DNA
atgctgagcagaagatacgagggcgagatccccaagaacatctgcaagagaaagaagaccgtgcaccaggtgaccgagaacgccagcgacgccgacctgtggctgctgaacagctgcaccgtgaagaaccccgccgaggaccacttcagaaacagcatcaagaaggcccaggaggagaacaagaagatcgtgctggccggctgcgtgccccaggcccagcccagacaggactacctgaagggcctgagcatcatcggcgtgcagcagatcgacagagtggtggaggtggtggaggagaccatcaagggccacagcgtgagactgctgggccagaagaaggacaacggcagaagactgggcggcgccagactggacctgcccaagatcagaaagaaccccctgatcgagatcatcagcatcaacaccggctgcctgaacgcctgcacctactgcaagaccaagcacgccagaggcaacctggccagctaccccatcgacgagctggtggacagagccaagcagagcttccaggagggcgtgtgcgagatctggctgaccagcgaggacaccggcgcctacggcagagacatcggcaccaacctgcccaccctgctgtggaagctggtggaggtgatccccgagggcgccatgctgagactgggcatgaccaaccccccctacatcctggagcacctggaggagatggccaagatcctgaaccaccccagagtgtacgccttcctgcacatccccgtgcagagcgccagcgacagcgtgctgatggagatgaagagagagtactgcgtggccgacttcaagagagtggtggacttcctgaaggagaaggtgcccggcatcaccatcgccaccgacatcatctgcggcttccccggcgagaccgaccaggacttccaggagaccgtgaagctggtggaggagtacaagttccccagcctgttcatcaaccagttctaccccagacccggcacccccgccgccaagatggagcaggtgcccgcccaggtgatcggcgagagacagcaggtgctggtgaccgaggagagcttcgacagcaagttctacgtggcccacaaccagttctacgagcaggtgctggtgcccaagaaccccgccttcatgggcaagatggtggaggtggacatctacgagagcggcaagcacttcatgaagggccagcccgtgagcgacgccaaggtgtacacccccagcatcagcaagcccctggccaagggcgaggtgagcggcctgaccaaggacttcagaaacggcctgggcaaccagctgagcagcggcagccacaccagcgccgccagccagtgcgacagcgccagcagcagaatggtgctgcccatgcccagactgcaccaggactgcgccctgagaatgagcgtgggcctggccctgctgggcctgctgttcgccttcttcgtgaaggtgtacaactag

SEQ ID NO: 76141 - DNA, 4824 bp, synthetic construct
  misc_feature 1..4824: note = Description of Artificial Sequence: Synthetic coding sequence
  source 1..4824: mol_type = other DNA
atgatggacctggtgctggaggaggacgtgaccgtgcccggcaccctgagcggctgcagcggcctggtgcccagcgtgcccgacgacctggacggcatcaaccccaacgccggcctgggcaacggcctgctgcccaacgtgagcgaggagaccgtgagccccaccagagccagaaacatgaaggacttcgagaaccagatcaccgagctgaagaaggagaacttcaacctgaagctgagaatctacttcctggaggagagaatgcagcaggagttccacggccccaccgagcacatctacaagaccaacatcgagctgaaggtggaggtggagagcctgaagagagagctgcaggagagagagcagctgctgatcaaggccagcaaggccgtggagagcctggccgaggccggcggcagcgagatccagagagtgaaggaggacgccagaaagaaggtgcagcaggtggaggacctgctgaccaagagaatcctgctgctggagaaggccaaggacgtgaccgccgcccaggccgagctggagaaggccttcgccggcaccgagaccgagaaggccctgagactgagactggagagcaagctgagcgagatgaagaagatgcacgagggcgacctggccatggccctggtgctggacgagaaggacagactgatcgaggagctgaagctgagcctgaagagcaaggaggccctgatccagtgcctgaaggaggagaagagccagatggcctgccccgacgagaacgtgagcagcggcgagctgagaggcctgtgcgccgcccccagagaggagaaggagagagagaccgaggccgcccagatggagcaccagaaggagagaaacagcttcgaggagagaatccaggccctggaggaggacctgagagagaaggagagagagatcgccaccgagaagaagaacagcctgaagagagacaaggccatccagggcctgaccatggccctgaagagcaaggagaagaaggtggaggagctgaacagcgagatcgagaagctgagcgccgccttcgccaaggccagagaggccctgcagaaggcccagacccaggagttccagggcagcgaggactacgagaccgccctgagcggcaaggaggccctgagcgccgccctgagaagccagaacctgaccaagagcaccgagaaccacagactgagaagaagcatcaagaagatcacccaggagctgagcgacctgcagcaggagagagagagactggagaaggacctggaggaggcccacagagagaagagcaagggcgactgcaccatcagagacctgagaaacgaggtggagaagctgagaaacgaggtgaacgagagagagaaggccatggagaacagatacaagagcctgctgagcgagagcaacaagaagctgcacaaccaggagcaggtgatcaagcacctgaccgagagcaccaaccagaaggacgtgctgctgcagaagttcaacgagaaggacctggaggtgatccagcagaactgctacctgatggccgccgaggacctggagctgagaagcgagggcctgatcaccgagaagtgcagcagccagcagccccccggcagcaagaccatcttcagcaaggagaagaagcagagcagcgactacgaggagctgatccaggtgctgaagaaggagcaggacatctacacccacctggtgaagagcctgcaggagagcgacagcatcaacaacctgcaggccgagctgaacaagatcttcgccctgagaaagcagctggagcaggacgtgctgagctaccagaacctgagaaagaccctggaggagcagatcagcgagatcagaagaagagaggagagcttcagcctgtacagcgaccagaccagctacctgagcatctgcctggaggagaacaacagattccaggtggagcacttcagccaggaggagctgaagaagaaggtgagcgacctgatccagctggtgaaggagctgtacaccgacaaccagcacctgaagaagaccatcttcgacctgagctgcatgggcttccagggcaacggcttccccgacagactggccagcaccgagcagaccgaggaggccaagaagagcagactgcccatcctgatcaagcccagcagaagcctgggcaacatgtacagactgcccgccacccaggaggtggtgacccagctgcagagccagatcctggagctgcagggcgagctgaaggagttcaagacctgcaacaagcagctgcaccagaagctgatcctggccgaggccgtgatggagggcagacccacccccgacaagaccctgctgaacgcccagccccccgtgggcgccgcctaccaggacagccccggcgagcagaagggcatcaagaccaccagcagcgtgtggagagacaaggagatggacagcgaccagcagagaagctacgagatcgacagcgagatctgcccccccgacgacctggccagcctgcccagctgcaaggagaaccccgaggacgtgctgagccccaccagcgtggccacctacctgagcagcaagagccagcccagcgccaaggtgagcgtgatgggcaccgaccagagcgagagcatcaacaccagcaacgagaccgagtacctgaagcagaagatccacgacctggagaccgagctggagggctaccagaacttcatcttccagctgcagaagcacagccagtgcagcgaggccatcatcaccgtgctgtgcggcaccgagggcgcccaggacggcctgagcaagcccaagaacggcagcgacggcgaggagatgaccttcagcagcctgcaccaggtgagatacgtgaagcacgtgaagatcctgggccccctggcccccgagatgatcgacagcagagtgctggagaacctgaagcagcagctggaggagcaggagtacaagctgcagaaggagcagaacctgaacatgcagctgttcagcgagatccacaacctgcagaacaagttcagagacctgagcccccccagatacgacagcctggtgcagagccaggccagagagctgagcctgcagagacagcagatcaaggacggccacggcatctgcgtgatcagcagacagcacatgaacaccatgatcaaggccttcgaggagctgctgcaggccagcgacgtggactactgcgtggccgagggcttccaggagcagctgaaccagtgcgccgagctgctggagaagctggagaagctgttcctgaacggcaagagcgtgggcgtggagatgaacacccagaacgagctgatggagagaatcgaggaggacaacctgacctaccagcacctgctgcccgagagccccgagcccagcgccagccacgccctgagcgactacgagaccagcgagaagagcttcttcagcagagaccagaagcaggacaacgagaccgagaagaccagcgtgatggtgaacagcttcagccaggacctgctgatggagcacatccaggagatcagaaccctgagaaagagactggaggagagcatcaagaccaacgagaagctgagaaagcagctggagagacagggcagcgagttcgtgcagggcagcaccagcatcttcgccagcggcagcgagctgcacagcagcctgaccagcgagatccacttcctgagaaagcagaaccaggccctgaacgccatgctgatcaagggcagcagagacaagcagaaggagaacgacaagctgagagagagcctgagcagaaagaccgtgagcctggagcacctgcagagagagtacgccagcgtgaaggaggagaacgagagactgcagaaggagggcagcgagaaggagagacacaaccagcagctgatccaggaggtgagatgcagcggccaggagctgagcagagtgcaggaggaggtgaagctgagacagcagctgctgagccagaacgacaagctgctgcagagcctgagagtggagctgaaggcctacgagaagctggacgaggagcacagaagactgagagaggccagcggcgagggctggaagggccaggaccccttcagagacctgcacagcctgctgatggagatccaggccctgagactgcagctggagagaagcatcgagaccagcagcaccctgcagagcagactgaaggagcagctggccagaggcgccgagaaggcccaggagggcgccctgaccctggccgtgcaggccgtgagcatccccgaggtgcccctgcagcccgacaagcacgacggcgacaagtaccccatggagagcgacaacagcttcgacctgttcgacagcagccaggccgtgacccccaagagcgtgagcgagaccccccccctgagcggcaacgacaccgacagcctgagctgcgacagcggcagcagcgccaccagcaccccctgcgtgagcagactggtgaccggccaccacctgtgggccagcaagaacggcagacacgtgctgggcctgatcgaggactacgaggccctgctgaagcagatcagccagggccagagactgctggccgagatggacatccagacccaggaggcccccagcagcaccagccaggagctgggcaccaagggcccccaccccgcccccctgagcaagttcgtgagcagcgtgagcaccgccaagctgaccctggaggaggcctacagaagactgaagctgctgtggagagtgagcctgcccgaggacggccagtgccccctgcactgcgagcagatcggcgagatgaaggccgaggtgaccaagctgcacaagaagctgaagaagagctag

SEQ ID NO: 76142 - DNA, 5682 bp, synthetic construct
  misc_feature 1..5682: note = Description of Artificial Sequence: Synthetic coding sequence
  source 1..5682: mol_type = other DNA
atgatggacctggtgctggaggaggacgtgaccgtgcccggcaccctgagcggctgcagcggcctggtgcccagcgtgcccgacgacctggacggcatcaaccccaacgccggcctgggcaacggcctgctgcccaacgtgagcgaggagaccgtgagccccaccagagccagaaacatgaaggacttcgagaaccagatcaccgagctgaagaaggagaacttcaacctgaagctgagaatctacttcctggaggagagaatgcagcaggagttccacggccccaccgagcacatctacaagaccaacatcgagctgaaggtggaggtggagagcctgaagagagagctgcaggagagagagcagctgctgatcaaggccagcaaggccgtggagagcctggccgaggccggcggcagcgagatccagagagtgaaggaggacgccagaaagaaggtgcagcaggtggaggacctgctgaccaagagaatcctgctgctggagaaggacgtgaccgccgcccaggccgagctggagaaggccttcgccggcaccgagaccgagaaggccctgagactgagactggagagcaagctgagcgagatgaagaagatgcacgagggcgacctggccatggccctggtgctggacgagaaggacagactgatcgaggagctgaagctgagcctgaagagcaaggaggccctgatccagtgcctgaaggaggagaagagccagatggcctgccccgacgagaacgtgagcagcggcgagctgagaggcctgtgcgccgcccccagagaggagaaggagagagagaccgaggccgcccagatggagcaccagaaggagagaaacagcttcgaggagagaatccaggccctggaggaggacctgagagagaaggagagagagatcgccaccgagaagaagaacagcctgaagagagacaaggccatccagggcctgaccatggccctgaagagcaaggagaagaaggtggaggagctgaacagcgagatcgagaagctgagcgccgccttcgccaaggccagagaggccctgcagaaggcccagacccaggagttccagggcagcgaggactacgagaccgccctgagcggcaaggaggccctgagcgccgccctgagaagccagaacctgaccaagagcaccgagaaccacagactgagaagaagcatcaagaagatcacccaggagctgagcgacctgcagcaggagagagagagactggagaaggacctggaggaggcccacagagagaagagcaagggcgactgcaccatcagagacctgagaaacgaggtggagaagctgagaaacgaggtgaacgagagagagaaggccatggagaacagatacaagagcctgctgagcgagagcaacaagaagctgcacaaccaggagcaggtgatcaagcacctgaccgagagcaccaaccagaaggacgtgctgctgcagaagttcaacgagaaggacctggaggtgatccagcagaactgctacctgatggccgccgaggacctggagctgagaagcgagggcctgatcaccgagaagtgcagcagccagcagccccccggcagcaagaccatcttcagcaaggagaagaagcagagcagcgactacgaggagctgatccaggtgctgaagaaggagcaggacatctacacccacctggtgaagagcctgcaggagagcgacagcatcaacaacctgcaggccgagctgaacaagatcttcgccctgagaaagcagctggagcaggacgtgctgagctaccagaacctgagaaagaccctggaggagcagatcagcgagatcagaagaagagaggaggagagcttcagcctgtacagcgaccagaccagctacctgagcatctgcctggaggagaacaacagattccaggtggagcacttcagccaggaggagctgaagaagaaggtgagcgacctgatccagctggtgaaggagctgtacaccgacaaccagcacctgaagaagaccatcttcgacctgagctgcatgggcttccagggcaacggcttccccgacagactggccagcaccgagcagaccgagctgctggccagcaaggaggacgaggacaccatcaagatcggcgaggacgacgagatcaacttcctgagcgaccagcacctgcagcagagcaacgagatcatgaaggacctgagcaagggcggctgcaagaacggctacctgagacacaccgagagcaagatcagcgactgcgacggcgcccacgcccccggctgcctggaggagggcgccttcatcaacctgctggcccccctgttcaacgagaaggccaccctgctgctggagagcagacccgacctgctgaaggtggtgagagagctgctgctgggccagctgttcctgaccgagcaggaggtgagcggcgagcacctggacggcaagaccgagaagacccccaagcagaagggcgagctggtgcacttcgtgcagaccaacagcttcagcaagccccacgacgagctgaagctgagctgcgaggcccagctggtgaaggccggcgaggtgcccaaggtgggcctgaaggacgccagcgtgcagaccgtggccaccgagggcgacctgctgagattcaagcacgaggccaccagagaggcctgggaggagaagcccatcaacaccgccctgagcgccgagcacagacccgagaacctgcacggcgtgcccggctggcaggccgccctgctgagcctgcccggcatcaccaacagagaggccaagaagagcagactgcccatcctgatcaagcccagcagaagcctgggcaacatgtacagactgcccgccacccaggaggtggtgacccagctgcagagccagatcctggagctgcagggcgagctgaaggagttcaagacctgcaacaagcagctgcaccagaagctgatcctggccgaggccgtgatggagggcagacccacccccgacaagaccctgctgaacgcccagccccccgtgggcgccgcctaccaggacagccccggcgagcagaagggcatcaagaccaccagcagcgtgtggagagacaaggagatggacagcgaccagcagagaagctacgagatcgacagcgagatctgcccccccgacgacctggccagcctgcccagctgcaaggagaaccccgaggacgtgctgagccccaccagcgtggccacctacctgagcagcaagagccagcccagcgccaaggtgagcgtgatgggcaccgaccagagcgagagcatcaacaccagcaacgagaccgagtacctgaagcagaagatccacgacctggagaccgagctggagggctaccagaacttcatcttccagctgcagaagcacagccagtgcagcgaggccatcatcaccgtgctgtgcggcaccgagggcgcccaggacggcctgagcaagcccaagaacggcagcgacggcgaggagatgaccttcagcagcctgcaccaggtgagatacgtgaagcacgtgaagatcctgggccccctggcccccgagatgatcgacagcagagtgctggagaacctgaagcagcagctggaggagcaggagtacaagctgcagaaggagcagaacctgaacatgcagctgttcagcgagatccacaacctgcagaacaagttcagagacctgagcccccccagatacgacagcctggtgcagagccaggccagagagctgagcctgcagagacagcagatcaaggacggccacggcatctgcgtgatcagcagacagcacatgaacaccatgatcaaggccttcgaggagctgctgcaggccagcgacgtggactactgcgtggccgagggcttccaggagcagctgaaccagtgcgccgagctgctggagaagctggagaagctgttcctgaacggcaagagcgtgggcgtggagatgaacacccagaacgagctgatggagagaatcgaggaggacaacctgacctaccagcacctgctgcccgagagccccgagcccagcgccagccacgccctgagcgactacgagaccagcgagaagagcttcttcagcagagaccagaagcaggacaacgagaccgagaagaccagcgtgatggtgaacagcttcagccaggacctgctgatggagcacatccaggagatcagaaccctgagaaagagactggaggagagcatcaagaccaacgagaagctgagaaagcagctggagagacagggcagcgagttcgtgcagggcagcaccagcatcttcgccagcggcagcgagctgcacagcagcctgaccagcgagatccacttcctgagaaagcagaaccaggccctgaacgccatgctgatcaagggcagcagagacaagcagaaggagaacgacaagctgagagagagcctgagcagaaagaccgtgagcctggagcacctgcagagagagtacgccagcgtgaaggaggagaacgagagactgcagaaggagggcagcgagaaggagagacacaaccagcagctgatccaggaggtgagatgcagcggccaggagctgagcagagtgcaggaggaggtgaagctgagacagcagctgctgagccagaacgacaagctgctgcagagcctgagagtggagctgaaggcctacgagaagctggacgaggagcacagaagactgagagaggccagcggcgagggctggaagggccaggaccccttcagagacctgcacagcctgctgatggagatccaggccctgagactgcagctggagagaagcatcgagaccagcagcaccctgcagagcagactgaaggagcagctggccagaggcgccgagaaggcccaggagggcgccctgaccctggccgtgcaggccgtgagcatccccgaggtgcccctgcagcccgacaagcacgacggcgacaagtaccccatggagagcgacaacagcttcgacctgttcgacagcagccaggccgtgacccccaagagcgtgagcgagaccccccccctgagcggcaacgacaccgacagcctgagctgcgacagcggcagcagcgccaccagcaccccctgcgtgagcagactggtgaccggccaccacctgtgggccagcaagaacggcagacacgtgctgggcctgatcgaggactacgaggccctgctgaagcagatcagccagggccagagactgctggccgagatggacatccagacccaggaggcccccagcagcaccagccaggagctgggcaccaagggcccccaccccgcccccctgagcaagttcgtgagcagcgtgagcaccgccaagctgaccctggaggaggcctacagaagactgaagctgctgtggagagtgagcctgcccgaggacggccagtgccccctgcactgcgagcagatcggcgagatgaaggccgaggtgaccaagctgcacaagaagctgttcgagcaggagaagaagctgcagaacaccatgaagctgctgcagctgagcaagagacaggagaaggtgatcttcgaccagctggtggtgacccacaagatcctgagaaaggccagaggcaacctggagctgagacccggcggcgcccaccccggcacctgcagccccagcagacccggcagctag

SEQ ID NO: 76143 - DNA, 5559 bp, synthetic construct
  misc_feature 1..5559: note = Description of Artificial Sequence: Synthetic coding sequence
  source 1..5559: mol_type = other DNA
atgatggacctggtgctggaggaggacgtgaccgtgcccggcaccctgagcggctgcagcggcctggtgcccagcgtgcccgacgacctggacggcatcaaccccaacgccggcctgggcaacggcctgctgcccaacgtgagcgaggagaccgtgagccccaccagagccagaaacatgaaggacttcgagaaccagatcaccgagctgaagaaggagaacttcaacctgaagctgagaatctacttcctggaggagagaatgcagcaggagttccacggccccaccgagcacatctacaagaccaacatcgagctgaaggtggaggtggagagcctgaagagagagctgcaggagagagagcagctgctgatcaaggccagcaaggccgtggagagcctggccgaggccggcggcagcgagatccagagagtgaaggaggacgccagaaagaaggtgcagcaggtggaggacctgctgaccaagagaatcctgctgctggagaaggacgtgaccgccgcccaggccgagctggagaaggccttcgccggcaccgagaccgagaaggccctgagactgagactggagagcaagctgagcgagatgaagaagatgcacgagggcgacctggccatggccctggtgctggacgagaaggacagactgatcgaggagctgaagctgagcctgaagagcaaggaggccctgatccagtgcctgaaggaggagaagagccagatggcctgccccgacgagaacgtgagcagcggcgagctgagaggcctgtgcgccgcccccagagaggagaaggagagagagaccgaggccgcccagatggagcaccagaaggagagaaacagcttcgaggagagaatccaggccctggaggaggacctgagagagaaggagagagagatcgccaccgagaagaagaacagcctgaagagagacaaggccatccagggcctgaccatggccctgaagagcaaggagaagaaggtggaggagctgaacagcgagatcgagaagctgagcgccgccttcgccaaggccagagaggccctgcagaaggcccagacccaggagttccagggcagcgaggactacgagaccgccctgagcggcaaggaggccctgagcgccgccctgagaagccagaacctgaccaagagcaccgagaaccacagactgagaagaagcatcaagaagatcacccaggagctgagcgacctgcagcaggagagagagagactggagaaggacctggaggaggcccacagagagaagagcaagggcgactgcaccatcagagacctgagaaacgaggtggagaagctgagaaacgaggtgaacgagagagagaaggccatggagaacagatacaagagcctgctgagcgagagcaacaagaagctgcacaaccaggagcaggtgatcaagcacctgaccgagagcaccaaccagaaggacgtgctgctgcagaagttcaacgagaaggacctggaggtgatccagcagaactgctacctgatggccgccgaggacctggagctgagaagcgagggcctgatcaccgagaagtgcagcagccagcagccccccggcagcaagaccatcttcagcaaggagaagaagcagagcagcgactacgaggagctgatccaggtgctgaagaaggagcaggacatctacacccacctggtgaagagcctgcaggagagcgacagcatcaacaacctgcaggccgagctgaacaagatcttcgccctgagaaagcagctggagcaggacgtgctgagctaccagaacctgagaaagaccctggaggagcagatcagcgagatcagaagaagagaggaggagagcttcagcctgtacagcgaccagaccagctacctgagcatctgcctggaggagaacaacagattccaggtggagcacttcagccaggaggagctgaagaagaaggtgagcgacctgatccagctggtgaaggagctgtacaccgacaaccagcacctgaagaagaccatcttcgacctgagctgcatgggcttccagggcaacggcttccccgacagactggccagcaccgagcagaccgagctgctggccagcaaggaggacgaggacaccatcaagatcggcgaggacgacgagatcaacttcctgagcgaccagcacctgcagcagagcaacgagatcatgaaggacctgagcaagggcggctgcaagaacggctacctgagacacaccgagagcaagatcagcgactgcgacggcgcccacgcccccggctgcctggaggagggcgccttcatcaacctgctggcccccctgttcaacgagaaggccaccctgctgctggagagcagacccgacctgctgaaggtggtgagagagctgctgctgggccagctgttcctgaccgagcaggaggtgagcggcgagcacctggacggcaagaccgagaagacccccaagcagaagggcgagctggtgcacttcgtgcagaccaacagcttcagcaagccccacgacgagctgaagctgagctgcgaggcccagctggtgaaggccggcgaggtgcccaaggtgggcctgaaggacgccagcgtgcagaccgtggccaccgagggcgacctgctgagattcaagcacgaggccaccagagaggcctgggaggagaagcccatcaacaccgccctgagcgccgagcacagacccgagaacctgcacggcgtgcccggctggcaggccgccctgctgagcctgcccggcatcaccaacagagaggccaagaagagcagactgcccatcctgatcaagcccagcagaagcctgggcaacatgtacagactgcccgccacccaggaggtggtgacccagctgcagagccagatcctggagctgcagggcgagctgaaggagttcaagacctgcaacaagcagctgcaccagaagctgatcctggccgaggccgtgatggagggcagacccacccccgacaagaccctgctgaacgacagcgagatctgcccccccgacgacctggccagcctgcccagctgcaaggagaaccccgaggacgtgctgagccccaccagcgtggccacctacctgagcagcaagagccagcccagcgccaaggtgagcgtgatgggcaccgaccagagcgagagcatcaacaccagcaacgagaccgagtacctgaagcagaagatccacgacctggagaccgagctggagggctaccagaacttcatcttccagctgcagaagcacagccagtgcagcgaggccatcatcaccgtgctgtgcggcaccgagggcgcccaggacggcctgagcaagcccaagaacggcagcgacggcgaggagatgaccttcagcagcctgcaccaggtgagatacgtgaagcacgtgaagatcctgggccccctggcccccgagatgatcgacagcagagtgctggagaacctgaagcagcagctggaggagcaggagtacaagctgcagaaggagcagaacctgaacatgcagctgttcagcgagatccacaacctgcagaacaagttcagagacctgagcccccccagatacgacagcctggtgcagagccaggccagagagctgagcctgcagagacagcagatcaaggacggccacggcatctgcgtgatcagcagacagcacatgaacaccatgatcaaggccttcgaggagctgctgcaggccagcgacgtggactactgcgtggccgagggcttccaggagcagctgaaccagtgcgccgagctgctggagaagctggagaagctgttcctgaacggcaagagcgtgggcgtggagatgaacacccagaacgagctgatggagagaatcgaggaggacaacctgacctaccagcacctgctgcccgagagccccgagcccagcgccagccacgccctgagcgactacgagaccagcgagaagagcttcttcagcagagaccagaagcaggacaacgagaccgagaagaccagcgtgatggtgaacagcttcagccaggacctgctgatggagcacatccaggagatcagaaccctgagaaagagactggaggagagcatcaagaccaacgagaagctgagaaagcagctggagagacagggcagcgagttcgtgcagggcagcaccagcatcttcgccagcggcagcgagctgcacagcagcctgaccagcgagatccacttcctgagaaagcagaaccaggccctgaacgccatgctgatcaagggcagcagagacaagcagaaggagaacgacaagctgagagagagcctgagcagaaagaccgtgagcctggagcacctgcagagagagtacgccagcgtgaaggaggagaacgagagactgcagaaggagggcagcgagaaggagagacacaaccagcagctgatccaggaggtgagatgcagcggccaggagctgagcagagtgcaggaggaggtgaagctgagacagcagctgctgagccagaacgacaagctgctgcagagcctgagagtggagctgaaggcctacgagaagctggacgaggagcacagaagactgagagaggccagcggcgagggctggaagggccaggaccccttcagagacctgcacagcctgctgatggagatccaggccctgagactgcagctggagagaagcatcgagaccagcagcaccctgcagagcagactgaaggagcagctggccagaggcgccgagaaggcccaggagggcgccctgaccctggccgtgcaggccgtgagcatccccgaggtgcccctgcagcccgacaagcacgacggcgacaagtaccccatggagagcgacaacagcttcgacctgttcgacagcagccaggccgtgacccccaagagcgtgagcgagaccccccccctgagcggcaacgacaccgacagcctgagctgcgacagcggcagcagcgccaccagcaccccctgcgtgagcagactggtgaccggccaccacctgtgggccagcaagaacggcagacacgtgctgggcctgatcgaggactacgaggccctgctgaagcagatcagccagggccagagactgctggccgagatggacatccagacccaggaggcccccagcagcaccagccaggagctgggcaccaagggcccccaccccgcccccctgagcaagttcgtgagcagcgtgagcaccgccaagctgaccctggaggaggcctacagaagactgaagctgctgtggagagtgagcctgcccgaggacggccagtgccccctgcactgcgagcagatcggcgagatgaaggccgaggtgaccaagctgcacaagaagctgttcgagcaggagaagaagctgcagaacaccatgaagctgctgcagctgagcaagagacaggagaaggtgatcttcgaccagctggtggtgacccacaagatcctgagaaaggccagaggcaacctggagctgagacccggcggcgcccaccccggcacctgcagccccagcagacccggcagctag

SEQ ID NO: 76144 - DNA, 5445 bp, synthetic construct
  misc_feature 1..5445: note = Description of Artificial Sequence: Synthetic coding sequence
  source 1..5445: mol_type = other DNA
atgatggacctggtgctggaggaggacgtgaccgtgcccggcaccctgagcggctgcagcggcctggtgcccagcgtgcccgacgacctggacggcatcaaccccaacgccggcctgggcaacggcctgctgcccaacgtgagcgaggagaccgtgagccccaccagagccagaaacatgaaggacttcgagaaccagatcaccgagctgaagaaggagaacttcaacctgaagctgagaatctacttcctggaggagagaatgcagcaggagttccacggccccaccgagcacatctacaagaccaacatcgagctgaaggtggaggtggagagcctgaagagagagctgcaggagagagagcagctgctgatcaaggccagcaaggccgtggagagcctggccgaggccggcggcagcgagatccagagagtgaaggaggacgccagaaagaaggtgcagcaggtggaggacctgctgaccaagagaatcctgctgctggagaaggacgtgaccgccgcccaggccgagctggagaaggccttcgccggcaccgagaccgagaaggccctgagactgagactggagagcaagctgagcgagatgaagaagatgcacgagggcgacctggccatggccctggtgctggacgagaaggacagactgatcgaggagctgaagctgagcctgaagagcaaggaggccctgatccagtgcctgaaggaggagaagagccagatggcctgccccgacgagaacgtgagcagcggcgagctgagaggcctgtgcgccgcccccagagaggagaaggagagagagaccgaggccgcccagatggagcaccagaaggagagaaacagcttcgaggagagaatccaggccctggaggaggacctgagagagaaggagagagagatcgccaccgagaagaagaacagcctgaagagagacaaggccatccagggcctgaccatggccctgaagagcaaggagaagaaggtggaggagctgaacagcgagatcgagaagctgagcgccgccttcgccaaggccagagaggccctgcagaaggcccagacccaggagttccagggcagcgaggactacgagaccgccctgagcggcaaggaggccctgagcgccgccctgagaagccagaacctgaccaagagcaccgagaaccacagactgagaagaagcatcaagaagatcacccaggagctgagcgacctgcagcaggagagagagagactggagaaggacctggaggaggcccacagagagaagagcaagggcgactgcaccatcagagacctgagaaacgaggtggagaagctgagaaacgaggtgaacgagagagagaaggccatggagaacagatacaagagcctgctgagcgagagcaacaagaagctgcacaaccaggagcaggtgatcaagcacctgaccgagagcaccaaccagaaggacgtgctgctgcagaagttcaacgagaaggacctggaggtgatccagcagaactgctacctgatggccgccgaggacctggagctgagaagcgagggcctgatcaccgagaagtgcagcagccagcagccccccggcagcaagaccatcttcagcaaggagaagaagcagagcagcgactacgaggagctgatccaggtgctgaagaaggagcaggacatctacacccacctggtgaagagcctgcaggagagcgacagcatcaacaacctgcaggccgagctgaacaagatcttcgccctgagaaagcagctggagcaggacgtgctgagctaccagaacctgagaaagaccctggaggagcagatcagcgagatcagaagaagagaggaggagagcttcagcctgtacagcgaccagaccagctacctgagcatctgcctggaggagaacaacagattccaggtggagcacttcagccaggaggagctgaagaagaaggtgagcgacctgatccagctggtgaaggagctgtacaccgacaaccagcacctgaagaagaccatcttcgacctgagctgcatgggcttccagggcaacggcttccccgacagactggccagcaccgagcagaccgagctgctggccagcaaggaggacgaggacaccatcaagatcggcgaggacgacgagatcaacttcctgagcgaccagcacctgcagcagagcaacgagatcatgaaggacctgagcaagggcggctgcaagaacggctacctgagacacaccgagagcaagatcagcgactgcgacggcgcccacgcccccggctgcctggaggagggcgccttcatcaacctgctggcccccctgttcaacgagaaggccaccctgctgctggagagcagacccgacctgctgaaggtggtgagagagctgctgctgggccagctgttcctgaccgagcaggaggtgagcggcgagcacctggacggcaagaccgagaagacccccaagcagaagggcgagctggtgcacttcgtgcagaccaacagcttcagcaagccccacgacgagctgaagctgagctgcgaggcccagctggtgaaggccggcgaggtgcccaaggtgggcctgaaggacgccagcgtgcagaccgtggccaccgagggcgacctgctgagattcaagcacgaggccaccagagaggcctgggaggagaagcccatcaacaccgccctgagcgccgagcacagacccgagaacctgcacggcgtgcccggctggcaggccgccctgctgagcctgcccggcatcaccaacagagaggccaagaagagcagactgcccatcctgatcaagcccagcagaagcctgggcaacatgtacagactgcccgccacccaggaggtggtgacccagctgcagagccagatcctggagctgcagggcgagctgaaggagttcaagacctgcaacaagcagctgcaccagaagctgatcctggccgaggccgtgatggagggcagacccacccccgacaagaccctgctgaacgcccagccccccgtgggcgccgcctaccaggacagccccggcgagcagaagggcatcaagaccaccagcagcgtgtggagagacaaggagatggacagcgaccagcagagaagctacgagatcgacagcgagatctgcccccccgacgacctggccagcctgcccagctgcaaggagaaccccgaggacgtgctgagccccaccagcgtggccacctacctgagcagcaagagccagcccagcgccaaggtgagcgtgatgggcaccgaccagagcgagagcatcaacaccagcaacgagaccgagtacctgaagcagaagatccacgacctggagaccgagctggagggctaccagaacttcatcttccagctgcagaagcacagccagtgcagcgaggccatcatcaccgtgctgtgcggcaccgagggcgcccaggacggcctgagcaagcccaagaacggcagcgacggcgaggagatgaccttcagcagcctgcaccaggtgagatacgtgaagcacgtgaagatcctgggccccctggcccccgagatgatcgacagcagagtgctggagaacctgaagcagcagctggaggagcaggagtacaagctgcagaaggagcagaacctgaacatgcagctgttcagcgagatccacaacctgcagaacaagttcagagacctgagcccccccagatacgacagcctggtgcagagccaggccagagagctgagcctgcagagacagcagatcaaggacggccacggcatctgcgtgatcagcagacagcacatgaacaccatgatcaaggccttcgaggagctgctgcaggccagcgacgtggactactgcgtggccgagggcttccaggagcagctgaaccagtgcgccgagctgctggagaagctggagaagctgttcctgaacggcaagagcgtgggcgtggagatgaacacccagaacgagctgatggagagaatcgaggaggacaacctgacctaccagcacctgctgcccgagagccccgagcccagcgccagccacgccctgagcgactacgagaccagcgagaagagcttcttcagcagagaccagaagcaggacaacgagaccgagaagaccagcgtgatggtgaacagcttcagccaggacctgctgatggagcacatccaggagatcagaaccctgagaaagagactggaggagagcatcaagaccaacgagaagctgagaaagcagctggagagacagggcagcgagttcgtgcagggcagcaccagcatcttcgccagcggcagcgagctgcacagcagcctgaccagcgagatccacttcctgagaaagcagaaccaggccctgaacgccatgctgatcaagggcagcagagacaagcagaaggagaacgacaagctgagagagagcctgagcagaaagaccgtgagcctggagcacctgcagagagagtacgccagcgtgaaggaggagaacgagagactgcagaaggagggcagcgagaaggagagacacaaccagcagctgatccaggaggtgagatgcagcggccaggagctgagcagagtgcaggaggaggtgaagctgagacagcagctgctgagccagaacgacaagctgctgcagagcctgagagtggagctgaaggcctacgagaagctggacgaggagcacagaagactgagagacggcgacaagtaccccatggagagcgacaacagcttcgacctgttcgacagcagccaggccgtgacccccaagagcgtgagcgagaccccccccctgagcggcaacgacaccgacagcctgagctgcgacagcggcagcagcgccaccagcaccccctgcgtgagcagactggtgaccggccaccacctgtgggccagcaagaacggcagacacgtgctgggcctgatcgaggactacgaggccctgctgaagcagatcagccagggccagagactgctggccgagatggacatccagacccaggaggcccccagcagcaccagccaggagctgggcaccaagggcccccaccccgcccccctgagcaagttcgtgagcagcgtgagcaccgccaagctgaccctggaggaggcctacagaagactgaagctgctgtggagagtgagcctgcccgaggacggccagtgccccctgcactgcgagcagatcggcgagatgaaggccgaggtgaccaagctgcacaagaagctgttcgagcaggagaagaagctgcagaacaccatgaagctgctgcagctgagcaagagacaggagaaggtgatcttcgaccagctggtggtgacccacaagatcctgagaaaggccagaggcaacctggagctgagacccggcggcgcccaccccggcacctgcagccccagcagacccggcagctag

SEQ ID NO: 76145 - DNA, 5586 bp, synthetic construct
  misc_feature 1..5586: note = Description of Artificial Sequence: Synthetic coding sequence
  source 1..5586: mol_type = other DNA
atgatggacctggtgctggaggaggacgtgaccgtgcccggcaccctgagcggctgcagcggcctggtgcccagcgtgcccgacgacctggacggcatcaaccccaacgccggcctgggcaacggcctgctgcccaacgtgagcgaggagaccgtgagccccaccagagccagaaacatgaaggacttcgagaaccagatcaccgagctgaagaaggagaacttcaacctgaagctgagaatctacttcctggaggagagaatgcagcaggagttccacggccccaccgagcacatctacaagaccaacatcgagctgaaggtggaggtggagagcctgaagagagagctgcaggagagagagcagctgctgatcaaggccagcaaggccgtggagagcctggccgaggccggcggcagcgagatccagagagtgaaggaggacgccagaaagaaggtgcagcaggtggaggacctgctgaccaagagaatcctgctgctggagaaggacgtgaccgccgcccaggccgagctggagaaggccttcgccggcaccgagaccgagaaggccctgagactgagactggagagcaagctgagcgagatgaagaagatgcacgagggcgacctggccatggccctggtgctggacgagaaggacagactgatcgaggagctgaagctgagcctgaagagcaaggaggccctgatccagtgcctgaaggaggagaagagccagatggcctgccccgacgagaacgtgagcagcggcgagctgagaggcctgtgcgccgcccccagagaggagaaggagagagagaccgaggccgcccagatggagcaccagaaggagagaaacagcttcgaggagagaatccaggccctggaggaggacctgagagagaaggagagagagatcgccaccgagaagaagaacagcctgaagagagacaaggccatccagggcctgaccatggccctgaagagcaaggagaagaaggtggaggagctgaacagcgagatcgagaagctgagcgccgccttcgccaaggccagagaggccctgcagaaggcccagacccaggagttccagggcagcgaggactacgagaccgccctgagcggcaaggaggccctgagcgccgccctgagaagccagaacctgaccaagagcaccgagaaccacagactgagaagaagcatcaagaagatcacccaggagctgagcgacctgcagcaggagagagagagactggagaaggacctggaggaggcccacagagagaagagcaagggcgactgcaccatcagagacctgagaaacgaggtggagaagctgagaaacgaggtgaacgagagagagaaggccatggagaacagatacaagagcctgctgagcgagagcaacaagaagctgcacaaccaggagcaggtgatcaagcacctgaccgagagcaccaaccagaaggacgtgctgctgcagaagttcaacgagaaggacctggaggtgatccagcagaactgctacctgatggccgccgaggacctggagctgagaagcgagggcctgatcaccgagaagtgcagcagccagcagccccccggcagcaagaccatcttcagcaaggagaagaagcagagcagcgactacgaggagctgatccaggtgctgaagaaggagcaggacatctacacccacctggtgaagagcctgcaggagagcgacagcatcaacaacctgcaggccgagctgaacaagatcttcgccctgagaaagcagctggagcaggacgtgctgagctaccagaacctgagaaagaccctggaggagcagatcagcgagatcagaagaagagaggaggagagcttcagcctgtacagcgaccagaccagctacctgagcatctgcctggaggagaacaacagattccaggtggagcacttcagccaggaggagctgaagaagaaggtgagcgacctgatccagctggtgaaggagctgtacaccgacaaccagcacctgaagaagaccatcttcgacctgagctgcatgggcttccagggcaacggcttccccgacagactggccagcaccgagcagaccgagatcatgaaggacctgagcaagggcggctgcaagaacggctacctgagacacaccgagagcaagatcagcgactgcgacggcgcccacgcccccggctgcctggaggagggcgccttcatcaacctgctggcccccctgttcaacgagaaggccaccctgctgctggagagcagacccgacctgctgaaggtggtgagagagctgctgctgggccagctgttcctgaccgagcaggaggtgagcggcgagcacctggacggcaagaccgagaagacccccaagcagaagggcgagctggtgcacttcgtgcagaccaacagcttcagcaagccccacgacgagctgaagctgagctgcgaggcccagctggtgaaggccggcgaggtgcccaaggtgggcctgaaggacgccagcgtgcagaccgtggccaccgagggcgacctgctgagattcaagcacgaggccaccagagaggcctgggaggagaagcccatcaacaccgccctgagcgccgagcacagacccgagaacctgcacggcgtgcccggctggcaggccgccctgctgagcctgcccggcatcaccaacagagaggccaagaagagcagactgcccatcctgatcaagcccagcagaagcctgggcaacatgtacagactgcccgccacccaggaggtggtgacccagctgcagagccagatcctggagctgcagggcgagctgaaggagttcaagacctgcaacaagcagctgcaccagaagctgatcctggccgaggccgtgatggagggcagacccacccccgacaagaccctgctgaacgcccagccccccgtgggcgccgcctaccaggacagccccggcgagcagaagggcatcaagaccaccagcagcgtgtggagagacaaggagatggacagcgaccagcagagaagctacgagatcgacagcgagatctgcccccccgacgacctggccagcctgcccagctgcaaggagaaccccgaggacgtgctgagccccaccagcgtggccacctacctgagcagcaagagccagcccagcgccaaggtgagcgtgatgggcaccgaccagagcgagagcatcaacaccagcaacgagaccgagtacctgaagcagaagatccacgacctggagaccgagctggagggctaccagaacttcatcttccagctgcagaagcacagccagtgcagcgaggccatcatcaccgtgctgtgcggcaccgagggcgcccaggacggcctgagcaagcccaagaacggcagcgacggcgaggagatgaccttcagcagcctgcaccaggtgagatacgtgaagcacgtgaagatcctgggccccctggcccccgagatgatcgacagcagagtgctggagaacctgaagcagcagctggaggagcaggagtacaagctgcagaaggagcagaacctgaacatgcagctgttcagcgagatccacaacctgcagaacaagttcagagacctgagcccccccagatacgacagcctggtgcagagccaggccagagagctgagcctgcagagacagcagatcaaggacggccacggcatctgcgtgatcagcagacagcacatgaacaccatgatcaaggccttcgaggagctgctgcaggccagcgacgtggactactgcgtggccgagggcttccaggagcagctgaaccagtgcgccgagctgctggagaagctggagaagctgttcctgaacggcaagagcgtgggcgtggagatgaacacccagaacgagctgatggagagaatcgaggaggacaacctgacctaccagcacctgctgcccgagagccccgagcccagcgccagccacgccctgagcgactacgagaccagcgagaagagcttcttcagcagagaccagaagcaggacaacgagaccgagaagaccagcgtgatggtgaacagcttcagccaggacctgctgatggagcacatccaggagatcagaaccctgagaaagagactggaggagagcatcaagaccaacgagaagctgagaaagcagctggagagacagggcagcgagttcgtgcagggcagcaccagcatcttcgccagcggcagcgagctgcacagcagcctgaccagcgagatccacttcctgagaaagcagaaccaggccctgaacgccatgctgatcaagggcagcagagacaagcagaaggagaacgacaagctgagagagagcctgagcagaaagaccgtgagcctggagcacctgcagagagagtacgccagcgtgaaggaggagaacgagagactgcagaaggagggcagcgagaaggagagacacaaccagcagctgatccaggaggtgagatgcagcggccaggagctgagcagagtgcaggaggaggtgaagctgagacagcagctgctgagccagaacgacaagctgctgcagagcctgagagtggagctgaaggcctacgagaagctggacgaggagcacagaagactgagagaggccagcggcgagggctggaagggccaggaccccttcagagacctgcacagcctgctgatggagatccaggccctgagactgcagctggagagaagcatcgagaccagcagcaccctgcagagcagactgaaggagcagctggccagaggcgccgagaaggcccaggagggcgccctgaccctggccgtgcaggccgtgagcatccccgaggtgcccctgcagcccgacaagcacgacggcgacaagtaccccatggagagcgacaacagcttcgacctgttcgacagcagccaggccgtgacccccaagagcgtgagcgagaccccccccctgagcggcaacgacaccgacagcctgagctgcgacagcggcagcagcgccaccagcaccccctgcgtgagcagactggtgaccggccaccacctgtgggccagcaagaacggcagacacgtgctgggcctgatcgaggactacgaggccctgctgaagcagatcagccagggccagagactgctggccgagatggacatccagacccaggaggcccccagcagcaccagccaggagctgggcaccaagggcccccaccccgcccccctgagcaagttcgtgagcagcgtgagcaccgccaagctgaccctggaggaggcctacagaagactgaagctgctgtggagagtgagcctgcccgaggacggccagtgccccctgcactgcgagcagatcggcgagatgaaggccgaggtgaccaagctgcacaagaagctgttcgagcaggagaagaagctgcagaacaccatgaagctgctgcagctgagcaagagacaggagaaggtgatcttcgaccagctggtggtgacccacaagatcctgagaaaggccagaggcaacctggagctgagacccggcggcgcccaccccggcacctgcagccccagcagacccggcagctag

SEQ ID NO: 76146 - DNA, 1521 bp, synthetic construct
  misc_feature 1..1521: note = Description of Artificial Sequence: Synthetic coding sequence
  source 1..1521: mol_type = other DNA
atggaggaccaccagcacgtgcccatcgacatccagaccagcaagctgctggactggctggtggacagaagacactgcagcctgaagtggcagagcctggtgctgaccatcagagagaagatcaacgccgccatccaggacatgcccgagagcgaggagatcgcccagctgctgagcggcagctacatccactacttccactgcctgagaatcctggacctgctgaagggcaccgaggccagcaccaagaacatcttcggcagatacagcagccagagaatgaaggactggcaggagatcatcgccctgtacgagaaggacaacacctacctggtggagctgagcagcctgctggtgagaaacgtgaactacgagatccccagcctgaagaagcagatcgccaagtgccagcagctgcagcaggagtacagcagaaaggaggaggagtgccaggccggcgccgccgagatgagagagcagttctaccacagctgcaagcagtacggcatcaccggcgagaacgtgagaggcgagctgctggccctggtgaaggacctgcccagccagctggccgagatcggcgccgccgcccagcagagcctgggcgaggccatcgacgtgtaccaggccagcgtgggcttcgtgtgcgagagccccaccgagcaggtgctgcccatgctgagattcgtgcagaagagaggcaacagcaccgtgtacgagtggagaaccggcaccgagcccagcgtggtggagagaccccacctggaggagctgcccgagcaggtggccgaggacgccatcgactggggcgacttcggcgtggaggccgtgagcgagggcaccgacagcggcatcagcgccgaggccgccggcatcgactggggcatcttccccgagagcgacagcaaggaccccggcggcgacggcatcgactggggcgacgacgccgtggccctgcagatcaccgtgctggaggccggcacccaggcccccgagggcgtggccagaggccccgacgccctgaccctgctggagtacaccgagaccagaaaccagttcctggacgagctgatggagctggagatcttcctggcccagagagccgtggagctgagcgaggaggccgacgtgctgagcgtgagccagttccagctggcccccgccatcctgcagggccagaccaaggagaagatggtgaccatggtgagcgtgctggaggacctgatcggcaagctgaccagcctgcagctgcagcacctgttcatgatcctggccagccccagatacgtggacagagtgaccgagttcctgcagcagaagctgaagcagagccagctgctggccctgaagaaggagctgatggtgcagaagcagcaggaggccctggaggagcaggccgccctggagcccaagctggacctgctgctggagaagaccaaggagctgcagaagctgatcgaggccgacatcagcaagagatacagcggcagacccgtgaacctgatgggcaccagcctgtag

SEQ ID NO: 76147 - DNA, 1596 bp, synthetic construct
  misc_feature 1..1596: note = Description of Artificial Sequence: Synthetic coding sequence
  source 1..1596: mol_type = other DNA
atgagaagacagagcatgaccagcgccaccagagacctgcacaccgccctggacggcaaggccacccagggcggcaagaaggaccaccagcacgtgcccatcgacatccagaccagcaagctgctggactggctggtggacagaagacactgcagcctgaagtggcagagcctggtgctgaccatcagagagaagatcaacgccgccatccaggacatgcccgagagcgaggagatcgcccagctgctgagcggcagctacatccactacttccactgcctgagaatcctggacctgctgaagggcaccgaggccagcaccaagaacatcttcggcagatacagcagccagagaatgaaggactggcaggagatcatcgccctgtacgagaaggacaacacctacctggtggagctgagcagcctgctggtgagaaacgtgaactacgagatccccagcctgaagaagcagatcgccaagtgccagcagctgcagcaggagtacagcagaaaggaggaggagtgccaggccggcgccgccgagatgagagagcagttctaccacagctgcaagcagtacggcatcaccggcgagaacgtgagaggcgagctgctggccctggtgaaggacctgcccagccagctggccgagatcggcgccgccgcccagcagagcctgggcgaggccatcgacgtgtaccaggccagcgtgggcttcgtgtgcgagagccccaccgagcaggtgctgcccatgctgagattcgtgcagaagagaggcaacagcaccgtgtacgagtggagaaccggcaccgagcccagcgtggtggagagaccccacctggaggagctgcccgagcaggtggccgaggacgccatcgactggggcgacttcggcgtggaggccgtgagcgagggcaccgacagcggcatcagcgccgaggccgccggcatcgactggggcatcttccccgagagcgacagcaaggaccccggcggcgacggcatcgactggggcgacgacgccgtggccctgcagatcaccgtgctggaggccggcacccaggcccccgagggcgtggccagaggccccgacgccctgaccctgctggagtacaccgagaccagaaaccagttcctggacgagctgatggagctggagatcttcctggcccagagagccgtggagctgagcgaggaggccgacgtgctgagcgtgagccagttccagctggcccccgccatcctgcagggccagaccaaggagaagatggtgaccatggtgagcgtgctggaggacctgatcggcaagctgaccagcctgcagctgcagcacctgttcatgatcctggccagccccagatacgtggacagagtgaccgagttcctgcagcagaagctgaagcagagccagctgctggccctgaagaaggagctgatggtgcagaagcagcaggaggccctggaggagcaggccgccctggagcccaagctggacctgctgctggagaagaccaaggagctgcagaagctgatcgaggccgacatcagcaagagatacagcggcagacccgtgaacctgatgggcaccagcctgtag

SEQ ID NO: 76148 - DNA, 3864 bp, synthetic construct
  misc_feature 1..3864: note = Description of Artificial Sequence: Synthetic coding sequence
  source 1..3864: mol_type = other DNA
atgcaccccgacctgggccccctgtgcaccctgctgtacgtgaccctgaccatcctgtgcagcagcgtgagcagcgacctggccccctacttcaccagcgagcccctgagcgccgtgcagaagctgggcggccccgtggtgctgcactgcagcgcccagcccgtgaccaccagaatcagctggctgcacaacggcaagaccctggacggcaacctggagcacgtgaagatccaccagggcaccctgaccatcctgagcctgaacagcagcctgctgggctactaccagtgcctggccaacaacagcatcggcgccatcgtgagcggccccgccaccgtgagcgtggccgtgctgggcgacttcggcagcagcaccaagcacgtgatcaccgccgaggagaagagcgccggcttcatcggctgcagagtgcccgagagcaaccccaaggccgaggtgagatacaagatcagaggcaagtggctggagcacagcaccgagaactacctgatcctgcccagcggcaacctgcagatcctgaacgtgagcctggaggacaagggcagctacaagtgcgccgcctacaaccccgtgacccaccagctgaaggtggagcccatcggcagaaagctgctggtgagcagacccagcagcgacgacgtgcacatcctgcaccccacccacagccaggccctggccgtgctgagcagaagccccgtgaccctggagtgcgtggtgagcggcgtgcccgccccccaggtgtactggctgaaggacggccaggacatcgcccccggcagcaactggagaagactgtacagccacctggccaccgacagcgtggaccccgccgacagcggcaactacagctgcatggccggcaacaagagcggcgacgtgaagtacgtgacctacatggtgaacgtgctggagcacgccagcatcagcaagggcctgcaggaccagatcgtgagcctgggcgccaccgtgcacttcacctgcgacgtgcacggcaaccccgcccccaactgcacctggttccacaacgcccagcccatccaccccagcgccagacacctgaccgccggcaacggcctgaagatcagcggcgtgaccgtggaggacgtgggcatgtaccagtgcgtggccgacaacggcatcggcttcatgcacagcaccggcagactggagatcgagaacgacggcggcttcaagcccgtgatcatcaccgcccccgtgagcgccaaggtggccgacggcgacttcgtgaccctgagctgcaacgccagcggcctgcccgtgcccgtgatcagatggtacgacagccacggcctgatcaccagccaccccagccaggtgctgagaagcaagagcagaaagagccagctgagcagacccgagggcctgaacctggagcccgtgtacttcgtgctgagccaggccggcgccagcagcctgcacatccaggccgtgacccaggagcacgccggcaagtacatctgcgaggccgccaacgagcacggcaccacccaggccgaggccagcctgatggtggtgcccttcgagaccaacaccaaggccgagaccgtgaccctgcccgacgccgcccagaacgacgacagaagcaagagagacggcagcgagaccggcctgctgagcagcttccccgtgaaggtgcaccccagcgccgtggagagcgcccccgagaagaacgccagcggcatcagcgtgcccgacgcccccatcatcctgagccccccccagacccacacccccgacacctacaacctggtgtggagagccggcaaggacggcggcctgcccatcaacgcctacttcgtgaagtacagaaagctggacgacggcgtgggcatgctgggcagctggcacaccgtgagagtgcccggcagcgagaacgagctgcacctggccgagctggagcccagcagcctgtacgaggtgctgatggtggccagaagcgccgccggcgagggccagcccgccatgctgaccttcagaaccagcaaggagaagaccgccagcagcaagaacacccaggccagcagcccccccgtgggcatccccaagtaccccgtggtgagcgaggccgccaacaacaacttcggcgtggtgctgaccgacagcagcagacacagcggcgtgcccgaggcccccgacagacccaccatcagcaccgccagcgagaccagcgtgtacgtgacctggatccccagagccaacggcggcagccccatcaccgccttcaaggtggagtacaagagaatgagaaccagcaactggctggtggccgccgaggacatcccccccagcaagctgagcgtggaggtgagaagcctggagcccggcagcacctacaagttcagagtgatcgccatcaaccactacggcgagagcttcagaagcagcgccagcagaccctaccaggtggtgggcttccccaacagattcagcagcagacccatcaccggcccccacatcgcctacaccgaggccgtgagcgacacccagatcatgctgaagtggacctacatccccagcagcaacaacaacacccccatccagggcttctacatctactacagacccaccgacagcgacaacgacagcgactacaagagagacgtggtggagggcagcaagcagtggcacatgatcggccacctgcagcccgagaccagctacgacatcaagatgcagtgcttcaacgagggcggcgagagcgagttcagcaacgtgatgatctgcgagaccaaggtgaagagagtgcccggcgccagcgagtaccccgtgaaggacctgagcaccccccccaacagcctgggcagcggcggcaacgtgggccccgccaccagccccgccagaagcagcgacatgctgtacctgatcgtgggctgcgtgctgggcgtgatggtgctgatcctgatggtgttcatcgccatgtgcctgtggaagaacagacagcagaacaccatccagaagtacgacccccccggctacctgtaccagggcagcgacatgaacggccagatggtggactacaccaccctgagcggcgccagccagatcaacggcaacgtgcacggcggcttcctgaccaacggcggcctgagcagcggctacagccacctgcaccacaaggtgcccaacgccgtgaacggcatcgtgaacggcagcctgaacggcggcctgtacagcggccacagcaacagcctgaccagaacccacgtggacttcgagcacccccaccacctggtgaacggcggcggcatgtacaccgccgtgccccagatcgaccccctggagtgcgtgaactgcagaaactgcagaaacaacaacagatgcttcaccaagaccaacagcaccttcagcagcagccccccccccgtggtgcccgtggtggccccctacccccaggacggcctggagatgaagcccctgagccacgtgaaggtgcccgtgtgcctgaccagcgccgtgcccgactgcggccagctgcccgaggagagcgtgaaggacaacgtggagcccgtgcccacccagagaacctgctgccaggacatcgtgaacgacgtgagcagcgacggcagcgaggaccccgccgagttcagcagaggccaggagggcatgatcaacctgagaatccccgaccacctgcagctggccaagagctgcgtgtgggagggcgacagctgcgcccacagcgagaccgagatcaacatcgtgagctggaacgccctgatcctgccccccgtgcccgagggctgcgccgagaagaccatgtggagcccccccggcatccccctggacagccccaccgaggtgctgcagcagcccagagagacctag

SEQ ID NO: 76149 - DNA, 3795 bp, synthetic construct
  misc_feature 1..3795: note = Description of Artificial Sequence: Synthetic coding sequence
  source 1..3795: mol_type = other DNA
atgcaccccgacctgggccccctgtgcaccctgctgtacgtgaccctgaccatcctgtgcagcagcgtgagcagcgacctggccccctacttcaccagcgagcccctgagcgccgtgcagaagctgggcggccccgtggtgctgcactgcagcgcccagcccgtgaccaccagaatcagctggctgcacaacggcaagaccctggacggcaacctggagcacgtgaagatccaccagggcaccctgaccatcctgagcctgaacagcagcctgctgggctactaccagtgcctggccaacaacagcatcggcgccatcgtgagcggccccgccaccgtgagcgtggccgtgctgggcgacttcggcagcagcaccaagcacgtgatcaccgccgaggagaagagcgccggcttcatcggctgcagagtgcccgagagcaaccccaaggccgaggtgagatacaagatcagaggcaagtggctggagcacagcaccgagaactacctgatcctgcccagcggcaacctgcagatcctgaacgtgagcctggaggacaagggcagctacaagtgcgccgcctacaaccccgtgacccaccagctgaaggtggagcccatcggcagaaagctgctggtgagcagacccagcagcgacgacgtgcacatcctgcaccccacccacagccaggccctggccgtgctgagcagaagccccgtgaccctggagtgcgtggtgagcggcgtgcccgccccccaggtgtactggctgaaggacggccaggacatcgcccccggcagcaactggagaagactgtacagccacctggccaccgacagcgtggaccccgccgacagcggcaactacagctgcatggccggcaacaagagcggcgacgtgaagtacgtgacctacatggtgaacgtgctggagcacgccagcatcagcaagggcctgcaggaccagatcgtgagcctgggcgccaccgtgcacttcacctgcgacgtgcacggcaaccccgcccccaactgcacctggttccacaacgcccagcccatccaccccagcgccagacacctgaccgccggcaacggcctgaagatcagcggcgtgaccgtggaggacgtgggcatgtaccagtgcgtggccgacaacggcatcggcttcatgcacagcaccggcagactggagatcgagaacgacggcggcttcaagcccgtgatcatcaccgcccccgtgagcgccaaggtggccgacggcgacttcgtgaccctgagctgcaacgccagcggcctgcccgtgcccgtgatcagatggtacgacagccacggcctgatcaccagccaccccagccaggtgctgagaagcaagagcagaaagagccagctgagcagacccgagggcctgaacctggagcccgtgtacttcgtgctgagccaggccggcgccagcagcctgcacatccaggccgtgacccaggagcacgccggcaagtacatctgcgaggccgccaacgagcacggcaccacccaggccgaggccagcctgatggtggtgcccttcgagaccaacaccaaggccgagaccgtgaccctgcccgacgccgcccagaacgacgacagaagcaagagagacggcagcgagaccggcctgctgagcagcttccccgtgaaggtgcaccccagcgccgtggagagcgcccccgagaagaacgccagcggcatcagcgtgcccgacgcccccatcatcctgagccccccccagacccacacccccgacacctacaacctggtgtggagagccggcaaggacggcggcctgcccatcaacgcctacttcgtgaagtacagaaagctggacgacggcgtgggcatgctgggcagctggcacaccgtgagagtgcccggcagcgagaacgagctgcacctggccgagctggagcccagcagcctgtacgaggtgctgatggtggccagaagcgccgccggcgagggccagcccgccatgctgaccttcagaaccagcaaggagaagaccgccagcagcaagaacacccaggccagcagcccccccgtgggcatccccaagtaccccgtggtgagcgaggccgccaacaacaacttcggcgtggtgctgaccgacagcagcagacacagcggcgtgcccgaggcccccgacagacccaccatcagcaccgccagcgagaccagcgtgtacgtgacctggatccccagagccaacggcggcagccccatcaccgccttcaaggtggagtacaagagaatgagaaccagcaactggctggtggccgccgaggacatcccccccagcaagctgagcgtggaggtgagaagcctggagcccggcagcacctacaagttcagagtgatcgccatcaaccactacggcgagagcttcagaagcagcgccagcagaccctaccaggtggtgggcttccccaacagattcagcagcagacccatcaccggcccccacatcgcctacaccgaggccgtgagcgacacccagatcatgctgaagtggacctacatccccagcagcaacaacaacacccccatccagggcttctacatctactacagacccaccgacagcgacaacgacagcgactacaagagagacgtggtggagggcagcaagcagtggcacatgatcggccacctgcagcccgagaccagctacgacatcaagatgcagtgcttcaacgagggcggcgagagcgagttcagcaacgtgatgatctgcgagaccaaggtgaagagagtgcccggcgccagcgagtaccccgtgaaggacctgagcaccccccccaacagcctgggcagcggcggcaacgtgggccccgccaccagccccgccagaagcagcgacatgctgtacctgatcgtgggctgcgtgctgggcgtgatggtgctgatcctgatggtgttcatcgccatgtgcctgtggaagaacagacagcagaacaccatccagaagtacgacccccccggctacctgtaccagggcagcgacatgaacggccagatggtggactacaccaccctgagcggcgccagccagatcaacggcaacgtgcacggcggcttcctgaccaacggcggcctgagcagcggctacagccacctgcaccacaaggtgcccaacgccgtgaacggcatcgtgaacggcagcctgaacggcggcctgtacagcggccacagcaacagcctgaccagaacccacgtggacttcgagcacccccaccacctggtgaacggcggcggcatgtacaccgccgtgccccagatcgaccccctggagtgcgtgaactgcagaaactgcagaaacaacaacagatgcttcaccaagaccaacagcaccttcagcagcagccccccccccgtggtgcccgtggtggccccctacccccaggacggcctggagatgaagcccctgagccacgtgaaggtgcccgtgtgcctgaccagcgccgtgcccgactgcggccagctgcccgaggagagcgtgaaggacaacgtggagcccgtgcccacccagagaacctgctgccaggacatcgtgaacgacgtgagcagcgacggcagcgaggaccccgccgagttcagcagaggcgacagctgcgcccacagcgagaccgagatcaacatcgtgagctggaacgccctgatcctgccccccgtgcccgagggctgcgccgagaagaccatgtggagcccccccggcatccccctggacagccccaccgaggtgctgcagcagcccagagagacctag

SEQ ID NO: 76150 - DNA, 1386 bp, synthetic construct
  misc_feature 1..1386: note = Description of Artificial Sequence: Synthetic coding sequence
  source 1..1386: mol_type = other DNA
atgctggagctgagacacagaggcagctgccccggccccagagaggccgtgagccccccccacagagagggcgaggccgccggcggcgaccacgagaccgagagcaccagcgacaaggagaccgacatcgacgacagatacggcgacctggacagcagaaccgacagcgacatccccgagatcccccccagcagcgacagaacccccgagatcctgaagaaggccctgagcggcctgagcagcagatggaagaactggtggatcagaggcatcctgaccctgaccatgatcagcctgttcttcctgatcatctacatgggcagcttcatgctgatgctgctggtgctgggcatccaggtgaagtgcttccacgagatcatcaccatcggctacagagtgtaccacagctacgacctgccctggttcagaaccctgagctggtacttcctgctgtgcgtgaactacttcttctacggcgagaccgtggccgactacttcgccaccttcgtgcagagagaggagcagctgcagttcctgatcagataccacagattcatcagcttcgccctgtacctggccggcttctgcatgttcgtgctgagcctggtgaagaagcactacagactgcagttctacatgttcgcctggacccacgtgaccctgctgatcaccgtgacccagagccacctggtgatccagaacctgttcgagggcatgatctggttcctggtgcccatcagcagcgtgatctgcaacgacatcaccgcctacctgttcggcttcttcttcggcagaacccccctgatcaagctgagccccaagaagacctgggagggcttcatcggcggcttcttcagcaccgtggtgttcggcttcatcgccgcctacgtgctgagcaagtaccagtacttcgtgtgccccgtggagtacagaagcgacgtgaacagcttcgtgaccgagtgcgagcccagcgagctgttccagctgcagacctacagcctgccccccttcctgaaggccgtgctgagacaggagagagtgagcctgtaccccttccagatccacagcatcgccctgagcaccttcgccagcctgatcggccccttcggcggcttcttcgccagcggcttcaagagagccttcaagatcaaggacttcgccaacaccatccccggccacggcggcatcatggacagattcgactgccagtacctgatggccaccttcgtgcacgtgtacatcaccagcttcatcagaggccccaaccccagcaaggtgctgcagcagctgctggtgctgcagcccgagcagcagctgaacatctacaagaccctgaagacccacctgatcgagaagggcatcctgcagcccaccctgaaggtgtag

SEQ ID NO: 76151 - DNA, 978 bp, synthetic construct
  misc_feature 1..978: note = Description of Artificial Sequence: Synthetic coding sequence
  source 1..978: mol_type = other DNA
atgagcagactgagacaccccagaaccagatacttcctgctgtgcgtgaactacttcttctacggcgagaccgtgaccgactacttcttcaccctggtgcagagagaggagcccctgagaatcctgagcaagtaccacagattcatcagcttcaccctgtacctgatcggcttctgcatgttcgtgctgagcctggtgaagaagcactacagactgcagttctacatgttcggctggacccacgtgaccctgctgatcgtggtgacccagagccacctggtgatccacaacctgttcgagggcatgatctggttcatcgtgcccatcagctgcgtgatctgcaacgacatcatggcctacatgttcggcttcttcttcggcagaacccccctgatcaagctgagccccaagaagacctgggagggcttcatcggcggcttcttcgccaccgtggtgttcggcctgctgctgagctacgtgatgagcggctacagatgcttcgtgtgccccgtggagtacaacaacgacaccaacagcttcaccgtggactgcgagcccagcgacctgttcagactgcaggagtacaacatccccggcgtgatccagagcgtgatcggctggaagaccgtgagaatgtaccccttccagatccacagcatcgccctgagcaccttcgccagcctgatcggccccttcggcggcttcttcgccagcggcttcaagagagccttcaagatcaaggacttcgccaacaccatccccggccacggcggcatcatggacagattcgactgccagtacctgatggccaccttcgtgaacgtgtacatcgccagcttcatcagaggccccaaccccagcaagctgatccagcagttcctgaccctgagacccgaccagcagctgcacatcttcaacaccctgagaagccacctgatcgacaagggcatgctgaccagcaccaccgaggacgagtag

SEQ ID NO: 76152 - DNA, 753 bp, synthetic construct
  misc_feature 1..753: note = Description of Artificial Sequence: Synthetic coding sequence
  source 1..753: mol_type = other DNA
atgagcagactgagacaccccagaaccagatggaagaactggtgggtgagaggcatcctgaccctggccatgatcgccttcttcttcatcatcatctacctgggccccatggtgctgatgatcatcgtgatgtgcgtgcagatcaagtgcttccacgagatcatcaccatcggctacaacgtgtaccacagctacgacctgccctggttcagaaccctgagctggtacttcctgctgtgcgtgaactacttcttctacggcgagaccgtgaccgactacttcttcaccctggtgcagagagaggagcccctgagaatcctgagcaagtaccacagattcatcagcttcaccctgtacctgatcggcttctgcatgttcgtgctgagcctggtgaagaagcactacagactgcagttctacatgttcggctggacccacgtgaccctgctgatcgtggtgacccagagccacctggtgatccacaacctgttcgagggcatgatctggttcatcgtgcccatcagctgcgtgatctgcaacgacatcatggcctacatgttcggcttcttcttcggcagaacccccctgatcaagctgagccccaagaagacctgggagggcttcatcggcggcttcttcgccaccgtggtgttcggcctgctgctgagctacgtgatgagcggctacagatgcttcgtgtgccccgtggagtacaacaacgacaccaacagcttcaccgtggactgcgagtag

SEQ ID NO: 76153 - DNA, 1338 bp, synthetic construct
  misc_feature 1..1338: note = Description of Artificial Sequence: Synthetic coding sequence
  source 1..1338: mol_type = other DNA
atgaccgagctgagacagagagtggcccacgagcccgtggccccccccgaggacaaggagagcgagagcgaggccaaggtggacggcgagaccgccagcgacagcgagagcagagccgagagcgcccccctgcccgtgagcgccgacgacacccccgaggtgctgaacagagccctgagcaacctgagcagcagatggaagaactggtgggtgagaggcatcctgaccctggccatgatcgccttcttcttcatcatcatctacctgggccccatggtgctgatgatcatcgtgatgtgcgtgcagatcaagtgcttccacgagatcatcaccatcggctacaacgtgtaccacagctacgacctgccctggttcagaaccctgagctggtacttcctgctgtgcgtgaactacttcttctacggcgagaccgtgaccgactacttcttcaccctggtgcagagagaggagcccctgagaatcctgagcaagtaccacagattcatcagcttcaccctgtacctgatcggcttctgcatgttcgtgctgagcctggtgaagaagcactacagactgcagttctacatgttcggctggacccacgtgaccctgctgatcgtggtgacccagagccacctggtgatccacaacctgttcgagggcatgatctggttcatcgtgcccatcagctgcgtgatctgcaacgacatcatggcctacatgttcggcttcttcttcggcagaacccccctgatcaagctgagccccaagaagacctgggagggcttcatcggcggcttcttcgccaccgtggtgttcggcctgctgctgagctacgtgatgagcggctacagatgcttcgtgtgccccgtggagtacaacaacgacaccaacagcttcaccgtggactgcgagcccagcgacctgttcagactgcaggagtacaacatccccggcgtgatccagagcgtgatcggctggaagaccgtgagaatgtaccccttccagatccacagcatcgccctgagcaccttcgccagcctgatcggccccttcggcggcttcttcgccagcggcttcaagagagccttcaagatcaaggacttcgccaacaccatccccggccacggcggcatcatggacagattcgactgccagtacctgatggccaccttcgtgaacgtgtacatcgccagcttcatcagaggccccaaccccagcaagctgatccagcagttcctgaccctgagacccgaccagcagctgcacatcttcaacaccctgagaagccacctgatcgacaagggcatgctgaccagcaccaccgaggacgagtag

SEQ ID NO: 76154 - DNA, 648 bp, synthetic construct
  misc_feature 1..648: note = Description of Artificial Sequence: Synthetic coding sequence
  source 1..648: mol_type = other DNA
atgttcgtgctgagcctggtgaagaagcactacagactgcagttctacatgttcggctggacccacgtgaccctgctgatcgtggtgacccagagccacctggtgatccacaacctgttcgagggcatgatctggttcatcgtgcccatcagctgcgtgatctgcaacgacatcatggcctacatgttcggcttcttcttcggcagaacccccctgatcaagctgagccccaagaagacctgggagggcttcatcggcggcttcttcgccaccgtggtgttcggcctgctgaagaccgtgagaatgtaccccttccagatccacagcatcgccctgagcaccttcgccagcctgatcggccccttcggcggcttcttcgccagcggcttcaagagagccttcaagatcaaggacttcgccaacaccatccccggccacggcggcatcatggacagattcgactgccagtacctgatggccaccttcgtgaacgtgtacatcgccagcttcatcagaggccccaaccccagcaagctgatccagcagttcctgaccctgagacccgaccagcagctgcacatcttcaacaccctgagaagccacctgatcgacaagggcatgctgaccagcaccaccgaggacgagtag

SEQ ID NO: 76155 - DNA, 3675 bp, synthetic construct
  misc_feature 1..3675: note = Description of Artificial Sequence: Synthetic coding sequence
  source 1..3675: mol_type = other DNA
atggagcccctgctgctgggcagaggcctgatcgtgtacctgatgttcctgctgctgaagttcagcaaggccatcgagatccccagcagcgtgcagcaggtgcccaccatcatcaagcagagcaaggtgcaggtggccttccccttcgacgagtacttccagatcgagtgcgaggccaagggcaaccccgagcccaccttcagctggaccaaggacggcaaccccttctacttcaccgaccacagaatcatccccagcaacaacagcggcaccttcagaatccccaacgagggccacatcagccacttccagggcaagtacagatgcttcgccagcaacaagctgggcatcgccatgagcgaggagatcgagttcatcgtgcccagcgtgcccaagttccccaaggagaagatcgaccccctggaggtggaggagggcgaccccatcgtgctgccctgcaacccccccaagggcctgccccccctgcacatctactggatgaacatcgagctggagcacatcgagcaggacgagagagtgtacatgagccagaagggcgacctgtacttcgccaacgtggaggagaaggacagcagaaacgactactgctgcttcgccgccttccccagactgagaaccatcgtgcagaagatgcccatgaagctgaccgtgaacagcctgaagcacgccaacgacagcagcagcagcaccgagatcggcagcaaggccaacagcatcaagcagagaaagcccaagctgctgctgccccccaccgagagcggcagcgagagcagcatcaccatcctgaagggcgagatcctgctgctggagtgcttcgccgagggcctgcccaccccccaggtggactggaacaagatcggcggcgacctgcccaagggcagagagaccaaggagaactacggcaagaccctgaagatcgagaacgtgagctaccaggacaagggcaactacagatgcaccgccagcaacttcctgggcaccgccacccacgacttccacgtgatcgtggaggagccccccagatggaccaagaagccccagagcgccgtgtacagcaccggcagcaacggcatcctgctgtgcgaggccgagggcgagccccagcccaccatcaagtggagagtgaacggcagccccgtggacaaccaccccttcgccggcgacgtggtgttccccagagagatcagcttcaccaacctgcagcccaaccacaccgccgtgtaccagtgcgaggccagcaacgtgcacggcaccatcctggccaacgccaacatcgacgtggtggacgtgagacccctgatccagaccaaggacggcgagaactacgccaccgtggtgggctacagcgccttcctgcactgcgagttcttcgccagccccgaggccgtggtgagctggcagaaggtggaggaggtgaagcccctggagggcagaagataccacatctacgagaacggcaccctgcagatcaacagaaccaccgaggaggacgccggcagctacagctgctgggtggagaacgccatcggcaagaccgccgtgaccgccaacctggacatcagaaacgccaccaagctgagagtgagccccaagaaccccagaatccccaagctgcacatgctggagctgcactgcgagagcaagtgcgacagccacctgaagcacagcctgaagctgagctggagcaaggacggcgaggccttcgagatcaacggcaccgaggacggcagaatcatcatcgacggcgccaacctgaccatcagcaacgtgaccctggaggaccagggcatctactgctgcagcgcccacaccgccctggacagcgccgccgacatcacccaggtgaccgtgctggacgtgcccgacccccccgagaacctgcacctgagcgagagacagaacagaagcgtgagactgacctgggaggccggcgccgaccacaacagcaacatcagcgagtacatcgtggagttcgagggcaacaaggaggagcccggcagatgggaggagctgaccagagtgcagggcaagaagaccaccgtgatcctgcccctggcccccttcgtgagataccagttcagagtgatcgccgtgaacgaggtgggcagaagccagcccagccagcccagcgaccaccacgagaccccccccgccgcccccgacagaaacccccagaacatcagagtgcaggccagccagcccaaggagatgatcatcaagtgggagcccctgaagagcatggagcagaacggccccggcctggagtacagagtgacctggaagccccagggcgcccccgtggagtgggaggaggagaccgtgaccaaccacaccctgagagtgatgacccccgccgtgtacgccccctacgacgtgaaggtgcaggccatcaaccagctgggcagcggccccgacccccagagcgtgaccctgtacagcggcgaggactaccccgacaccgcccccgtgatccacggcgtggacgtgatcaacagcaccctggtgaaggtgacctggagcaccgtgcccaaggacagagtgcacggcagactgaagggctaccagatcaactggtggaagaccaagagcctgctggacggcagaacccaccccaaggaggtgaacatcctgagattcagcggccagagaaacagcggcatggtgcccagcctggacgccttcagcgagttccacctgaccgtgctggcctacaacagcaagggcgccggccccgagagcgagccctacatcttccagacccccgagggcgtgcccgagcagcccaccttcctgaaggtgatcaaggtggacaaggacaccgccaccctgagctggggcctgcccaagaagctgaacggcaacctgaccggctacctgctgcagtaccagatcatcaacgacacctacgagatcggcgagctgaacgacatcaacatcaccacccccagcaagcccagctggcacctgagcaacctgaacgccaccaccaagtacaagttctacctgagagcctgcaccagccagggctgcggcaagcccatcaccgaggagagcagcaccctgggcgagggcagcaagggcatcggcaagatcagcggcgtgaacctgacccagaagacccaccccatcgaggtgttcgagcccggcgccgagcacatcgtgagactgatgaccaagaactggggcgacaacgacagcatcttccaggacgtgatcgagaccagaggcagagagtacgccggcctgtacgacgacatcagcacccagggctggttcatcggcctgatgtgcgccatcgccctgctgaccctgctgctgctgaccgtgtgcttcgtgaagagaaacagaggcggcaagtacagcgtgaaggagaaggaggacctgcaccccgaccccgagatccagagcgtgaaggacgagaccttcggcgagtacagcgacagcgacgagaagcccctgaagggcagcctgagaagcctgaacagagacatgcagcccaccgagagcgccgacagcctggtggagtacggcgagggcgaccacggcctgttcagcgaggacggcagcttcatcggcgcctacgccggcagcaaggagaagggcagcgtggagagcaacggcagcagcaccgccaccttccccctgagagcctag

SEQ ID NO: 76156 - DNA, 3627 bp, synthetic construct
  misc_feature 1..3627: note = Description of Artificial Sequence: Synthetic coding sequence
  source 1..3627: mol_type = other DNA
atggagcccctgctgctgggcagaggcctgatcgtgtacctgatgttcctgctgctgaagttcagcaaggccatcgagatccccagcagcgtgcagcaggtgcccaccatcatcaagcagagcaaggtgcaggtggccttccccttcgacgagtacttccagatcgagtgcgaggccaagggcaaccccgagcccaccttcagctggaccaaggacggcaaccccttctacttcaccgaccacagaatcatccccagcaacaacagcggcaccttcagaatccccaacgagggccacatcagccacttccagggcaagtacagatgcttcgccagcaacaagctgggcatcgccatgagcgaggagatcgagttcatcgtgcccagcgtgcccaagttccccaaggagaagatcgaccccctggaggtggaggagggcgaccccatcgtgctgccctgcaacccccccaagggcctgccccccctgcacatctactggatgaacatcgagctggagcacatcgagcaggacgagagagtgtacatgagccagaagggcgacctgtacttcgccaacgtggaggagaaggacagcagaaacgactactgctgcttcgccgccttccccagactgagaaccatcgtgcagaagatgcccatgaagctgaccgtgaacagcagcaacagcatcaagcagagaaagcccaagctgctgctgccccccaccgagagcggcagcgagagcagcatcaccatcctgaagggcgagatcctgctgctggagtgcttcgccgagggcctgcccaccccccaggtggactggaacaagatcggcggcgacctgcccaagggcagagagaccaaggagaactacggcaagaccctgaagatcgagaacgtgagctaccaggacaagggcaactacagatgcaccgccagcaacttcctgggcaccgccacccacgacttccacgtgatcgtggaggagccccccagatggaccaagaagccccagagcgccgtgtacagcaccggcagcaacggcatcctgctgtgcgaggccgagggcgagccccagcccaccatcaagtggagagtgaacggcagccccgtggacaaccaccccttcgccggcgacgtggtgttccccagagagatcagcttcaccaacctgcagcccaaccacaccgccgtgtaccagtgcgaggccagcaacgtgcacggcaccatcctggccaacgccaacatcgacgtggtggacgtgagacccctgatccagaccaaggacggcgagaactacgccaccgtggtgggctacagcgccttcctgcactgcgagttcttcgccagccccgaggccgtggtgagctggcagaaggtggaggaggtgaagcccctggagggcagaagataccacatctacgagaacggcaccctgcagatcaacagaaccaccgaggaggacgccggcagctacagctgctgggtggagaacgccatcggcaagaccgccgtgaccgccaacctggacatcagaaacgccaccaagctgagagtgagccccaagaaccccagaatccccaagctgcacatgctggagctgcactgcgagagcaagtgcgacagccacctgaagcacagcctgaagctgagctggagcaaggacggcgaggccttcgagatcaacggcaccgaggacggcagaatcatcatcgacggcgccaacctgaccatcagcaacgtgaccctggaggaccagggcatctactgctgcagcgcccacaccgccctggacagcgccgccgacatcacccaggtgaccgtgctggacgtgcccgacccccccgagaacctgcacctgagcgagagacagaacagaagcgtgagactgacctgggaggccggcgccgaccacaacagcaacatcagcgagtacatcgtggagttcgagggcaacaaggaggagcccggcagatgggaggagctgaccagagtgcagggcaagaagaccaccgtgatcctgcccctggcccccttcgtgagataccagttcagagtgatcgccgtgaacgaggtgggcagaagccagcccagccagcccagcgaccaccacgagaccccccccgccgcccccgacagaaacccccagaacatcagagtgcaggccagccagcccaaggagatgatcatcaagtgggagcccctgaagagcatggagcagaacggccccggcctggagtacagagtgacctggaagccccagggcgcccccgtggagtgggaggaggagaccgtgaccaaccacaccctgagagtgatgacccccgccgtgtacgccccctacgacgtgaaggtgcaggccatcaaccagctgggcagcggccccgacccccagagcgtgaccctgtacagcggcgaggactaccccgacaccgcccccgtgatccacggcgtggacgtgatcaacagcaccctggtgaaggtgacctggagcaccgtgcccaaggacagagtgcacggcagactgaagggctaccagatcaactggtggaagaccaagagcctgctggacggcagaacccaccccaaggaggtgaacatcctgagattcagcggccagagaaacagcggcatggtgcccagcctggacgccttcagcgagttccacctgaccgtgctggcctacaacagcaagggcgccggccccgagagcgagccctacatcttccagacccccgagggcgtgcccgagcagcccaccttcctgaaggtgatcaaggtggacaaggacaccgccaccctgagctggggcctgcccaagaagctgaacggcaacctgaccggctacctgctgcagtaccagatcatcaacgacacctacgagatcggcgagctgaacgacatcaacatcaccacccccagcaagcccagctggcacctgagcaacctgaacgccaccaccaagtacaagttctacctgagagcctgcaccagccagggctgcggcaagcccatcaccgaggagagcagcaccctgggcgagggcagcaagggcatcggcaagatcagcggcgtgaacctgacccagaagacccaccccatcgaggtgttcgagcccggcgccgagcacatcgtgagactgatgaccaagaactggggcgacaacgacagcatcttccaggacgtgatcgagaccagaggcagagagtacgccggcctgtacgacgacatcagcacccagggctggttcatcggcctgatgtgcgccatcgccctgctgaccctgctgctgctgaccgtgtgcttcgtgaagagaaacagaggcggcaagtacagcgtgaaggagaaggaggacctgcaccccgaccccgagatccagagcgtgaaggacgagaccttcggcgagtacagcgacagcgacgagaagcccctgaagggcagcctgagaagcctgaacagagacatgcagcccaccgagagcgccgacagcctggtggagtacggcgagggcgaccacggcctgttcagcgaggacggcagcttcatcggcgcctacgccggcagcaaggagaagggcagcgtggagagcaacggcagcagcaccgccaccttccccctgagagcctag

SEQ ID NO: 76157 - DNA, 291 bp, synthetic construct
  misc_feature 1..291: note = Description of Artificial Sequence: Synthetic coding sequence
  source 1..291: mol_type = other DNA
atggagcccctgctgctgggcagaggcctgatcgtgtacctgatgttcctgctgctgaagttcagcaaggccatcgagatccccagcagcgtgcagcaggtgcccaccatcatcaagcagagcaaggtgcaggtggccttccccttcgacgagtacttccagatcgagtgcgaggccaagggcaaccccgagcccaccttcagctggaccaaggacggcaaccccttctacttcaccgaccacagaatcatccccagcaacaacagcggcaccttcagaatccccaactag

SEQ ID NO: 76158 - DNA, 201 bp, synthetic construct
  misc_feature 1..201: note = Description of Artificial Sequence: Synthetic coding sequence
  source 1..201: mol_type = other DNA
atggagcccctgctgctgggcagaggcctgatcgtgtacctgatgttcctgctgctgaagttcagcaaggccatcgagatccccagcagcgtgcagcaggtgcccaccatcatcaagcagagcaaggtgcaggtggccttccccttcgacgagtacttccagatcgagtgcgaggccaagggcaaccccgagcccacctag

SEQ ID NO: 76159 - DNA, 546 bp, synthetic construct
  misc_feature 1..546: note = Description of Artificial Sequence: Synthetic coding sequence
  source 1..546: mol_type = other DNA
atggagcccctgctgctgggcagaggcctgatcgtgtacctgatgttcctgctgctgaagttcagcaaggccatcgagatccccagcagcgtgcagcaggtgcccaccatcatcaagcagagcaaggtgcaggtggccttccccttcgacgagtacttccagatcgagtgcgaggccaagggcaaccccgagcccaccttcagctggaccaaggacggcaaccccttctacttcaccgaccacagaatcatccccagcaacaacagcggcaccttcagaatccccaacgagggccacatcagccacttccagggcaagtacagatgcttcgccagcaacaagctgggcatcgccatgagcgaggagatcgagttcatcgtgcccagcgtgcccaagttccccaaggagaagatcgaccccctggaggtggaggagggcgaccccatcgtgctgccctgcaacccccccaagggcctgccccccctgcacatctactggatgaacatcgagctggagcacatcgagcaggacgagagagtgtactag

SEQ ID NO: 76160 - DNA, 954 bp, synthetic construct
  misc_feature 1..954: note = Description of Artificial Sequence: Synthetic coding sequence
  source 1..954: mol_type = other DNA
tgaagcgtgaccctgtacagcggcgaggactaccccgacaccgcccccgtgatccacggcgtggacgtgatcaacagcaccctggtgaaggtgacctggagcaccgtgcccaaggacagagtgcacggcagactgaagggctaccagatcaactggtggaagaccaagagcctgctggacggcagaacccaccccaaggaggtgaacatcctgagattcagcggccagagaaacagcggcatggtgcccagcctggacgccttcagcgagttccacctgaccgtgctggcctacaacagcaagggcgccggccccgagagcgagccctacatcttccagacccccgagggcgtgcccgagcagcccaccttcctgaaggtgatcaaggtggacaaggacaccgccaccctgagctggggcctgcccaagaagctgaacggcaacctgaccggctacctgctgcagtaccagatcatcaacgacacctacgagatcggcgagctgaacgacatcaacatcaccacccccagcaagcccagctggcacctgagcaacctgaacgccaccaccaagtacaagttctacctgagagcctgcaccagccagggctgcggcaagcccatcaccgaggagagcagcaccctgggcgagggcaagtacgccggcctgtacgacgacatcagcacccagggctggttcatcggcctgatgtgcgccatcgccctgctgaccctgctgctgctgaccgtgtgcttcgtgaagagaaacagaggcggcaagtacagcgtgaaggagaaggaggacctgcaccccgaccccgagatccagagcgtgaaggacgagaccttcggcgagtacagcgacagcgacgagaagcccctgaagggcagcctgagaagcctgaacagagacatgcagcccaccgagagcgccgacagcctggtggagtactag

SEQ ID NO: 76161 - DNA, 258 bp, synthetic construct
  misc_feature 1..258: note = Description of Artificial Sequence: Synthetic coding sequence
  source 1..258: mol_type = other DNA
atggagcccctgctgctgggcagaggcctgatcgtgtacctgatgttcctgctgctgaagttcagcaaggccatcgagatccccagcagcgtgcagcaggtgcccaccatcatcaagcagagcaaggtgcaggtggccttccccttcgacgagtacttccagatcgagtgcgaggccaagggcaaccccgagcccaccttcagctggaccaaggacggcaaccccttctacttcaccgaccacagaatcatcccctag

SEQ ID NO: 76162 - DNA, 450 bp, synthetic construct
  misc_feature 1..450: note = Description of Artificial Sequence: Synthetic coding sequence
  source 1..450: mol_type = other DNA
atggagagcagaggcaagagcgccagcagccccaagcccgacaccaaggtgccccaggtgaccaccgaggccaaggtgccccccgccgccgacggcaaggcccccctgaccaagcccagcaagaaggaggcccccgccgagaagcagcagccccccgccgcccccaccaccgcccccgccaagaagaccagcgccaaggccgaccccgccctgctgaacaaccacagcaacctgaagcccgcccccaccgtgcccagcagccccgacgccacccccgagcccaagggccccggcgacggcgccgaggaggacgaggccgccagcggcggccccggcggcagaggcccctggagctgcgagaacttcaaccccctgctggtggccggcggcgtggccgtggccgccatcgccctgatcctgggcgtggccttcctggtgagaaagaagtag

SEQ ID NO: 76163 - DNA, 627 bp, synthetic construct
  misc_feature 1..627: note = Description of Artificial Sequence: Synthetic coding sequence
  source 1..627: mol_type = other DNA
atgagcagcgagcccccccccccctaccccggcggccccaccgcccccctgctggaggagaagagcggcgccccccccacccccggcagaagcagccccgccgtgatgcagcccccccccggcatgcccctgccccccgccgacatcggcccccccccctacgagccccccggccaccccatgccccagcccggcttcatccccccccacatgagcgccgacggcacctacatgccccccggcttctaccccccccccggcccccacccccccatgggctactacccccccggcccctacacccccggcccctaccccggccccggcggccacaccgccaccgtgctggtgcccagcggcgccgccaccaccgtgaccgtgctgcagggcgagatcttcgagggcgcccccgtgcagaccgtgtgcccccactgccagcaggccatcaccaccaagatcagctacgagatcggcctgatgaacttcgtgctgggcttcttctgctgcttcatgggctgcgacctgggctgctgcctgatcccctgcctgatcaacgacttcaaggacgtgacccacacctgccccagctgcaaggcctacatctacacctacaagagactgtgctag

SEQ ID NO: 76164 - DNA, 456 bp, synthetic construct
  misc_feature 1..456: note = Description of Artificial Sequence: Synthetic coding sequence
  source 1..456: mol_type = other DNA
atggccgccagcaccagcatggtgcccgtggccgtgaccgccgccgtggcccccgtgctgagcatcaacagcgacttcagcgacctgagagagatcaagaagcagctgctgctgatcgccggcctgaccagagagagaggcctgctgcacagcagcaagtggagcgccgagctggccttcagcctgcccgccctgcccctggccgagctgcagccccccccccccatcaccgaggaggacgcccaggacatggacgcctacaccctggccaaggcctacttcgacgtgaaggagtacgacagagccgcccacttcctgcacggctgcaacagcaagaaggcctacttcctgtacatgtacagcagatacctggtgagagccatcctgaagtgccacagcgccttcagcgagaccagcatcttcagaaccaacggcaaggtgaagagcttcaagtag

SEQ ID NO: 76165 - DNA, 1794 bp, synthetic construct
  misc_feature 1..1794: note = Description of Artificial Sequence: Synthetic coding sequence
  source 1..1794: mol_type = other DNA
atggccgccagcaccagcatggtgcccgtggccgtgaccgccgccgtggcccccgtgctgagcatcaacagcgacttcagcgacctgagagagatcaagaagcagctgctgctgatcgccggcctgaccagagagagaggcctgctgcacagcagcaagtggagcgccgagctggccttcagcctgcccgccctgcccctggccgagctgcagccccccccccccatcaccgaggaggacgcccaggacatggacgcctacaccctggccaaggcctacttcgacgtgaaggagtacgacagagccgcccacttcctgcacggctgcaacagcaagaaggcctacttcctgtacatgtacagcagatacctgagcggcgagaagaagaaggacgacgagaccgtggacagcctgggccccctggagaagggccaggtgaagaacgaggccctgagagagctgagagtggagctgagcaagaagcaccaggccagagagctggacggcttcggcctgtacctgtacggcgtggtgctgagaaagctggacctggtgaaggaggccatcgacgtgttcgtggaggccacccacgtgctgcccctgcactggggcgcctggctggagctgtgcaacctgatcaccgacaaggagatgctgaagttcctgagcctgcccgacacctggatgaaggagttcttcctggcccacatctacaccgagctgcagctgatcgaggaggccctgcagaagtaccagaacctgatcgacgtgggcttcagcaagagcagctacatcgtgagccagatcgccgtggcctaccacaacatcagagacatcgacaaggccctgagcatcttcaacgagctgagaaagcaggacccctacagaatcgagaacatggacaccttcagcaacctgctgtacgtgagaagcatgaagagcgagctgagctacctggcccacaacctgtgcgagatcgacaagtacagagtggagacctgctgcgtgatcggcaactactacagcctgagaagccagcacgagaaggccgccctgtacttccagagagccctgaagctgaaccccagatacctgggcgcctggaccctgatgggccacgagtacatggagatgaagaacaccagcgccgccatccaggcctacagacacgccatcgaggtgaacaagagagactacagagcctggtacggcctgggccagacctacgagatcctgaagatgcccttctactgcctgtactactacagaagagcccaccagctgagacccaacgacagcagaatgctggtggccctgggcgagtgctacgagaagctgaaccagctggtggaggccaagaagtgctactggagagcctacgccgtgggcgacgtggagaagatggccctggtgaagctggccaagctgcacgagcagctgaccgagagcgagcaggccgcccagtgctacatcaagtacatccaggacatctacagctgcggcgagatcgtggagcacctggaggagagcaccgccttcagatacctggcccagtactacttcaagtgcaagctgtgggacgaggccagcacctgcgcccagaagtgctgcgccttcaacgacaccagagaggagggcaaggccctgctgagacagatcctgcagctgagaaaccagggcgagacccccaccaccgaggtgcccgcccccttcttcctgcccgccagcctgagcgccaacaacacccccaccagaagagtgagccccctgaacctgagcagcgtgaccccctag

SEQ ID NO: 76166 - DNA, 1575 bp, synthetic construct
  misc_feature 1..1575: note = Description of Artificial Sequence: Synthetic coding sequence
  source 1..1575: mol_type = other DNA
atggagctgggccccgagcccccccacagaagaagactgctgttcgcctgcagccccccccccgccagccagcccgtggtgaaggccctgttcggcgccagcgccgccggcggcctgagccccgtgaccaacctgaccgtgaccatggaccagctgcagggcctgggcagcgactacgagcagcccctggaggtgaagaacaacagcaacctgcagagaatgggcagcagcgagagcaccgacagcggcttctgcctggacagccccggccccctggacagcaaggagaacctggagaaccccatgagaagaatccacagcctgccccagaagctgctgggctgcagccccgccctgaagagaagccacagcgacagcctggaccacgacatcttccagctgatcgaccccgacgagaacaaggagaacgaggccttcgagttcaagaagcccgtgagacccgtgagcagaggctgcctgcacagccacggcctgcaggagggcaaggacctgttcacccagagacagaacagcgcccccgccagaatgctgagcagcaacgagagagacagcagcgagcccggcaacttcatccccctgttcaccccccagagccccgtgaccgccaccctgagcgacgaggacgacggcttcgtggacctgctggacggcgagaacctgaagaacgaggaggagacccccagctgcatggccagcctgtggaccgcccccctggtgatgagaaccaccaacctggacaacagatgcaagctgttcgacagccccagcctgtgcagcagcagcaccagaagcgtgctgaagagacccgagagaagccaggaggagagcccccccggcagcaccaagagaagaaagagcatgagcggcgccagccccaaggagagcaccaaccccgagaaggcccacgagaccctgcaccagagcctgagcctggccagcagccccaagggcaccatcgagaacatcctggacaacgaccccagagacctgatcggcgacttcagcaagggctacctgttccacaccgtggccggcaagcaccaggacctgaagtacatcagccccgagatcatggccagcgtgctgaacggcaagttcgccaacctgatcaaggagttcgtgatcatcgactgcagatacccctacgagtacgagggcggccacatcaagggcgccgtgaacctgcacatggaggaggaggtggaggacttcctgctgaagaagcccatcgtgcccaccgacggcaagagagtgatcgtggtgttccactgcgagttcagcagcgagagaggccccagaatgtgcagatacgtgagagagagagacagactgggcaacgagtaccccaagctgcactaccccgagctgtacgtgctgaagggcggctacaaggagttcttcatgaagtgccagagctactgcgagccccccagctacagacccatgcaccacgaggacttcaaggaggacctgaagaagttcagaaccaagagcagaacctgggccggcgagaagagcaagagagagatgtacagcagactgaagaagctgtag

SEQ ID NO: 76167 - DNA, 1455 bp, synthetic construct
  misc_feature 1..1455: note = Description of Artificial Sequence: Synthetic coding sequence
  source 1..1455: mol_type = other DNA
atggagctgggccccgagcccccccacagaagaagactgctgttcgcctgcagccccccccccgccagccagcccgtggtgaaggccctgttcggcgccagcgccgccggcggcctgagccccgtgaccaacctgaccgtgaccatggaccagctgcagggcctgggcagcgactacgagcagcccctggaggtgaagaacaacagcaacctgcagagaatgggcagcagcgagagcaccgacagcggcttctgcctggacagccccggccccctggacagcaaggagaacctggagaaccccatgagaagaatccacagcctgccccagaagctgctgggctgcagccccgccctgaagagaagccacagcgacagcctggaccacgacatcttccagctgatcgaccccgacgagaacaaggagaacctgagcagcaacgagagagacagcagcgagcccggcaacttcatccccctgttcaccccccagagccccgtgaccgccaccctgagcgacgaggacgacggcttcgtggacctgctggacggcgagaacctgaagaacgaggaggagacccccagctgcatggccagcctgtggaccgcccccctggtgatgagaaccaccaacctggacaacagatgcaagctgttcgacagccccagcctgtgcagcagcagcaccagaagcgtgctgaagagacccgagagaagccaggaggagagcccccccggcagcaccaagagaagaaagagcatgagcggcgccagccccaaggagagcaccaaccccgagaaggcccacgagaccctgcaccagagcctgagcctggccagcagccccaagggcaccatcgagaacatcctggacaacgaccccagagacctgatcggcgacttcagcaagggctacctgttccacaccgtggccggcaagcaccaggacctgaagtacatcagccccgagatcatggccagcgtgctgaacggcaagttcgccaacctgatcaaggagttcgtgatcatcgactgcagatacccctacgagtacgagggcggccacatcaagggcgccgtgaacctgcacatggaggaggaggtggaggacttcctgctgaagaagcccatcgtgcccaccgacggcaagagagtgatcgtggtgttccactgcgagttcagcagcgagagaggccccagaatgtgcagatacgtgagagagagagacagactgggcaacgagtaccccaagctgcactaccccgagctgtacgtgctgaagggcggctacaaggagttcttcatgaagtgccagagctactgcgagccccccagctacagacccatgcaccacgaggacttcaaggaggacctgaagaagttcagaaccaagagcagaacctgggccggcgagaagagcaagagagagatgtacagcagactgaagaagctgtag

SEQ ID NO: 76168 - DNA, 432 bp, synthetic construct
  misc_feature 1..432: note = Description of Artificial Sequence: Synthetic coding sequence
  source 1..432: mol_type = other DNA
atggagctgggccccgagcccccccacagaagaagactgctgttcgcctgcagccccccccccgccagccagcccgtggtgaaggccctgttcggcgccagcgccgccggcggcctgagccccgtgaccaacctgaccgtgaccatggaccagctgcagggcctgggcagcgactacgagcagcccctggaggtgaagaacaacagcaacctgcagagaatgggcagcagcgagagcaccgacagcggcttctgcctggacagccccggccccctggacagcaaggagaacctggagaaccccatgagaagaatccacagcctgccccagaagctgctgggctgcagccccgccctgaagagaagccacagcgacagcctggaccacgacatcttccagctgatcgaccccgacgagaacaaggagaactag

SEQ ID NO: 76169 - DNA, 1743 bp, synthetic construct
  misc_feature 1..1743: note = Description of Artificial Sequence: Synthetic coding sequence
  source 1..1743: mol_type = other DNA
atggaggtgccccagcccgagcccgcccccggcagcgccctgagccccgccggcgtgtgcggcggcgcccagagacccggccacctgcccggcctgctgctgggcagccacggcctgctgggcagccccgtgagagccgccgccagcagccccgtgaccaccctgacccagaccatgcacgacctggccggcctgggcagcgagacccccaagagccaggtgggcaccctgctgttcagaagcagaagcagactgacccacctgagcctgagcagaagagccagcgagagcagcctgagcagcgagagcagcgagagcagcgacgccggcctgtgcatggacagccccagccccatggacccccacatggccgagcagaccttcgagcaggccatccaggccgccagcagaatcatcagaaacgagcagttcgccatcagaagattccagagcatgcccgtgagactgctgggccacagccccgtgctgagaaacatcaccaacagccaggcccccgacggcagaagaaagagcgaggccggcagcggcgccgccagcagcagcggcgaggacaaggagaacgacggcttcgtgttcaagatgccctggaagcccacccaccccagcagcacccacgccctggccgagtgggccagcagaagagaggccttcgcccagagacccagcagcgcccccgacctgatgtgcctgagccccgacagaaagatggaggtggaggagctgagccccctggccctgggcagattcagcctgacccccgccgagggcgacaccgaggaggacgacggcttcgtggacatcctggagagcgacctgaaggacgacgacgccgtgccccccggcatggagagcctgatcagcgcccccctggtgaagaccctggagaaggaggaggagaaggacctggtgatgtacagcaagtgccagagactgttcagaagccccagcatgccctgcagcgtgatcagacccatcctgaagagactggagagaccccaggacagagacacccccgtgcagaacaagagaagaagaagcgtgaccccccccgaggagcagcaggaggccgaggagcccaaggccagagtgctgagaagcaagagcctgtgccacgacgagatcgagaacctgctggacagcgaccacagagagctgatcggcgactacagcaaggccttcctgctgcagaccgtggacggcaagcaccaggacctgaagtacatcagccccgagaccatggtggccctgctgaccggcaagttcagcaacatcgtggacaagttcgtgatcgtggactgcagatacccctacgagtacgagggcggccacatcaagaccgccgtgaacctgcccctggagagagacgccgagagcttcctgctgaagagccccatcgccccctgcagcctggacaagagagtgatcctgatcttccactgcgagttcagcagcgagagaggccccagaatgtgcagattcatcagagagagagacagagccgtgaacgactaccccagcctgtactaccccgagatgtacatcctgaagggcggctacaaggagttcttcccccagcaccccaacttctgcgagccccaggactacagacccatgaaccacgaggccttcaaggacgagctgaagaccttcagactgaagaccagaagctgggccggcgagagaagcagaagagagctgtgcagcagactgcaggaccagtag

SEQ ID NO: 76170 - DNA, 1620 bp, synthetic construct
  misc_feature 1..1620: note = Description of Artificial Sequence: Synthetic coding sequence
  source 1..1620: mol_type = other DNA
atggaggtgccccagcccgagcccgcccccggcagcgccctgagccccgccggcgtgtgcggcggcgcccagagacccggccacctgcccggcctgctgctgggcagccacggcctgctgggcagccccgtgagagccgccgccagcagccccgtgaccaccctgacccagaccatgcacgacctggccggcctgggcagcgagacccccaagagccaggtgggcaccctgctgttcagaagcagaagcagactgacccacctgagcctgagcagaagagccagcgagagcagcctgagcagcgagagcagcgagagcagcgacgccggcctgtgcatggacagccccagccccatggacccccacatggccgagcagaccttcgagcaggccatccaggccgccagcagaatcatcagaaacgagcagttcgccatcagaagattccagagcatgcccgacggcttcgtgttcaagatgccctggaagcccacccaccccagcagcacccacgccctggccgagtgggccagcagaagagaggccttcgcccagagacccagcagcgcccccgacctgatgtgcctgagccccgacagaaagatggaggtggaggagctgagccccctggccctgggcagattcagcctgacccccgccgagggcgacaccgaggaggacgacggcttcgtggacatcctggagagcgacctgaaggacgacgacgccgtgccccccggcatggagagcctgatcagcgcccccctggtgaagaccctggagaaggaggaggagaaggacctggtgatgtacagcaagtgccagagactgttcagaagccccagcatgccctgcagcgtgatcagacccatcctgaagagactggagagaccccaggacagagacacccccgtgcagaacaagagaagaagaagcgtgaccccccccgaggagcagcaggaggccgaggagcccaaggccagagtgctgagaagcaagagcctgtgccacgacgagatcgagaacctgctggacagcgaccacagagagctgatcggcgactacagcaaggccttcctgctgcagaccgtggacggcaagcaccaggacctgaagtacatcagccccgagaccatggtggccctgctgaccggcaagttcagcaacatcgtggacaagttcgtgatcgtggactgcagatacccctacgagtacgagggcggccacatcaagaccgccgtgaacctgcccctggagagagacgccgagagcttcctgctgaagagccccatcgccccctgcagcctggacaagagagtgatcctgatcttccactgcgagttcagcagcgagagaggccccagaatgtgcagattcatcagagagagagacagagccgtgaacgactaccccagcctgtactaccccgagatgtacatcctgaagggcggctacaaggagttcttcccccagcaccccaacttctgcgagccccaggactacagacccatgaaccacgaggccttcaaggacgagctgaagaccttcagactgaagaccagaagctgggccggcgagagaagcagaagagagctgtgcagcagactgcaggaccagtag

SEQ ID NO: 76171 - DNA, 1551 bp, synthetic construct
  misc_feature 1..1551: note = Description of Artificial Sequence: Synthetic coding sequence
  source 1..1551: mol_type = other DNA
atgcacagcgagacccccaagagccaggtgggcaccctgctgttcagaagcagaagcagactgacccacctgagcctgagcagaagagccagcgagagcagcctgagcagcgagagcagcgagagcagcgacgccggcctgtgcatggacagccccagccccatggacccccacatggccgagcagaccttcgagcaggccatccaggccgccagcagaatcatcagaaacgagcagttcgccatcagaagattccagagcatgcccgtgagactgctgggccacagccccgtgctgagaaacatcaccaacagccaggcccccgacggcagaagaaagagcgaggccggcagcggcgccgccagcagcagcggcgaggacaaggagaacgacggcttcgtgttcaagatgccctggaagcccacccaccccagcagcacccacgccctggccgagtgggccagcagaagagaggccttcgcccagagacccagcagcgcccccgacctgatgtgcctgagccccgacagaaagatggaggtggaggagctgagccccctggccctgggcagattcagcctgacccccgccgagggcgacaccgaggaggacgacggcttcgtggacatcctggagagcgacctgaaggacgacgacgccgtgccccccggcatggagagcctgatcagcgcccccctggtgaagaccctggagaaggaggaggagaaggacctggtgatgtacagcaagtgccagagactgttcagaagccccagcatgccctgcagcgtgatcagacccatcctgaagagactggagagaccccaggacagagacacccccgtgcagaacaagagaagaagaagcgtgaccccccccgaggagcagcaggaggccgaggagcccaaggccagagtgctgagaagcaagagcctgtgccacgacgagatcgagaacctgctggacagcgaccacagagagctgatcggcgactacagcaaggccttcctgctgcagaccgtggacggcaagcaccaggacctgaagtacatcagccccgagaccatggtggccctgctgaccggcaagttcagcaacatcgtggacaagttcgtgatcgtggactgcagatacccctacgagtacgagggcggccacatcaagaccgccgtgaacctgcccctggagagagacgccgagagcttcctgctgaagagccccatcgccccctgcagcctggacaagagagtgatcctgatcttccactgcgagttcagcagcgagagaggccccagaatgtgcagattcatcagagagagagacagagccgtgaacgactaccccagcctgtactaccccgagatgtacatcctgaagggcggctacaaggagttcttcccccagcaccccaacttctgcgagccccaggactacagacccatgaaccacgaggccttcaaggacgagctgaagaccttcagactgaagaccagaagctgggccggcgagagaagcagaagagagctgtgcagcagactgcaggaccagtag

SEQ ID NO: 76172 - DNA, 1470 bp, synthetic construct
  misc_feature 1..1470: note = Description of Artificial Sequence: Synthetic coding sequence
  source 1..1470: mol_type = other DNA
atgcacagcgagacccccaagagccaggtgggcaccctgctgttcagaagcagaagcagactgacccacctgagcctgagcagaagagccagcgagagcagcctgagcagcgagagcagcgagagcagcgacgccggcctgtgcatggacagccccagccccatggacccccacatggccgagcagaccttcgagcaggccatccaggccgccagcagaatcatcagaaacgagcagttcgccatcagaagattccagagcatgcccgtgagactgctgggccacagccccgtgctgagaaacatcaccaacagccaggcccccgacggcagaagaaagagcgaggccggcagcggcgccgccagcagcagcggcgaggacaaggagaacgacggcttcgtgttcaagatgccctggaagcccacccaccccagcagcacccacgccctggccgagtgggccagcagaagagaggccttcgcccagagacccagcagcgcccccgacctgatgtgcctgagccccgacagaaagatggaggtggaggagctgagccccctggccctgggcagattcagcctgacccccgccgagggcgacaccgaggaggacgacggcttcgtggacatcctggagagcgacctgaaggacctggtgatgtacagcaagtgccagagactgttcagaagccccagcatgccctgcagcgtgatcagacccatcctgaagagactggagagaccccaggacagagacacccccgtgcagaacaagagaagaagaagcgtgaccccccccgaggagcagcaggaggccgaggagcccaaggccagagtgctgagaagcaagagcctgtgccacgacgagatcgagaacctgctggacagcgaccacagagagctgatcggcgactacagcaaggccttcctgctgcagaccgtggacggcaagcaccaggacctgaagtacatcagccccgagaccatggtggccctgctgaccggcaagttcagcaacatcgtggacaagttcgtgatcgtggactgcagatacccctacgagtacgagggcggccacatcaagaccgccgtgaacctgcccctggagagagacgccgagagcttcctgctgaagagccccatcgccccctgcagcctggacaagagagtgatcctgatcttccactgcgagttcagcagcgagagaggccccagaatgtgcagattcatcagagagagagacagagccgtgaacgactaccccagcctgtactaccccgagatgtacatcctgaagggcggctacaaggagttcttcccccagcaccccaacttctgcgagccccaggactacagacccatgaaccacgaggccttcaaggacgagctgaagaccttcagactgaagaccagaagctgggccggcgagagaagcagaagagagctgtgcagcagactgcaggaccagtag

SEQ ID NO: 76173 - DNA, 1701 bp, synthetic construct
  misc_feature 1..1701: note = Description of Artificial Sequence: Synthetic coding sequence
  source 1..1701: mol_type = other DNA
atggaggtgccccagcccgagcccgcccccggcagcgccctgagccccgccggcgtgtgcggcggcgcccagagacccggccacctgcccggcctgctgctgggcagccacggcctgctgggcagccccgtgagagccgccgccagcagccccgtgaccaccctgacccagaccatgcacgacctggccggcctgggcagcagaagcagactgacccacctgagcctgagcagaagagccagcgagagcagcctgagcagcgagagcagcgagagcagcgacgccggcctgtgcatggacagccccagccccatggacccccacatggccgagcagaccttcgagcaggccatccaggccgccagcagaatcatcagaaacgagcagttcgccatcagaagattccagagcatgcccgtgagactgctgggccacagccccgtgctgagaaacatcaccaacagccaggcccccgacggcagaagaaagagcgaggccggcagcggcgccgccagcagcagcggcgaggacaaggagaacgacggcttcgtgttcaagatgccctggaagcccacccaccccagcagcacccacgccctggccgagtgggccagcagaagagaggccttcgcccagagacccagcagcgcccccgacctgatgtgcctgagccccgacagaaagatggaggtggaggagctgagccccctggccctgggcagattcagcctgacccccgccgagggcgacaccgaggaggacgacggcttcgtggacatcctggagagcgacctgaaggacgacgacgccgtgccccccggcatggagagcctgatcagcgcccccctggtgaagaccctggagaaggaggaggagaaggacctggtgatgtacagcaagtgccagagactgttcagaagccccagcatgccctgcagcgtgatcagacccatcctgaagagactggagagaccccaggacagagacacccccgtgcagaacaagagaagaagaagcgtgaccccccccgaggagcagcaggaggccgaggagcccaaggccagagtgctgagaagcaagagcctgtgccacgacgagatcgagaacctgctggacagcgaccacagagagctgatcggcgactacagcaaggccttcctgctgcagaccgtggacggcaagcaccaggacctgaagtacatcagccccgagaccatggtggccctgctgaccggcaagttcagcaacatcgtggacaagttcgtgatcgtggactgcagatacccctacgagtacgagggcggccacatcaagaccgccgtgaacctgcccctggagagagacgccgagagcttcctgctgaagagccccatcgccccctgcagcctggacaagagagtgatcctgatcttccactgcgagttcagcagcgagagaggccccagaatgtgcagattcatcagagagagagacagagccgtgaacgactaccccagcctgtactaccccgagatgtacatcctgaagggcggctacaaggagttcttcccccagcaccccaacttctgcgagccccaggactacagacccatgaaccacgaggccttcaaggacgagctgaagaccttcagactgaagaccagaagctgggccggcgagagaagcagaagagagctgtgcagcagactgcaggaccagtag

SEQ ID NO: 76174 - DNA, 2475 bp, synthetic construct
  misc_feature 1..2475: note = Description of Artificial Sequence: Synthetic coding sequence
  source 1..2475: mol_type = other DNA
atgaccgtgctgcaggagcccgtgcaggccgccatctggcaggccctgaaccactacgcctacagagacgccgtgttcctggccgagagactgtacgccgaggtgcacagcgaggaggccctgttcctgctggccacctgctactacagaagcggcaaggcctacaaggcctacagactgctgaagggccacagctgcaccaccccccagtgcaagtacctgctggccaagtgctgcgtggacctgagcaagctggccgagggcgagcagatcctgagcggcggcgtgttcaacaagcagaagagccacgacgacatcgtgaccgagttcggcgacagcgcctgcttcaccctgagcctgctgggccacgtgtactgcaagaccgacagactggccaagggcagcgagtgctaccagaagagcctgagcctgaaccccttcctgtggagccccttcgagagcctgtgcgagatcggcgagaagcccgaccccgaccagaccttcaagttcaccagcctgcagaacttcagcaactgcctgcccaacagctgcaccacccaggtgcccaaccacagcctgagccacagacagcccgagaccgtgctgaccgagaccccccaggacaccatcgagctgaacagactgaacctggagagcagcaacagcaagtacagcctgaacaccgacagcagcgtgagctacatcgacagcgccgtgatcagccccgacaccgtgcccctgggcaccggcaccagcatcctgagcaagcaggtgcagaacaagcccaagaccggcagaagcctgctgggcggccccgccgccctgagccccctgacccccagcttcggcatcctgcccctggagacccccagccccggcgacggcagctacctgcagaactacaccaacaccccccccgtgatcgacgtgcccagcaccggcgcccccagcaagaagagcgtggccagaatcggccagaccggcaccaagagcgtgttcagccagagcggcaacagcagagaggtgacccccatcctggcccagacccagagcagcggcccccagaccagcaccaccccccaggtgctgagccccaccatcaccagcccccccaacgccctgcccagaagaagcagcagactgttcaccagcgacagcagcaccaccaaggagaacagcaagaagctgaagatgaagttcccccccaagatccccaacagaaagaccaagagcaagaccaacaagggcggcatcacccagcccaacatcaacgacagcctggagatcaccaagctggacagcagcatcatcagcgagggcaagatcagcaccatcaccccccagatccaggccttcaacctgcagaaggccgccgccgagggcctgatgagcctgctgagagagatgggcaagggctacctggccctgtgcagctacaactgcaaggaggccatcaacatcctgagccacctgcccagccaccactacaacaccggctgggtgctgtgccagatcggcagagcctacttcgagctgagcgagtacatgcaggccgagagaatcttcagcgaggtgagaagaatcgagaactacagagtggagggcatggagatctacagcaccaccctgtggcacctgcagaaggacgtggccctgagcgtgctgagcaaggacctgaccgacatggacaagaacagccccgaggcctggtgcgccgccggcaactgcttcagcctgcagagagagcacgacatcgccatcaagttcttccagagagccatccaggtggaccccaactacgcctacgcctacaccctgctgggccacgagttcgtgctgaccgaggagctggacaaggccctggcctgcttcagaaacgccatcagagtgaaccccagacactacaacgcctggtacggcctgggcatgatctactacaagcaggagaagttcagcctggccgagatgcacttccagaaggccctggacatcaacccccagagcagcgtgctgctgtgccacatcggcgtggtgcagcacgccctgaagaagagcgagaaggccctggacaccctgaacaaggccatcgtgatcgaccccaagaaccccctgtgcaagttccacagagccagcgtgctgttcgccaacgagaagtacaagagcgccctgcaggagctggaggagctgaagcagatcgtgcccaaggagagcctggtgtacttcctgatcggcaaggtgtacaagaagctgggccagacccacctggccctgatgaacttcagctgggccatggacctggaccccaagggcgccaacaaccagatcaaggaggccatcgacaagagatacctgcccgacgacgaggagcccatcacccaggaggagcagatcatgggcaccgacgagagccaggagagcagcatgaccgacgccgacgacacccagctgcacgccgccgagagcgacgagttctag

SEQ ID NO: 76175 - DNA, 2292 bp, synthetic construct
  misc_feature 1..2292: note = Description of Artificial Sequence: Synthetic coding sequence
  source 1..2292: mol_type = other DNA
atggccagcaccaagcccctgtgcctgcccagatgcggcttccccagaagaacccccctgtgcagaagactggccgagggcgagcagatcctgagcggcggcgtgttcaacaagcagaagagccacgacgacatcgtgaccgagttcggcgacagcgcctgcttcaccctgagcctgctgggccacgtgtactgcaagaccgacagactggccaagggcagcgagtgctaccagaagagcctgagcctgaaccccttcctgtggagccccttcgagagcctgtgcgagatcggcgagaagcccgaccccgaccagaccttcaagttcaccagcctgcagaacttcagcaactgcctgcccaacagctgcaccacccaggtgcccaaccacagcctgagccacagacagcccgagaccgtgctgaccgagaccccccaggacaccatcgagctgaacagactgaacctggagagcagcaacagcaagtacagcctgaacaccgacagcagcgtgagctacatcgacagcgccgtgatcagccccgacaccgtgcccctgggcaccggcaccagcatcctgagcaagcaggtgcagaacaagcccaagaccggcagaagcctgctgggcggccccgccgccctgagccccctgacccccagcttcggcatcctgcccctggagacccccagccccggcgacggcagctacctgcagaactacaccaacaccccccccgtgatcgacgtgcccagcaccggcgcccccagcaagaagagcgtggccagaatcggccagaccggcaccaagagcgtgttcagccagagcggcaacagcagagaggtgacccccatcctggcccagacccagagcagcggcccccagaccagcaccaccccccaggtgctgagccccaccatcaccagcccccccaacgccctgcccagaagaagcagcagactgttcaccagcgacagcagcaccaccaaggagaacagcaagaagctgaagatgaagttcccccccaagatccccaacagaaagaccaagagcaagaccaacaagggcggcatcacccagcccaacatcaacgacagcctggagatcaccaagctggacagcagcatcatcagcgagggcaagatcagcaccatcaccccccagatccaggccttcaacctgcagaaggccgccgccgagggcctgatgagcctgctgagagagatgggcaagggctacctggccctgtgcagctacaactgcaaggaggccatcaacatcctgagccacctgcccagccaccactacaacaccggctgggtgctgtgccagatcggcagagcctacttcgagctgagcgagtacatgcaggccgagagaatcttcagcgaggtgagaagaatcgagaactacagagtggagggcatggagatctacagcaccaccctgtggcacctgcagaaggacgtggccctgagcgtgctgagcaaggacctgaccgacatggacaagaacagccccgaggcctggtgcgccgccggcaactgcttcagcctgcagagagagcacgacatcgccatcaagttcttccagagagccatccaggtggaccccaactacgcctacgcctacaccctgctgggccacgagttcgtgctgaccgaggagctggacaaggccctggcctgcttcagaaacgccatcagagtgaaccccagacactacaacgcctggtacggcctgggcatgatctactacaagcaggagaagttcagcctggccgagatgcacttccagaaggccctggacatcaacccccagagcagcgtgctgctgtgccacatcggcgtggtgcagcacgccctgaagaagagcgagaaggccctggacaccctgaacaaggccatcgtgatcgaccccaagaaccccctgtgcaagttccacagagccagcgtgctgttcgccaacgagaagtacaagagcgccctgcaggagctggaggagctgaagcagatcgtgcccaaggagagcctggtgtacttcctgatcggcaaggtgtacaagaagctgggccagacccacctggccctgatgaacttcagctgggccatggacctggaccccaagggcgccaacaaccagatcaaggaggccatcgacaagagatacctgcccgacgacgaggagcccatcacccaggaggagcagatcatgggcaccgacgagagccaggagagcagcatgaccgacgccgacgacacccagctgcacgccgccgagagcgacgagttctag

SEQ ID NO: 76176 - DNA, 2472 bp, synthetic construct
  misc_feature 1..2472: note = Description of Artificial Sequence: Synthetic coding sequence
  source 1..2472: mol_type = other DNA
atgaccgtgctgcaggagcccgtgcaggccgccatctggcaggccctgaaccactacgcctacagagacgccgtgttcctggccgagagactgtacgccgaggtgcacagcgaggaggccctgttcctgctggccacctgctactacagaagcggcaaggcctacaaggcctacagactgctgaagggccacagctgcaccaccccccagtgcaagtacctgctggccaagtgctgcgtggacctgagcaagctggccgagggcgagcagatcctgagcggcggcgtgttcaacaagcagaagagccacgacgacatcgtgaccgagttcggcgacagcgcctgcttcaccctgagcctgctgggccacgtgtactgcaagaccgacagactggccaagggcagcgagtgctaccagaagagcctgagcctgaaccccttcctgtggagccccttcgagagcctgtgcgagatcggcgagaagcccgaccccgaccagaccttcaagttcaccagcctgcagaacttcagcaactgcctgcccaacagctgcaccacccaggtgcccaaccacagcctgagccacagacagcccgagaccgtgctgaccgagaccccccaggacaccatcgagctgaacagactgaacctggagagcagcaacagcaagtacagcctgaacaccgacagcagcgtgagctacatcgacagcgccgtgatcagccccgacaccgtgcccctgggcaccggcaccagcatcctgagcaagcaggtgcagaacaagcccaagaccggcagaagcctgctgggcggccccgccgccctgagccccctgacccccagcttcggcatcctgcccctggagacccccagccccggcgacggcagctacctgcagaactacaccaacaccccccccgtgatcgacgtgcccagcaccggcgcccccagcaagaagagcgtggccagaatcggccagaccggcaccaagagcgtgttcagccagagcggcaacagcagagaggtgacccccatcctggcccagacccagagcagcggcccccagaccagcaccaccccccaggtgctgagccccaccatcaccagcccccccaacgccctgcccagaagaagcagcagactgttcaccagcgacagcagcaccaccaaggagaacagcaagaagctgaagatgaagttcccccccaagatccccaacagaaagaccaagagcaagaccaacaagggcggcatcacccagcccaacatcaacgacagcctggagatcaccaagctggacagcagcatcatcagcgagggcaagatcagcaccatcaccccccagatccaggccttcaacctgcagaaggccgccgccggcctgatgagcctgctgagagagatgggcaagggctacctggccctgtgcagctacaactgcaaggaggccatcaacatcctgagccacctgcccagccaccactacaacaccggctgggtgctgtgccagatcggcagagcctacttcgagctgagcgagtacatgcaggccgagagaatcttcagcgaggtgagaagaatcgagaactacagagtggagggcatggagatctacagcaccaccctgtggcacctgcagaaggacgtggccctgagcgtgctgagcaaggacctgaccgacatggacaagaacagccccgaggcctggtgcgccgccggcaactgcttcagcctgcagagagagcacgacatcgccatcaagttcttccagagagccatccaggtggaccccaactacgcctacgcctacaccctgctgggccacgagttcgtgctgaccgaggagctggacaaggccctggcctgcttcagaaacgccatcagagtgaaccccagacactacaacgcctggtacggcctgggcatgatctactacaagcaggagaagttcagcctggccgagatgcacttccagaaggccctggacatcaacccccagagcagcgtgctgctgtgccacatcggcgtggtgcagcacgccctgaagaagagcgagaaggccctggacaccctgaacaaggccatcgtgatcgaccccaagaaccccctgtgcaagttccacagagccagcgtgctgttcgccaacgagaagtacaagagcgccctgcaggagctggaggagctgaagcagatcgtgcccaaggagagcctggtgtacttcctgatcggcaaggtgtacaagaagctgggccagacccacctggccctgatgaacttcagctgggccatggacctggaccccaagggcgccaacaaccagatcaaggaggccatcgacaagagatacctgcccgacgacgaggagcccatcacccaggaggagcagatcatgggcaccgacgagagccaggagagcagcatgaccgacgccgacgacacccagctgcacgccgccgagagcgacgagttctag

SEQ ID NO: 76177 - DNA, 2493 bp, synthetic construct
  misc_feature 1..2493: note = Description of Artificial Sequence: Synthetic coding sequence
  source 1..2493: mol_type = other DNA
atgaccgtgctgcaggagcccgtgcaggccgccatctggcaggccctgaaccactacgcctacagagacgccgtgttcctggccgagagactgtacgccgaggtgcacagcgaggaggccctgttcctgctggccacctgctactacagaagcggcaaggcctacaaggcctacagactgctgaagggccacagctgcaccaccccccagtgcaagtacctgctggccaagtgctgcgtggacctgagcaagctggccgagggcgagcagatcctgagcggcggcgtgttcaacaagcagaagagccacgacgacatcgtgaccgagttcggcgacagcgcctgcttcaccctgagcctgctgggccacgtgtactgcaagaccgacagactggccaagggcagcgagtgctaccagaagagcctgagcctgaaccccttcctgtggagccccttcgagagcctgtgcgagatcggcgagaagcccgaccccgaccagaccttcaagttcaccagcctgcagaacttcagcaactgcctgcccaacagctgcaccacccaggtgcccaaccacagcctgagccacagacagcccgagaccgtgctgaccgagaccccccaggacaccatcgagctgaacagactgaacctggagagcagcaacagcaagtacagcctgaacaccgacagcagcgtgagctacatcgacagcgccgtgatcagccccgacaccgtgcccctgggcaccggcaccagcatcctgagcaagcaggtgcagaacaagcccaagaccggcagaagcctgctgggcggccccgccgccctgagccccctgacccccagcttcggcatcctgcccctggagacccccagccccggcgacggcagctacctgcagaactacaccaacaccccccccgtgatcgacgtgcccagcaccggcgcccccagcaagaagaccttcagagtgctgcagagcgtggccagaatcggccagaccggcaccaagagcgtgttcagccagagcggcaacagcagagaggtgacccccatcctggcccagacccagagcagcggcccccagaccagcaccaccccccaggtgctgagccccaccatcaccagcccccccaacgccctgcccagaagaagcagcagactgttcaccagcgacagcagcaccaccaaggagaacagcaagaagctgaagatgaagttcccccccaagatccccaacagaaagaccaagagcaagaccaacaagggcggcatcacccagcccaacatcaacgacagcctggagatcaccaagctggacagcagcatcatcagcgagggcaagatcagcaccatcaccccccagatccaggccttcaacctgcagaaggccgccgccgagggcctgatgagcctgctgagagagatgggcaagggctacctggccctgtgcagctacaactgcaaggaggccatcaacatcctgagccacctgcccagccaccactacaacaccggctgggtgctgtgccagatcggcagagcctacttcgagctgagcgagtacatgcaggccgagagaatcttcagcgaggtgagaagaatcgagaactacagagtggagggcatggagatctacagcaccaccctgtggcacctgcagaaggacgtggccctgagcgtgctgagcaaggacctgaccgacatggacaagaacagccccgaggcctggtgcgccgccggcaactgcttcagcctgcagagagagcacgacatcgccatcaagttcttccagagagccatccaggtggaccccaactacgcctacgcctacaccctgctgggccacgagttcgtgctgaccgaggagctggacaaggccctggcctgcttcagaaacgccatcagagtgaaccccagacactacaacgcctggtacggcctgggcatgatctactacaagcaggagaagttcagcctggccgagatgcacttccagaaggccctggacatcaacccccagagcagcgtgctgctgtgccacatcggcgtggtgcagcacgccctgaagaagagcgagaaggccctggacaccctgaacaaggccatcgtgatcgaccccaagaaccccctgtgcaagttccacagagccagcgtgctgttcgccaacgagaagtacaagagcgccctgcaggagctggaggagctgaagcagatcgtgcccaaggagagcctggtgtacttcctgatcggcaaggtgtacaagaagctgggccagacccacctggccctgatgaacttcagctgggccatggacctggaccccaagggcgccaacaaccagatcaaggaggccatcgacaagagatacctgcccgacgacgaggagcccatcacccaggaggagcagatcatgggcaccgacgagagccaggagagcagcatgaccgacgccgacgacacccagctgcacgccgccgagagcgacgagttctag

SEQ ID NO: 76178 - DNA, 1740 bp, synthetic construct
  misc_feature 1..1740: note = Description of Artificial Sequence: Synthetic coding sequence
  source 1..1740: mol_type = other DNA
atgagcgccgccatcgccgccctggccgccagctacggcagcggcagcggcagcgagagcgacagcgacagcgagagcagcagatgccccctgcccgccgccgacagcctgatgcacctgaccaagagccccagcagcaagcccagcctggccgtggccgtggacagcgcccccgaggtggccgtgaaggaggacctggagaccggcgtgcacctggaccccgccgtgaaggaggtgcagtacaaccccacctacgagaccatgttcgcccccgagttcggccccgagaaccccttcagaacccagcagatggccgcccccagaaacatgctgagcggctacgccgagcccgcccacatcaacgacttcatgttcgagcagcagagaagaaccttcgccacctacggctacgccctggaccccagcctggacaaccaccaggtgagcgccaagtacatcggcagcgtggaggaggccgagaagaaccagggcctgaccgtgttcgagaccggccagaagaagaccgagaagagaaagaagttcaaggagaacgacgccagcaacatcgacggcttcctgggcccctgggccaagtacgtggacgagaaggacgtggccaagcccagcgaggaggagcagaaggagctggacgagatcaccgccaagagacagaagaagggcaagcaggaggaggagaagcccggcgaggagaagaccatcctgcacgtgaaggagatgtacgactaccagggcagaagctacctgcacatcccccaggacgtgggcgtgaacctgagaagcaccatgccccccgagaagtgctacctgcccaagaagcagatccacgtgtggagcggccacaccaagggcgtgagcgccgtgagactgttccccctgagcggccacctgctgctgagctgcagcatggactgcaagatcaagctgtgggaggtgtacggcgagagaagatgcctgagaaccttcatcggccacagcaaggccgtgagagacatctgcttcaacaccgccggcacccagttcctgagcgccgcctacgacagatacctgaagctgtgggacaccgagaccggccagtgcatcagcagattcaccaacagaaaggtgccctactgcgtgaagttcaaccccgacgaggacaagcagaacctgttcgtggccggcatgagcgacaagaagatcgtgcagtgggacatcagaagcggcgagatcgtgcaggagtacgacagacacctgggcgccgtgaacaccatcgtgttcgtggacgagaacagaagattcgtgagcaccagcgacgacaagagcctgagagtgtgggagtgggacatccccgtggacttcaagtacatcgccgagcccagcatgcacagcatgcccgccgtgaccctgagccccaacggcaagtggctggcctgccagagcatggacaaccagatcctgatcttcggcgcccagaacagattcagactgaacaagaagaagatcttcaagggccacatggtggccggctacgcctgccaggtggacttcagccccgacatgagctacgtgatcagcggcgacggcaacggcaagctgaacatctgggactggaagaccaccaagctgtacagcagattcaaggcccacgacaaggtgtgcatcggcgccgtgtggcacccccacgagaccagcaaggtgatcacctgcggctgggacggcctgatcaagctgtgggactag

SEQ ID NO: 76179 - DNA, 1620 bp, synthetic construct
  misc_feature 1..1620: note = Description of Artificial Sequence: Synthetic coding sequence
  source 1..1620: mol_type = other DNA
atgagcgccgccatcgccgccctggccgccagctacggcagcggcagcggcagcgagagcgacagcgacagcgagagcagcagatgccccctgcccgccgccgacagcctgatgcacctgaccaagagccccagcagcaagcccagcctggccgtggccgtggacagcgcccccgaggtggccgtgaaggaggacctggagaccggcgtgcacctggaccccgccgtgaaggaggtgcagtacaaccccacctacgagaccatgttcgcccccgagttcggccccgagaaccccttcagaacccagcagatggccgcccccagaaacatgctgagcggctacgccgagcccgcccacatcaacgacttcatgttcgagcagcagagaagaaccttcgccacctacggctacgccctggaccccagcctggacaaccaccaggtgagcgccaagtacatcggcagcgtggaggaggccgagaagaaccagggcctgaccgtgttcgagaccggccagaagaagaccgagaagagaaagaagttcaaggagaacgacgccagcaacatcgacggcttcctgggcccctgggccaagtacgtggacgagaaggacgtggccaagcccagcgaggaggagcagaaggagctggacgagatcaccgccaagagacagaagaagggcaagcaggaggaggagaagcccggcgaggagaagaccatcctgcacgtgaaggagatgtacgactaccagggcagaagctacctgcacatcccccaggacgtgggcgtgaacctgagaagcaccatgccccccgagaagtgctacctgcccaagaagcagatccacgtgtggagcggccacaccaagggcgtgagcgccgtgagactgttccccctgagcggccacctgctgctgagctgcagcatggactgcaagatcaagctgtgggaggtgtacggcgagagaagatgcctgagaaccttcatcggccacagcaaggccgtgagagacatctgcttcaacaccgccggcacccagttcctgagcgccgcctacgacagatacctgaagctgtgggacaccgagaccggccagtgcatcagcagattcaccaacagaaaggtgccctactgcgtgaagttcaaccccgacgaggacaagcagaacctgttcgtggccggcatgagcgacaagaagatcgtgcagtgggacatcagaagcggcgagatcgtgcaggagtacgacagacacctgggcgccgtgaacaccatcgtgttcgtggacgagaacagaagattcgtgagcaccagcgacgacaagagcctgagagtgtgggagtgggacatccccgtggacttcaagtacatcgccgagcccagcatgcacagcatgcccgccgtgaccctgagccccaacggcaagtggctggcctgccagagcatggacaaccagatcctgatcttcggcgcccagaacagattcagactgaacaagaagaagatcttcaagggccacatggtggccggctacgcctgccaggtggacttcagccccgacatgagagtgccccagagcttccagaacctgaaggaggtgaccgccggcccccaggagggctag

SEQ ID NO: 76180 - DNA, 1740 bp, synthetic construct; identical to SEQ ID NO: 76178
  misc_feature 1..1740: note = Description of Artificial Sequence: Synthetic coding sequence
  source 1..1740: mol_type = other DNA

SEQ ID NO: 76181 - DNA, 1620 bp, synthetic construct; identical to SEQ ID NO: 76179
  misc_feature 1..1620: note = Description of Artificial Sequence: Synthetic coding sequence
  source 1..1620: mol_type = other DNA

SEQ ID NO: 76182 - DNA, 378 bp, synthetic construct
  misc_feature 1..378: note = Description of Artificial Sequence: Synthetic coding sequence
  source 1..378: mol_type = other DNA
tgaaacatgctgagcggctacgccgagcccgcccacatcaacgacttcatgttcgagcagcagagaagaaccttcgccacctacggctacgccctggaccccagcctggacaaccaccaggtgagcgccaagtacatcggcagcgtggaggaggccgagaagaaccagggcctgaccgtgttcgagaccggccagaagaagaccgagaagagaaagaagttcaaggagaacgacgccagcaacatcgacggcttcctgggcccctgggccaagtacgtggacgagaaggacgtggccaagcccagcgaggtgagcttcgacgtgttcaactgccagttcagatacaccctgtacctgtacgagggctacctgcactag

SEQ ID NO: 76183 - DNA, 495 bp, synthetic construct
  misc_feature 1..495: note = Description of Artificial Sequence: Synthetic coding sequence
  source 1..495: mol_type = other DNA
atgagcgccgccatcgccgccctggccgccagctacggcagcggcagcggcagcgagagcgacagcgacagcgagagcagcagatgccccctgcccgccgccgacagcctgatgcacctgaccaagagccccagcagcaagcccagcctggccgtggccgtggacagcgcccccgaggtggccgtgaaggaggacctggagaccggcgtgcacctggaccccgccgtgaaggaggtgcagtacaaccccacctacgagaccatgttcgcccccgagttcggccccgagaaccccttcagaacccagcagatggccgcccccagaaacatgctgagcggctacgccgagcccgcccacatcaacgacttcatgttcgagcagcagagaagaaccttcgccacctacggctacgccctggaccccagcctggacaaccaccaggtgagcgccaagtacatcggcagcgtggaggaggccgagaagatcaaggtgtag

SEQ ID NO: 76184 - DNA, 213 bp, synthetic construct
  misc_feature 1..213: note = Description of Artificial Sequence: Synthetic coding sequence
  source 1..213: mol_type = other DNA
atggccgcccccagaaacatgctgagcggctacgccgagcccgcccacatcaacgacttcatgttcgagcagcagagaagaaccttcgccacctacggctacgccctggaccccagcctggacaaccaccaggtgagcgccaagtacatcggcagcgtggaggaggccgagaagaaccagggcctgaccgtgttcgagaccggccagaagtag

SEQ ID NO: 76185 - DNA, 1305 bp, synthetic construct
  misc_feature 1..1305: note = Description of Artificial Sequence: Synthetic coding sequence
  source 1..1305: mol_type = other DNA
atgagcatcctgaagatccacgccagagagatcttcgacagcagaggcaaccccaccgtggaggtggacctgttcaccagcaagggcctgttcagagccgccgtgcccagcggcgccagcaccggcatctacgaggccctggagctgagagacaacgacaagaccagatacatgggcaagggcgtgagcaaggccgtggagcacatcaacaagaccatcgcccccgccctggtgagcaagaagctgaacgtgaccgagcaggagaagatcgacaagctgatgatcgagatggacggcaccgagaacaagagcaagttcggcgccaacgccatcctgggcgtgagcctggccgtgtgcaaggccggcgccgtggagaagggcgtgcccctgtacagacacatcgccgacctggccggcaacagcgaggtgatcctgcccgtgcccgccttcaacgtgatcaacggcggcagccacgccggcaacaagctggccatgcaggagttcatgatcctgcccgtgggcgccgccaacttcagagaggccatgagaatcggcgccgaggtgtaccacaacctgaagaacgtgatcaaggagaagtacggcaaggacgccaccaacgtgggcgacgagggcggcttcgcccccaacatcctggagaacaaggagggcctggagctgctgaagaccgccatcggcaaggccggctacaccgacaaggtggtgatcggcatggacgtggccgccagcgagttcttcagaagcggcaagtacgacctggacttcaagagccccgacgaccccagcagatacatcagccccgaccagctggccgacctgtacaagagcttcatcaaggactaccccgtggtgagcatcgaggaccccttcgaccaggacgactggggcgcctggcagaagttcaccgccagcgccggcatccaggtggtgggcgacgacctgaccgtgaccaaccccaagagaatcgccaaggccgtgaacgagaagagctgcaactgcctgctgctgaaggtgaaccagatcggcagcgtgaccgagagcctgcaggcctgcaagctggcccaggccaacggctggggcgtgatggtgagccacagaagcggcgagaccgaggacaccttcatcgccgacctggtggtgggcctgtgcaccggccagatcaagaccggcgccccctgcagaagcgagagactggccaagtacaaccagctgctgagaatcgaggaggagctgggcagcaaggccaagttcgccggcagaaacttcagaaaccccctggccaagtag

SEQ ID NO: 76186 - DNA, 360 bp, synthetic construct
  misc_feature 1..360: note = Description of Artificial Sequence: Synthetic coding sequence
  source 1..360: mol_type = other DNA
atgagaaagaccgccagcagctgccccgccagcctgacctgcgactgctacgccaccgacaaggtgtgcagcatctgcctgagcagaagacagcaggtggcccccagagccggcacccccggcttcagagcccccgaggtgctgaccaagtgccccaaccagaccaccggcaagagcatcctgtgcagcaaggaggtgcccgcccaggacctgagaaagctgtgcgagagactgagaggcatggacagcagcacccccaagctgaccagcgacatccagggccacgccagccaccagcccgccatcagcgagaagaccgaccacaaggccagctgcctggtgcagaccccccccggctag

SEQ ID NO: 76187 - DNA, 474 bp, synthetic construct
  misc_feature 1..474: note = Description of Artificial Sequence: Synthetic coding sequence
  source 1..474: mol_type = other DNA
atggaggccagcctgggcatccagatggacgagcccatggccttcagcccccagagagacagattccaggccgagggcagcctgaagaagaacgagcagaacttcaagctggccggcgtgaagaaggacatcgagaagctgtacgaggccgtgccccagctgagcaacgtgttcaagatcgaggacaagatcggcgagggcaccttcagcagcgtgtacctggccaccgcccagctgcaggtgggccccgaggagaagatcgccctgaagcacctgatccccaccagccaccccatcagaatcgccgccgagctgcagtgcctgaccgtggccggcggccaggacaacgtgatgggcgtgaagtactgcttcagaaagaacgaccacgtggtgatcgccatgccctacctggagcacgagagcttcctggacatcctgaacagcctgagcttccaggaggtgagagagtactag

SEQ ID NO: 76188 - DNA, 1725 bp, synthetic construct
  misc_feature 1..1725: note = Description of Artificial Sequence: Synthetic coding sequence
  source 1..1725: mol_type = other DNA
atggaggccagcctgggcatccagatggacgagcccatggccttcagcccccagagagacagattccaggccgagggcagcctgaagaagaacgagcagaacttcaagctggccggcgtgaagaaggacatcgagaagctgtacgaggccgtgccccagctgagcaacgtgttcaagatcgaggacaagatcggcgagggcaccttcagcagcgtgtacctggccaccgcccagctgcaggtgggccccgaggagaagatcgccctgaagcacctgatccccaccagccaccccatcagaatcgccgccgagctgcagtgcctgaccgtggccggcggccaggacaacgtgatgggcgtgaagtactgcttcagaaagaacgaccacgtggtgatcgccatgccctacctggagcacgagagcttcctggacatcctgaacagcctgagcttccaggaggtgagagagtacatgctgaacctgttcaaggccctgaagagaatccaccagttcggcatcgtgcacagagacgtgaagcccagcaacttcctgtacaacagaagactgaagaagtacgccctggtggacttcggcctggcccagggcacccacgacaccaagatcgagctgctgaagttcgtgcagagcgaggcccagcaggagagatgcagccagaacaagagccacatcatcaccggcaacaagatccccctgagcggccccgtgcccaaggagctggaccagcagagcaccaccaaggccagcgtgaagagaccctacaccaacgcccagatccagatcaagcagggcaaggacggcaaggagggcagcgtgggcctgagcgtgcagagaagcgtgttcggcgagagaaacttcaacatccacagcagcatcagccacgagagccccgccgtgaagctgatgaagcagagcaagaccgtggacgtgctgagcagaaagctggccaccaagaagaaggccatcagcaccaaggtgatgaacagcgccgtgatgagaaagaccgccagcagctgccccgccagcctgacctgcgactgctacgccaccgacaaggtgtgcagcatctgcctgagcagaagacagcaggtggcccccagagccggcacccccggcttcagagcccccgaggtgctgaccaagtgccccaaccagaccaccgccatcgacatgtggagcgccggcgtgatcttcctgagcctgctgagcggcagataccccttctacaaggccagcgacgacctgaccgccctggcccagatcatgaccatcagaggcagcagagagaccatccaggccgccaagaccttcggcaagagcatcctgtgcagcaaggaggtgcccgcccaggacctgagaaagctgtgcgagagactgagaggcatggacagcagcacccccaagctgaccagcgacatccagggccacgccagccaccagcccgccatcagcgagaagaccgaccacaaggccagctgcctggtgcagaccccccccggccagtacagcggcaacagcttcaagaagggcgacagcaacagctgcgagcactgcttcgacgagtacaacaccaacctggagggctggaacgaggtgcccgacgaggcctacgacctgctggacaagctgctggacctgaaccccgccagcagaatcaccgccgaggaggccctgctgcaccccttcttcaaggacatgagcctgtag

SEQ ID NO: 76189 - DNA, 1641 bp, synthetic construct
  misc_feature 1..1641: note = Description of Artificial Sequence: Synthetic coding sequence
  source 1..1641: mol_type = other DNA
atggaggccagcctgggcatccagatggacgagcccatggccttcagcccccagagagacagattccaggccgagggcagcctgaagaagaacgagcagaacttcaagctggccggcaccttcagcagcgtgtacctggccaccgcccagctgcaggtgggccccgaggagaagatcgccctgaagcacctgatccccaccagccaccccatcagaatcgccgccgagctgcagtgcctgaccgtggccggcggccaggacaacgtgatgggcgtgaagtactgcttcagaaagaacgaccacgtggtgatcgccatgccctacctggagcacgagagcttcctggacatcctgaacagcctgagcttccaggaggtgagagagtacatgctgaacctgttcaaggccctgaagagaatccaccagttcggcatcgtgcacagagacgtgaagcccagcaacttcctgtacaacagaagactgaagaagtacgccctggtggacttcggcctggcccagggcacccacgacaccaagatcgagctgctgaagttcgtgcagagcgaggcccagcaggagagatgcagccagaacaagagccacatcatcaccggcaacaagatccccctgagcggccccgtgcccaaggagctggaccagcagagcaccaccaaggccagcgtgaagagaccctacaccaacgcccagatccagatcaagcagggcaaggacggcaaggagggcagcgtgggcctgagcgtgcagagaagcgtgttcggcgagagaaacttcaacatccacagcagcatcagccacgagagccccgccgtgaagctgatgaagcagagcaagaccgtggacgtgctgagcagaaagctggccaccaagaagaaggccatcagcaccaaggtgatgaacagcgccgtgatgagaaagaccgccagcagctgccccgccagcctgacctgcgactgctacgccaccgacaaggtgtgcagcatctgcctgagcagaagacagcaggtggcccccagagccggcacccccggcttcagagcccccgaggtgctgaccaagtgccccaaccagaccaccgccatcgacatgtggagcgccggcgtgatcttcctgagcctgctgagcggcagataccccttctacaaggccagcgacgacctgaccgccctggcccagatcatgaccatcagaggcagcagagagaccatccaggccgccaagaccttcggcaagagcatcctgtgcagcaaggaggtgcccgcccaggacctgagaaagctgtgcgagagactgagaggcatggacagcagcacccccaagctgaccagcgacatccagggccacgccagccaccagcccgccatcagcgagaagaccgaccacaaggccagctgcctggtgcagaccccccccggccagtacagcggcaacagcttcaagaagggcgacagcaacagctgcgagcactgcttcgacgagtacaacaccaacctggagggctggaacgaggtgcccgacgaggcctacgacctgctggacaagctgctggacctgaaccccgccagcagaatcaccgccgaggaggccctgctgcaccccttcttcaaggacatgagcctgtag

SEQ ID NO: 76190 - DNA, 3453 bp, synthetic construct
  misc_feature 1..3453: note = Description of Artificial Sequence: Synthetic coding sequence
  source 1..3453: mol_type = other DNA
atggcccagttcggcggccagaagaaccccccctgggccacccagttcaccgccaccgccgtgagccagcccgccgccctgggcgtgcagcagcccagcctgctgggcgccagccccaccatctacacccagcagaccgccctggccgccgccggcctgaccacccagacccccgccaactaccagctgacccagaccgccgccctgcagcagcaggccgccgccgccgccgccgccctgcagcagcagtacagccagccccagcaggccctgtacagcgtgcagcagcagctgcagcagccccagcagaccctgctgacccagcccgccgtggccctgcccaccagcctgagcctgagcaccccccagcccaccgcccagatcaccgtgagctaccccacccccagaagcagccagcagcagacccagccccagaagcagagagtgttcaccggcgtggtgaccaagctgcacgacaccttcggcttcgtggacgaggacgtgttcttccagctgagcgccgtgaagggcaagaccccccaggtgggcgacagagtgctggtggaggccacctacaaccccaacatgcccttcaagtggaacgcccagagaatccagaccctgcccaaccagaaccagagccagacccagcccctgctgaagaccccccccgccgtgctgcagcccatcgccccccagaccaccttcggcgtgcagacccagccccagccccagagcctgctgcaggcccagatcagcgccgccagcatcacccccctgctgcagacccagccccagcccctgctgcagcagccccagcagaaggccggcctgctgcagccccccgtgagaatcgtgagccagccccagcccgccagaagactggacccccccagcagattcagcggcagaaacgacagaggcgaccaggtgcccaacagaaaggacgacagaagcagagagagagagagagagagaagaagaagcagagagagaagcccccagagaaagagaagcagagagagaagccccagaagagagagagagagaagccccagaagagtgagaagagtggtgcccagatacaccgtgcagttcagcaagttcagcctggactgccccagctgcgacatgatggagctgagaagaagataccagaacctgtacatccccagcgacttcttcgacgcccagttcacctgggtggacgccttccccctgagcagacccttccagctgggcaactactgcaacttctacgtgatgcacagagaggtggagagcctggagaagaacatggccatcctggacccccccgacgccgaccacctgtacagcgccaaggtgatgctgatggccagccccagcatggaggacctgtaccacaagagctgcgccctggccgaggacccccaggagctgagagacggcttccagcaccccgccagactggtgaagttcctggtgggcatgaagggcaaggacgaggccatggccatcggcggccactggagccccagcctggacggccccgaccccgagaaggaccccagcgtgctgatcaagaccgccatcagatgctgcaaggccctgaccggcatcgacctgagcgtgtgcacccagtggtacagattcgccgagatcagataccacagacccgaggagacccacaagggcagaaccgtgcccgcccacgtggagaccgtggtgctgttcttccccgacgtgtggcactgcctgcccaccagaagcgagtgggagaccctgagcagaggctacaagcagcagctggtggagaagctgcagggcgagagaaaggaggccgacggcgagcaggacgaggaggagaaggacgacggcgaggccaaggagatcagcacccccacccactggagcaagctggaccccaagaccatgaaggtgaacgacctgagaaaggagctggagagcagagccctgagcagcaagggcctgaagagccagctgatcgccagactgaccaagcagctgaaggtggaggagcagaaggaggagcagaaggagctggagaagagcgagaaggaggaggacgaggacgacgacagaaagagcgaggacgacaaggaggaggaggagagaaagagacaggaggagatcgagagacagagaagagagagaagatacatcctgcccgacgagcccgccatcatcgtgcaccccaactgggccgccaagagcggcaagttcgactgcagcatcatgagcctgagcgtgctgctggactacagactggaggacaacaaggagcacagcttcgaggtgagcctgttcgccgagctgttcaacgagatgctgcagagagacttcggcgtgagaatctacaagagcctgctgagcctgcccgagaaggaggacaagaaggagaaggacaagaagagcaagaaggacgagagaaaggacaagaaggaggagagagacgacgagaccgacgagcccaagcccaagagaagaaagagcggcgacgacaaggacaagaaggaggacagagacgagagaaagaaggaggacaagagaaaggacgacagcaaggacgacgacgagaccgaggaggacaacaaccaggacgagtacgaccccatggaggccgaggaggccgaggacgaggaggacgacagagacgaggaggagatgaccaagagagacgacaagagagacatcaacagatactgcaaggagagacccagcaaggacaaggagaaggagaagacccagatgatcaccatcaacagagacctgctgatggccttcgtgtacttcgaccagagccactgcggctacctgctggagaaggacctggaggagatcctgtacaccctgggcctgcacctgagcagagcccaggtgaagaagctgctgaacaaggtggtgctgagagagagctgcttctacagaaagctgaccgacaccagcaaggacgaggagaaccacgaggagagcgagagcctgcaggaggacatgctgggcaacagactgctgctgcccacccccaccgtgaagcaggagagcaaggacgtggaggagaacgtgggcctgatcgtgtacaacggcgccatggtggacgtgggcagcctgctgcagaagctggagaagagcgagaaggtgagagccgaggtggagcagaagctgcagctgctggaggagaagaccgacgaggacgagaagaccatcctgaacctggagaacagcaacaagagcctgagcggcgagctgagagaggtgaagaaggacctgagccagctgcaggagaacctgaagatcagcgagaacatgaacctgcagttcgagaaccagatgaacaagaccatcagaaacctgagcaccgtgatggacgagatccacaccgtgctgaagaaggacaacgtgaagaacgaggacaaggaccagaagagcaaggagaacggcgccagcgtgtag

SEQ ID NO: 76191 - DNA, 3408 bp, synthetic construct
  misc_feature 1..3408: note = Description of Artificial Sequence: Synthetic coding sequence
  source 1..3408: mol_type = other DNA
atggcccagttcggcggccagaagaaccccccctgggccacccagttcaccgccaccgccgtgagccagcccgccgccctgggcgtgcagcagcccagcctgctgggcgccagccccaccatctacacccagcagaccgccctggccgccgccggcctgaccacccagacccccgccaactaccagctgacccagaccgccgccctgcagcagcaggccgccgccgccgccgccgccctgcagcagctgcagcagccccagcagaccctgctgacccagcccgccgtggccctgcccaccagcctgagcctgagcaccccccagcccaccgcccagatcaccgtgagctaccccacccccagaagcagccagcagcagacccagccccagaagcagagagtgttcaccggcgtggtgaccaagctgcacgacaccttcggcttcgtggacgaggacgtgttcttccagctgagcgccgtgaagggcaagaccccccaggtgggcgacagagtgctggtggaggccacctacaaccccaacatgcccttcaagtggaacgcccagagaatccagaccctgcccaaccagaaccagagccagacccagcccctgctgaagaccccccccgccgtgctgcagcccatcgccccccagaccaccttcggcgtgcagacccagccccagccccagagcctgctgcaggcccagatcagcgccgccagcatcacccccctgctgcagacccagccccagcccctgctgcagcagccccagcagaaggccggcctgctgcagccccccgtgagaatcgtgagccagccccagcccgccagaagactggacccccccagcagattcagcggcagaaacgacagaggcgaccaggtgcccaacagaaaggacgacagaagcagagagagagagagagagagaagaagaagcagagagagaagcccccagagaaagagaagcagagagagaagccccagaagagagagagagagaagccccagaagagtgagaagagtggtgcccagatacaccgtgcagttcagcaagttcagcctggactgccccagctgcgacatgatggagctgagaagaagataccagaacctgtacatccccagcgacttcttcgacgcccagttcacctgggtggacgccttccccctgagcagacccttccagctgggcaactactgcaacttctacgtgatgcacagagaggtggagagcctggagaagaacatggccatcctggacccccccgacgccgaccacctgtacagcgccaaggtgatgctgatggccagccccagcatggaggacctgtaccacaagagctgcgccctggccgaggacccccaggagctgagagacggcttccagcaccccgccagactggtgaagttcctggtgggcatgaagggcaaggacgaggccatggccatcggcggccactggagccccagcctggacggccccgaccccgagaaggaccccagcgtgctgatcaagaccgccatcagatgctgcaaggccctgaccggcatcgacctgagcgtgtgcacccagtggtacagattcgccgagatcagataccacagacccgaggagacccacaagggcagaaccgtgcccgcccacgtggagaccgtggtgctgttcttccccgacgtgtggcactgcctgcccaccagaagcgagtgggagaccctgagcagaggctacaagcagcagctggtggagaagctgcagggcgagagaaaggaggccgacggcgagcaggacgaggaggagaaggacgacggcgaggccaaggagatcagcacccccacccactggagcaagctggaccccaagaccatgaaggtgaacgacctgagaaaggagctggagagcagagccctgagcagcaagggcctgaagagccagctgatcgccagactgaccaagcagctgaaggtggaggagcagaaggaggagcagaaggagctggagaagagcgagaaggaggaggacgaggacgacgacagaaagagcgaggacgacaaggaggaggaggagagaaagagacaggaggagatcgagagacagagaagagagagaagatacatcctgcccgacgagcccgccatcatcgtgcaccccaactgggccgccaagagcggcaagttcgactgcagcatcatgagcctgagcgtgctgctggactacagactggaggacaacaaggagcacagcttcgaggtgagcctgttcgccgagctgttcaacgagatgctgcagagagacttcggcgtgagaatctacaagagcctgctgagcctgcccgagaaggaggacaagaaggagaaggacaagaagagcaagaaggacgagagaaaggacaagaaggaggagagagacgacgagaccgacgagcccaagcccaagagaagaaagagcggcgacgacaaggacaagaaggaggacagagacgagagaaagaaggaggacaagagaaaggacgacagcaaggacgacgacgagaccgaggaggacaacaaccaggacgagtacgaccccatggaggccgaggaggccgaggacgaggaggacgacagagacgaggaggagatgaccaagagagacgacaagagagacatcaacagatactgcaaggagagacccagcaaggacaaggagaaggagaagacccagatgatcaccatcaacagagacctgctgatggccttcgtgtacttcgaccagagccactgcggctacctgctggagaaggacctggaggagatcctgtacaccctgggcctgcacctgagcagagcccaggtgaagaagctgctgaacaaggtggtgctgagagagagctgcttctacagaaagctgaccgacaccagcaaggacgaggagaaccacgaggagagcgagagcctgcaggaggacatgctgggcaacagactgctgctgcccacccccaccgtgaagcaggagagcaaggacgtggaggagaacgtgggcctgatcgtgtacaacggcgccatggtggacgtgggcagcctgctgcagaagctggagaagagcgagaaggtgagagccgaggtggagcagaagctgcagctgctggaggagaagaccgacgaggacgagaagaccatcctgaacctggagaacagcaacaagagcctgagcggcgagctgagagaggtgaagaaggacctgagccagctgcaggagaacctgaagatcagcgagaacatgaacctgcagttcgagaaccagatgaacaagaccatcagaaacctgagcaccgtgatggacgagatccacaccgtgctgaagaaggacaacgtgaagaacgaggacaaggaccagaagagcaaggagaacggcgccagcgtgtag

SEQ ID NO: 76192 - DNA, 360 bp, synthetic construct
  misc_feature 1..360: note = Description of Artificial Sequence: Synthetic coding sequence
  source 1..360: mol_type = other DNA
atggcccagttcggcggccagaagaaccccccctgggccacccagttcaccgccaccgccgtgagccagcccgccgccctgggcgtgcagcagcccagcctgctgggcgccagccccaccatctacacccagcagaccgccctggccgccgccggcctgaccacccagacccccgccaactaccagctgacccagaccgccgccctgcagcagcaggccgccgccgccgccgccgccctgcagcagcagtacagccagccccagcaggccctgtacagcgtgcagcagcagctgcagcagccccagcagaccctgctgacccagcccgccgtggccctgcccaccagcctgagcctgtag

SEQ ID NO: 76193 - DNA, 516 bp, synthetic construct
  misc_feature 1..516: note = Description of Artificial Sequence: Synthetic coding sequence
  source 1..516: mol_type = other DNA
atggcccagttcggcggccagaagaaccccccctgggccacccagttcaccgccaccgccgtgagccagcccgccgccctgggcgtgcagcagcccagcctgctgggcgccagccccaccatctacacccagcagaccgccctggccgccgccggcctgaccacccagacccccgccaactaccagctgacccagaccgccgccctgcagcagcaggccgccgccgccgccgccgccctgcagcagcagtacagccagccccagcaggccctgtacagcgtgcagcagcagctgcagcagccccagcagaccctgctgacccagcccgccgtggccctgcccaccagcctgagcctgagcaccccccagcccaccgcccagatcaccgtgagctaccccacccccagaagcagccagcagcagacccagccccagaagcagagagtgttcaccggcgtggtgaccaagctgcacgacaccttcggcttcgtggacgaggacgtgttcttccagtag

SEQ ID NO: 76194 - DNA, 3132 bp, synthetic construct
  misc_feature 1..3132: note = Description of Artificial Sequence: Synthetic coding sequence
  source 1..3132: mol_type = other DNA
atggcccagttcggcggccagaagaaccccccctgggccacccagttcaccgccaccgccgtgagccagcccgccgccctgggcgtgcagcagcccagcctgctgggcgccagccccaccatctacacccagcagaccgccctggccgccgccggcctgaccacccagacccccgccaactaccagctgacccagaccgccgccctgcagcagcaggccgccgccgccgccgccgccctgcagcagctgcagcagccccagcagaccctgctgacccagcccgccgtggccctgcccaccagcctgagcctgagcaccccccagcccaccgcccagatcaccgtgagctaccccacccccagaagcagccagcagcagacccagccccagaagcagagagtgttcaccggcgtggtgaccaagctgcacgacaccttcggcttcgtggacgaggacgtgttcttccagctgagcgccgtgaagggcaagaccccccaggtgggcgacagagtgctggtggaggccacctacaaccccaacatgcccttcaagtggaacgcccagagaatccagaccctgcccaaccagaaccagagccagacccagcccctgctgaagaccccccccgccgtgctgcagcccatcgccccccagaccaccttcggcgtgcagacccagccccagccccagagcctgctgcaggcccagatcagcgccgccagcatcacccccctgctgcagacccagccccagcccctgctgcagcagccccagcagaaggccggcctgctgcagccccccgtgagaatcgtgagccagccccagcccgccagaagactggacccccccagcagattcagcggcagaaacgacagaggcgaccaggtgcccaacagaaaggacgacagaagcagagagagagagagagagagaagaagaagcagagagagaagcccccagagaaagagaagcagagagagaagccccagaagagagagagagagaagccccagaagagtgagaagagtggtgcccagatacaccgtgcagttcagcaagttcagcctggactgccccagctgcgacatgatggagctgagaagaagataccagaacctgtacatccccagcgacttcttcgacgcccagttcacctgggtggacgccttccccctgagcagacccttccagctgggcaactactgcaacttctacgtgatgcacagagaggtggagagcctggagaagaacatggccatcctggacccccccgacgccgaccacctgtacagcgccaaggtgatgctgatggccagccccagcatggaggacctgtaccacaagagctgcgccctggccgaggacccccaggagctgagagacggcttccagcaccccgccagactggtgaagttcctggtgggcatgaagggcaaggacgaggccatggccatcggcggccactggagccccagcctggacggccccgaccccgagaaggaccccagcgtgctgatcaagaccgccatcagatgctgcaaggccctgaccggcatcgacctgagcgtgtgcacccagtggtacagattcgccgagatcagataccacagacccgaggagacccacaagggcagaaccgtgcccgcccacgtggagaccgtggtgctgttcttccccgacgtgtggcactgcctgcccaccagaagcgagtgggagaccctgagcagaggctacaagcagcagctggtggagaagctgcagggcgagagaaaggaggccgacggcgagcaggacgaggaggagaaggacgacggcgaggccaaggagatcagcacccccacccactggagcaagctggaccccaagaccatgaaggtgaacgacctgagaaaggagctggagagcagagccctgagcagcaagggcctgaagagccagctgatcgccagactgaccaagcagctgaaggtggaggagcagaaggaggagcagaaggagctggagaagagcgagaaggaggaggacgaggacgacgacagaaagagcgaggacgacaaggaggaggaggagagaaagagacaggaggagatcgagagacagagaagagagagaagatacatcctgcccgacgagcccgccatcatcgtgcaccccaactgggccgccaagagcggcaagttcgactgcagcatcatgagcctgagcgtgctgctggactacagactggaggacaacaaggagcacagcttcgaggtgagcctgttcgccgagctgttcaacgagatgctgcagagagacttcggcgtgagaatctacaagagcctgctgagcctgcccgagaaggaggacaagaaggagaaggacaagaagagcaagaaggacgagagaaaggacaagaaggaggagagagacgacgagaccgacgagcccaagcccaagagaagaaagagcggcgacgacaaggacaagaaggaggacagagacgagagaaagaaggaggacaagagaaaggacgacagcaaggacgacgacgagaccgaggaggacaacaaccaggacgagtacgaccccatggaggccgaggaggccgaggacgaggaggacgacagagacgaggaggagatgaccaagagagacgacaagagagacatcaacagatactgcaaggagagacccagcaaggacaaggagaaggagaagacccagatgatcaccatcaacagagacctgctgatggccttcgtgtacttcgaccagagccactgcggctacctgctggagaaggacctggaggagatcctgtacaccctgggcctgcacctgagcagagcccaggtgaagaagctgctgaacaaggtggtgctgagagagagctgcttctacagaaagctgaccgacaccagcaaggacgaggagaaccacgaggagagcgagagcctgcaggaggacatgctgggcaacagactgctgctgcccacccccaccgtgaagcaggagagcaaggacgtggaggagaacgtgggcctgatcgtgtacaacggcgccatggtggacgtgggcagcctgctgcagaagctggagaagagcgagaaggtgagagccgaggtggagcagaagctgcagctgctgtag

SEQ ID NO: 76195 - DNA, 726 bp, synthetic construct
  misc_feature 1..726: note = Description of Artificial Sequence: Synthetic coding sequence
  source 1..726: mol_type = other DNA
atgttcgccagaggcctgaagagaaagtgcgtgggccacgaggaggacgtggagggcgccctggccggcctgaagaccgtgagcagctacagcctgcagagacagagcctgctggacatgagcctggtgaagctgcagctgtgccacatgctggtggagcccaacctgtgcagaagcgtgctgatcgccaacaccgtgagacagatccaggaggagatgacccaggacggcacctggagaaccgtggccccccaggccgccgagagagcccccctggacagactggtgagcaccgagatcctgtgcagagccgcctggggccaggagggcgcccaccccgcccccggcctgggcgacggccacacccagggccccgtgagcgacctgtgccccgtgaccagcgcccaggcccccagacacctgcagagcagcgcctgggagatggacggccccagagagaacagaggcagcttccacaagagcctggaccagatcttcgagaccctggagaccaagaaccccagctgcatggaggagctgttcagcgacgtggacagcccctactacgacctggacaccgtgctgaccggcatgatgggcggcgccagacccggcccctgcgagggcctggagggcctggcccccgccacccccggccccagcagcagctgcaagagcgacctgggcgagctggaccacgtggtggagatcctggtggagacctag

SEQ ID NO: 76196 - DNA, 726 bp, synthetic construct; identical to SEQ ID NO: 76195
  misc_feature 1..726: note = Description of Artificial Sequence: Synthetic coding sequence
  source 1..726: mol_type = other DNA

SEQ ID NO: 76197 - DNA, 759 bp, synthetic construct
  misc_feature 1..759: note = Description of Artificial Sequence: Synthetic coding sequence
  source 1..759: mol_type = other DNA
atgagcggcagaagaaccagaagcggcggcgccgcccagagaagcggccccagagcccccagccccaccaagcccctgagaagaagccagagaaagagcggcagcgagctgcccagcatcctgcccgagatctggcccaagacccccagcgccgccgccgtgagaaagcccatcgtgctgaagagaatcgtggcccacgccgtggaggtgcccgccgtgcagagccccagaagaagccccagaatcagcttcttcctggagaaggagaacgagccccccggcagagagctgaccaaggaggacctgttcaagacccacagcgtgcccgccacccccaccagcacccccgtgcccaaccccgaggccgagagcagcagcaaggagggcgagctggacgccagagacctggagatgagcaagaaggtgagaagaagctacagcagactggagaccctgggcagcgccagcaccagcacccccggcagaagaagctgcttcggcttcgagggcctgctgggcgccgaggacctgagcggcgtgagccccgtggtgtgcagcaagctgaccgaggtgcccagagtgtgcgccaagccctgggcccccgacatgaccctgcccggcatcagccccccccccgagaagcagaagagaaagaagaagaagatgcccgagatcctgaagaccgagctggacgagtgggccgccgccatgaacgccgagttcgaggccgccgagcagttcgacctgctggtggagtag

SEQ ID NO: 76198 - DNA, 216 bp, synthetic construct
  misc_feature 1..216: note = Description of Artificial Sequence: Synthetic coding sequence
  source 1..216: mol_type = other DNA
cagttcctggaccaggaggactggggcccccagagaaccagcaaggagatcagacagctgcagaacgactgcatgagactgagagagagcctgaacaccacccaggtgcacaacctggccctgggcgagaagctgcagaacctgcccaccctgctgtacaagagcctgaaggagggcgcccaggccatccaggaggaggcccaggccatccagtag

SEQ ID NO: 76199 - DNA, 1353 bp, synthetic construct
  misc_feature 1..1353: note = Description of Artificial Sequence: Synthetic coding sequence
  source 1..1353: mol_type = other DNA
atggacgccagaagagtgccccagaaggacctgagagtgaagaagaacctgaagaagttcagatacgtgaagctgatcagcatggagaccagcagcagcagcgacgacagctgcgacagcttcgccagcgacaacttcgccaacaccaagcccaagttcagaagcgacatcagcgaggagctggccaacgtgttctacgaggacagcgacaacgagagcttctgcggcttcagcgagagcgaggtgcaggacgtgctggaccactgcggcttcctgcagaagcccagacccgacgtgaccaacgagctggccggcatcttccacgccgacagcgacgacgagagcttctgcggcttcagcgagagcgagatccaggacggcatgagactgcagagcgtgagagagggctgcagaaccagaagccagtgcagacacagcggccccctgagagtggccatgaagttccccgccagaagcaccagaggcgccaccaacaagaaggccgagagcagacagcccagcgagaacagcgtgaccgacagcaacagcgacagcgaggacgagagcggcatgaacttcctggagaagagagccctgaacatcaagcagaacaaggccatgctggccaagctgatgagcgagctggagagcttccccggcagcttcagaggcagacaccccctgcccggcagcgacagccagagcagaagacccagaagaagaaccttccccggcgtggccagcagaagaaaccccgagagaagagccagacccctgaccagaagcagaagcagaatcctgggcagcctggacgccctgcccatggaggaggaggaggaggaggacaagtacatgctggtgagaaagagaaagaccgtggacggctacatgaacgaggacgacctgcccagaagcagaagaagcagaagcagcgtgaccctgccccacatcatcagacccgtggaggagatcaccgaggaggagctggagaacgtgtgcagcaacagcagagagaagatctacaacagaagcctgggcagcacctgccaccagtgcagacagaagaccatcgacaccaagaccaactgcagaaaccccgactgctggggcgtgagaggccagttctgcggcccctgcctgagaaacagatacggcgaggaggtgagagacgccctgctggaccccaactggcactgccccccctgcagaggcatctgcaactgcagcttctgcagacagagagacggcagatgcgccaccggcgtgctggtgtacctggccaagtaccacggcttcggcaacgtgcacgcctacctgaagagcctgaagcaggagttcgagatgcaggcctag

SEQ ID NO: 76200 - DNA, 1116 bp, synthetic construct
  misc_feature 1..1116: note = Description of Artificial Sequence: Synthetic coding sequence
  source 1..1116: mol_type = other DNA
atggacgccagaagagtgccccagaaggacctgagagtgaagaagaacctgaagaagttcagatacgtgaagctgatcagcatggagaccagcagcagcagcgacgacagctgcgacagcttcgccagcgacaacttcgccaacaccagactgcagagcgtgagagagggctgcagaaccagaagccagtgcagacacagcggccccctgagagtggccatgaagttccccgccagaagcaccagaggcgccaccaacaagaaggccgagagcagacagcccagcgagaacagcgtgaccgacagcaacagcgacagcgaggacgagagcggcatgaacttcctggagaagagagccctgaacatcaagcagaacaaggccatgctggccaagctgatgagcgagctggagagcttccccggcagcttcagaggcagacaccccctgcccggcagcgacagccagagcagaagacccagaagaagaaccttccccggcgtggccagcagaagaaaccccgagagaagagccagacccctgaccagaagcagaagcagaatcctgggcagcctggacgccctgcccatggaggaggaggaggaggaggacaagtacatgctggtgagaaagagaaagaccgtggacggctacatgaacgaggacgacctgcccagaagcagaagaagcagaagcagcgtgaccctgccccacatcatcagacccgtggaggagatcaccgaggaggagctggagaacgtgtgcagcaacagcagagagaagatctacaacagaagcctgggcagcacctgccaccagtgcagacagaagaccatcgacaccaagaccaactgcagaaaccccgactgctggggcgtgagaggccagttctgcggcccctgcctgagaaacagatacggcgaggaggtgagagacgccctgctggaccccaactggcactgccccccctgcagaggcatctgcaactgcagcttctgcagacagagagacggcagatgcgccaccggcgtgctggtgtacctggccaagtaccacggcttcggcaacgtgcacgcctacctgaagagcctgaagcaggagttcgagatgcaggcctag

SEQ ID NO: 76201 - DNA, 966 bp, synthetic construct
  misc_feature 1..966: note = Description of Artificial Sequence: Synthetic coding sequence
  source 1..966: mol_type = other DNA
atggacgccagaagagtgccccagaaggacctgagagtgaagaagaacctgaagaagttcagatacgtgaagctgatcagcatggagaccagcagcagcagcgacgacagctgcgacagcttcgccagcgacaacttcgccaacaccagactgcagagcgtgagagagggctgcagaaccagaagccagtgcagacacagcggccccctgagagtggccatgaagttccccgccagaagcaccagaggcgccaccaacaagaaggccgagagcagacagcccagcgagaacagcgtgaccgacagcaacagcgacagcgaggacgagagcggcatgaacttcctggagaagagagccctgaacatcaagcagaacaaggccatgctggccaagctgatgagcgagctggagagcttccccggcagcttcagaggcagacaccccctgcccggcagcgacagccagagcagaagacccagaagaagaaccttccccggcgtggccagcagaagaaaccccgagagaagagccagacccctgaccagaagcagaagcagaatcctgggcagcctggacgccctgcccatggaggaggaggaggaggaggacaagtacatgctggtgagaaagagaaagaccgtggacggctacatgaacgaggacgacctgcccagaagcagaagaagcagaagcagcgtgaccctgccccacatcatcagacccgtggaggagatcaccgaggaggagctggagaacgtgtgcagcaacagcagagagaagatctacaacagaagcctgaactggcactgccccccctgcagaggcatctgcaactgcagcttctgcagacagagagacggcagatgcgccaccggcgtgctggtgtacctggccaagtaccacggcttcggcaacgtgcacgcctacctgaagagcctgaagcaggagttcgagatgcaggcctag

SEQ ID NO: 76202 - DNA, 1263 bp, synthetic construct
  misc_feature 1..1263: note = Description of Artificial Sequence: Synthetic coding sequence
  source 1..1263: mol_type = other DNA
atggagaccctgagcagcgaggagagctgcgacagcttcgacagcctggagagcggcaagcagcaggacgtgagattccacagcaagtacttcaccgaggagctgagaagaatcttcatcgaggacaccgacagcgagaccgaggacttcgccggcttcacccagagcgacctgaacggcaagaccaaccccgaggtgatggtggtggagagcgacctgagcgacgacggcaaggccagcctggtgagcgaggaggaggaggacgaggaggaggacaaggccacccccagaagaagcagaagcagaagaagcagcatcggcctgagagtggccttccagttccccaccaagaagctggccaacaagcccgacaagaacagcagcagcgagcagctgttcagcagcgccagactgcagaacgagaagaagaccatcctggagagaaagaaggactgcagacaggtgatccagagagaggacagcaccagcgagagcgaggacgacagcagagacgagagccaggagagcagcgacgccctgctgaagagaaccatgaacatcaaggagaacaaggccatgctggcccagctgctggccgagctgaacagcatgcccgacttcttccccgtgagaacccccaccagcgccagcagaaagaagaccgtgagaagagccttcagcgagggccagatcaccagaagaatgaaccccaccagaagcgccagaccccccgagaagttcgccctggagaacttcaccgtgagcgccgccaagttcgccgaggagttctacagcttcagaagaagaaagaccatcggcggcaagtgcagagagtacagaagaagacacagaatcagcagcttcagacccgtggaggacatcaccgaggaggacctggagaacgtggccatcaccgtgagagacaagatctacgacaaggtgctgggcaacacctgccaccagtgcagacagaagaccatcgacaccaagaccgtgtgcagaaaccagggctgctgcggcgtgagaggccagttctgcggcccctgcctgagaaacagatacggcgaggacgtgagaagcgccctgctggaccccgactgggtgtgccccccctgcagaggcatctgcaactgcagctactgcagaaagagagacggcagatgcgccaccggcatcctgatccacctggccaagttctacggctacgacaacgtgaaggagtacctggagagcctgcagaaggagctggtggaggacaactag

SEQ ID NO: 76203 - DNA, 1227 bp, synthetic construct
  misc_feature 1..1227: note = Description of Artificial Sequence: Synthetic coding sequence
  source 1..1227: mol_type = other DNA
atggagctggccaccagataccagatccccaaggaggtggccgacatcttcaacgcccccagcgacgacgaggagttcgtgggcttcagagacgacgtgcccatggagaccctgagcagcgaggagagctgcgacagcttcgacagcctggagagcggcaagcaggtggtggagagcgacctgagcgacgacggcaaggccagcctggtgagcgaggaggaggaggacgaggaggaggacaaggccacccccagaagaagcagaagcagaagaagcagcatcggcctgagagtggccttccagttccccaccaagaagctggccaacaagcccgacaagaacagcagcagcgagcagctgttcagcagcgccagactgcagaacgagaagaagaccatcctggagagaaagaaggactgcagacaggtgatccagagagaggacagcaccagcgagagcgaggacgacagcagagacgagagccaggagagcagcgacgccctgctgaagagaaccatgaacatcaaggagaacaaggccatgctggcccagctgctggccgagctgaacagcatgcccgacttcttccccgtgagaacccccaccagcgccagcagaaagaagaccgtgagaagagccttcagcgagggccagatcaccagaagaatgaaccccaccagaagcgccagaccccccgagaagttcgccctggagaacttcaccgtgagcgccgccaagttcgccgaggagttctacagcttcagaagaagaaagaccatcggcggcaagtgcagagagtacagaagaagacacagaatcagcagcttcagacccgtggaggacatcaccgaggaggacctggagaacgtggccatcaccgtgagagacaagatctacgacaaggtgctgggcaacacctgccaccagtgcagacagaagaccatcgacaccaagaccgtgtgcagaaaccagggctgctgcggcgtgagaggccagttctgcggcccctgcctgagaaacagatacggcgaggacgtgagaagcgccctgctggaccccgactgggtgtgccccccctgcagaggcatctgcaactgcagctactgcagaaagagagacggcagatgcgccaccggcatcctgatccacctggccaagttctacggctacgacaacgtgaaggagtacctggagagcctgcagaaggagctggtggaggacaactag

SEQ ID NO: 76204 - DNA, 1365 bp, synthetic construct
  misc_feature 1..1365: note = Description of Artificial Sequence: Synthetic coding sequence
  source 1..1365: mol_type = other DNA
atggagctggccaccagataccagatccccaaggaggtggccgacatcttcaacgcccccagcgacgacgaggagttcgtgggcttcagagacgacgtgcccatggagaccctgagcagcgaggagagctgcgacagcttcgacagcctggagagcggcaagcagcaggacgtgagattccacagcaagtacttcaccgaggagctgagaagaatcttcatcgaggacaccgacagcgagaccgaggacttcgccggcttcacccagagcgacctgaacggcaagaccaaccccgaggtgatggtggtggagagcgacctgagcgacgacggcaaggccagcctggtgagcgaggaggaggaggacgaggaggaggacaaggccacccccagaagaagcagaagcagaagaagcagcatcggcctgagagtggccttccagttccccaccaagaagctggccaacaagcccgacaagaacagcagcagcgagcagctgttcagcagcgccagactgcagaacgagaagaagaccatcctggagagaaagaaggactgcagacaggtgatccagagagaggacagcaccagcgagagcgaggacgacagcagagacgagagccaggagagcagcgacgccctgctgaagagaaccatgaacatcaaggagaacaaggccatgctggcccagctgctggccgagctgaacagcatgcccgacttcttccccgtgagaacccccaccagcgccagcagaaagaagaccgtgagaagagccttcagcgagggccagatcaccagaagaatgaaccccaccagaagcgccagaccccccgagaagttcgccctggagaacttcaccgtgagcgccgccaagttcgccgaggagttctacagcttcagaagaagaaagaccatcggcggcaagtgcagagagtacagaagaagacacagaatcagcagcttcagacccgtggaggacatcaccgaggaggacctggagaacgtggccatcaccgtgagagacaagatctacgacaaggtgctgggcaacacctgccaccagtgcagacagaagaccatcgacaccaagaccgtgtgcagaaaccagggctgctgcggcgtgagaggccagttctgcggcccctgcctgagaaacagatacggcgaggacgtgagaagcgccctgctggaccccgactgggtgtgccccccctgcagaggcatctgcaactgcagctactgcagaaagagagacggcagatgcgccaccggcatcctgatccacctggccaagttctacggctacgacaacgtgaaggagtacctggagagcctgcagaaggagctggtggaggacaactag

SEQ ID NO: 76205 - DNA, 291 bp, synthetic construct
  misc_feature 1..291: note = Description of Artificial Sequence: Synthetic coding sequence
  source 1..291: mol_type = other DNA
atggagaccctgagcagcgaggagagctgcgacagcttcgacagcctggagagcggcaagcagcaggacgtgagattccacagcaagtacttcaccgaggagctgagaagaatcttcatcgaggacaccgacagcgagaccgaggacttcgccggcttcacccagagcgacctgaacggcaagaccaaccccgaggtgatggtggtggagagcgacctgagcgacgacggcaaggccagcctggtgagcgaggaggaggaggacgaggaggaggacaaggccaccccctag

SEQ ID NO: 76206 - DNA, 843 bp, synthetic construct
  misc_feature 1..843: note = Description of Artificial Sequence: Synthetic coding sequence
  source 1..843: mol_type = other DNA
atggcccccagaaagggcagcagcagagtggccaagaccaacagcctgagaagaagaaagctggccagcttcctgaaggacttcgacagagaggtggagatcagaatcaagcagatcgagagcgacagacagaacctgctgaaggaggtggacaacctgtacaacatcgagatcctgagactgcccaaggccctgagagagatgaactggctggactacttcgccctgggcggcaacaagcaggccctggaggaggccgccaccgccgacctggacatcaccgagatcaacaagctgaccgccgaggccatccagacccccctgaagagcgccaagaccagaaaggtgatccaggtggacgagatgatcgtggaggaggaggaggaggaggagaacgagagaaagaacctgcagaccgccagagtgaagagatgcccccccagcaagaagagaacccagagcatccagggcaagggcaagggcaagagaagcagcagagccaacaccgtgacccccgccgtgggcagactggaggtgagcatggtgaagcccacccccggcctgacccccagattcgacagcagagtgttcaagacccccggcctgagaacccccgccgccggcgagagaatctacaacatcagcggcaacggcagccccctggccgacagcaaggagatcttcctgaccgtgcccgtgggcggcggcgagagcctgagactgctggccagcgacctgcagagacacagcatcgcccagctggaccccgaggccctgggcaacatcaagaagctgagcaacagactggcccagatctgcagcagcatcagaacccacaagtag

SEQ ID NO: 76207 - DNA, 843 bp, synthetic construct; identical to SEQ ID NO: 76206
  misc_feature 1..843: note = Description of Artificial Sequence: Synthetic coding sequence
  source 1..843: mol_type = other DNA

SEQ ID NO: 76208 - DNA, 414 bp, synthetic construct
  misc_feature 1..414: note = Description of Artificial Sequence: Synthetic coding sequence
  source 1..414: mol_type = other DNA
atgcccaacttcgccggcacctggaagatgagaagcagcgagaacttcgacgagctgctgaaggccctgggcgtgaacgccatgctgagaaaggtggccgtggccgccgccagcaagccccacgtggagatcagacaggacggcgaccagttctacatcaagaccagcaccaccgtgagaaccaccgagatcaacttcaaggtgggcgagggcttcgaggaggagaccgtggacggcagaaagtgcagaagcctggccacctgggagaacgagaacaagatccactgcacccagaccctgctggagggcgacggccccaagacctactggaccagagagctggccaacgacgagctgatcctgaccttcggcgccgacgacgtggtgtgcaccagaatctacgtgagagagtag

SEQ ID NO: 76209 - DNA, 249 bp, synthetic construct
  misc_feature 1..249: note = Description of Artificial Sequence: Synthetic coding sequence
  source 1..249: mol_type = other DNA
atgcccaacttcagcggcaactggaagatcatcagaagcgagaacttcgaggagctgctgaaggtgctgggcgtgaacgtgatgctgagaaagatcgccgtggccgccgccagcaagcccgccgtggagatcaagcaggagggcgacaccttctacatcaagaccagcaccaccgtgagaaccaccgagatcaacttcaaggtgggcgaggagttcgaggagcagaccgtggacggcagaccctgctag

SEQ ID NO: 76210 - DNA, 417 bp, synthetic construct
  misc_feature 1..417: note = Description of Artificial Sequence: Synthetic coding sequence
  source 1..417: mol_type = other DNA
atgcccaacttcagcggcaactggaagatcatcagaagcgagaacttcgaggagctgctgaaggtgctgggcgtgaacgtgatgctgagaaagatcgccgtggccgccgccagcaagcccgccgtggagatcaagcaggagggcgacaccttctacatcaagaccagcaccaccgtgagaaccaccgagatcaacttcaaggtgggcgaggagttcgaggagcagaccgtggacggcagaccctgcaagagcctggtgaagtgggagagcgagaacaagatggtgtgcgagcagaagctgctgaagggcgagggccccaagaccagctggaccagagagctgaccaacgacggcgagctgatcctgaccatgaccgccgacgacgtggtgtgcaccagagtgtacgtgagagagtag

SEQ ID NO: 76211 - DNA, 417 bp, synthetic construct; identical to SEQ ID NO: 76210
  misc_feature 1..417: note = Description of Artificial Sequence: Synthetic coding sequence
  source 1..417: mol_type = other DNA

SEQ ID NO: 76212 - DNA, 744 bp, synthetic construct
  misc_feature 1..744: note = Description of Artificial Sequence: Synthetic coding sequence
  source 1..744: mol_type = other DNA
atgggcaccagcagcaccgacagccagcaggccggccacagaagatgcagcaccagcaacaccagcgccgagaacctgacctgcctgagcctgcccggcagccccggcaagaccgcccccctgcccggccccgcccaggccggcgccggccagcccctgcccaagggctgcgccgccgtgaaggccgaggtgggcatccccgccccccacaccagccaggaggtgagaatccacatcagaagactgctgagctgggccgcccccggcgcctgcggcctgagaagcaccccctgcgccctgccccaggccctgccccaggccagaccctgccccggcagatggttcttccccggctgcagcctgcccaccggcggcgcccagaccatcctgagcctgtggacctggagacacttcctgaactgggccctgcagcagagagaggagaacagcggcagagccagaagagtgccccccgtgcccagaaccgcccccgtgagcaagggcgagggcagccaccccccccagaacagcaacggcgagaaggtgaagaccatcacccccgacgtgggcctgcaccagagcctgaccagcgaccccaccgtggccgtgctgagagccaagagagcccccgaggcccacccccccagaagctgcagcggcagcctgaccgccagagtgtgccacatgggcgtgtgccagggccagggcgacaccgaggacggcagaatgaccctgatgggctag

SEQ ID NO: 76213 - DNA, 744 bp, synthetic construct; identical to SEQ ID NO: 76212
  misc_feature 1..744: note = Description of Artificial Sequence: Synthetic coding sequence
  source 1..744: mol_type = other DNA

SEQ ID NO: 76214 - DNA, 4218 bp, synthetic construct
  misc_feature 1..4218: note = Description of Artificial Sequence: Synthetic coding sequence
  source 1..4218: mol_type = other DNA
atggccgccagaagcccccccagcccccaccccagcccccccgccagacagctgggccccagaagccccagagtgggcagaggcgccgaggtgcacgccatgagaagcgaggccagcggcttcgccggcgccgccagagaggtggtggccgacgagagcgacaagatctgggtgggcgaggagggcagcggcggcagaagaggccccggcggcgccgcccccgcccacgcccccctgctgagcgcccccatgggcagcagaagactggagggcatcagcgtggaggaggccatggtgaccagaacccagctgctggaggaggagctgagcagcctgaaggaggagctggccctgtgccaggccgacaaggagttcgtgtggagcctgtggaagagactgcaggtgaccaaccccgacctgacccaggtggtgagcctggtggtggagagagagaagcagaagagcgaggccaaggacagaaaggtgctggagatcctgcaggtgaaggacgccaagatccaggagttcgagcagagagagagcgtgctgaagcaggagatcaacgacctggtgaagagaaagatcgccgtggacgaggagaacgccttcctgagaaaggagttcagcgacctggagaagaagttcaaggacaagagccaggagatcaaggacaccaaggagtgcgtgcagaacaaggaggagcagaacagactggtgatcaagaacctggaggaggagaacaagaagctgagcaccagatgcaccgacctgctgaacgacctggagaagctgagaaagcaggaggcccacctgagaaaggagaagtacagcaccgacgccaagatcaagaccttcgaggacaacctgatcgaggccagaaaggaggtggaggtgagccagagcaagtacaacgccctgagcctgcagctgagcaacaagcagaccgagctgatccagaaggacatggacatcaccctggtgagacaggagctgcaggagctgcagaacctgtacaagcagaacagcacccacaccgcccagcaggccgagctgatccagcagctgcaggtgctgaacatggacacccagaaggtgctgagaaaccaggaggacgtgcacaccgccgagagcatcagctaccagaagctgtacaacgagctgcacatctgcttcgagaccaccaagagcaacgaggccatgctgagacagagcgtgaccaacctgcaggaccagctgctgcagaaggagcaggagaacgccaagctgaaggagaagctgcaggagagccagggcgcccccctgcccctgccccaggagagcgaccccgactacagcgcccaggtgccccacagacccagcctgagcagcctggagaccctgatggtgagccagaagagcgagatcgagtacctgcaggagaagctgaagatcgccaacgagaagctgagcgagaacatcagcgccaacaagggcttcagcagaaagagcatcatgaccagcgccgagggcaagcacaaggagccccccgtgaagagaagcagaagcctgagccccaagagcagcttcaccgacagcgaggagctgcagaagctgagaaaggccgagagaaagatcgagaacctggagaaggccctgcagctgaagagccaggagaacgacgagctgagagacgcccacgagaagagaaaggagagactgcagatgctgcagaccaactacagagccgtgaaggagcagctgaagcagtgggaggagggcagcggcatgaccgagatcagaaagatcaagagagccgacccccagcagctgagacaggaggacagcgacgccgtgtggaacgagctggcctacttcaagagagagaaccaggagctgatgatccagaagatgaacctggaggaggagctggacgagctgaaggtgcacatcagcatcgacaaggccgccatccaggagctgaacagatgcgtggccgagagaagagaggagcagctgttcagaagcggcgaggacgacgaggtgaagagaagcacccccgagaagaacggcaaggagatgctggagcagaccctgcagaaggtgaccgagctggagaacagactgaagagcttcgagaagagaagcagaaagctgaaggagggcaacaagaagctgatgaaggagaacgacttcctgaagagcctgctgaagcagcagcaggaggacaccgagaccagagagaaggagctggagcagatcatcaagggcagcaaggacgtggagaaggagaacaccgagctgcaggtgaagatcagcgagctggagaccgaggtgaccagcctgagaagacaggtggccgaggccaacgccctgagaaacgagaacgaggagctgatcaaccccatggagaagagccaccagagcgccgacagagccaagagcgagatggccaccatgaaggtgagaagcggcagatacgactgcaagaccaccatgaccaaggtgaagttcaaggccgccaagaagaactgcagcgtgggcagacaccacaccgtgctgaaccacagcatcaaggtgatgagcaacgtgttcgagaacctgagcaaggacggctgggaggacgtgagcgagagcagcagcgacagcgaggcccagaccagccagaccctgggcaccatcatcgtggagaccagccagaagatcagccccaccgaggacggcaaggaccagaaggagagcgaccccaccgaggacagccagacccagggcaaggagatcgtgcagacctacctgaacatcgacggcaagacccccaaggactacttccacgacaagaacgccaagaagcccaccttccagaagaagaactgcaagatgcagaagagcagccacaccgccgtgcccaccagagtgaacagagagaagtacaagaacatcaccgcccagaagagcagcagcaacatcatcctgctgagagagagaatcatcagcctgcagcagcagaacagcgtgctgcagaacgccaagaagaccgccgagctgagcgtgaaggagtacaaggaggtgaacgagaagctgctgcaccagcagcaggtgagcgaccagagattccagaccagcagacagaccatcaagaagctgaacctggacctggccggcctgagaaaggagaaggaggacctgctgaagaagctggagagcagcagcgagatcaccagcctggccgaggagaacagccaggtgaccttccccagaatccaggtgaccagcctgagccccagcagaagcatggacctggagatgaagcagctgcagtacaagctgaagaacgccaccaacgagctgaccaagcagagcagcaacgtgaagaccctgaagttcgagctgctggccaaggaggagcacatcaaggagatgcacgagaagatcagcagaatggagagagacatcaccatgaagagacacctgatcgaggacctgaagttcagacagaaggtgaacctggagagcaacaagagcttcagcgagatgctgcagaacctggacaagaaggtgaagaccctgaccgaggagtgcagcaacaagaaggtgagcatcgacagcctgaagcagagactgaacgtggccgtgaaggagaagagccagtacgagcagatgtaccagaagagcaaggaggagctggagaagaaggacctgaagctgaccctgctggtgagcagaatcagcgagaccgagagcgccatggccgagatcgagaccgccgccagcaagcagctgcaggagctggccctgcagagcgagcaggtgctggagggcgcccagaagaccctgctgctggccaacgagaaggtggaggagttcaccaccttcgtgaaggccctggccaaggagctgcagaacgacgtgcacgtggtgagaagacagatcagagagctgaagaagatgaagaagaacagagacgcctgcaagaccagcacccacaaggcccagaccctggccgccagcatcctgaacatcagcagaagcgacctggaggagatcctggacaccgaggaccaggtggagatcgagaagaccaagatcgacgccgagaacgacaaggagtggatgctgtacatccagaagctgctggagggccagagcctggccctgagccccagactgaagtgcaacggcgccatcgtggcccaccagaacctgagactgcccgacagcagcagcagcgccagcgccagctag

SEQ ID NO: 76215 - DNA, 1176 bp, synthetic construct
  misc_feature 1..1176: note = Description of Artificial Sequence: Synthetic coding sequence
  source 1..1176: mol_type = other DNA
atggccgccagaagcccccccagcccccaccccagcccccccgccagacagctgggccccagaagccccagagtgggcagaggcgccgaggtgcacgccatgagaagcgaggccagcggcttcgccggcgccgccagagaggtggtggccgacgagagcgacaagatctgggtgggcgaggagggcagcggcggcagaagaggccccggcggcgccgcccccgcccacgcccccctgctgagcgcccccatgggcagcagaagactggagggcatcagcgtggaggaggccatggtgaccagaacccagctgctggaggaggagctgagcagcctgaaggaggagctggccctgtgccaggccgacaaggagttcgtgtggagcctgtggaagagactgcaggtgaccaaccccgacctgacccaggtggtgagcctggtggtggagagagagaagcagaagagcgaggccaaggacagaaaggtgctggagatcctgcaggtgaaggacgccaagatccaggagttcgagcagagagagagcgtgctgaagcaggagatcaacgacctggtgaagagaaagatcgccgtggacgaggagaacgccttcctgagaaaggagttcagcgacctggagaagaagttcaaggacaagagccaggagatcaaggacaccaaggagtgcgtgcagaacaaggaggagcagaacagactggtgatcaagaacctggaggaggagaacaagaagctgagcaccagatgcaccgacctgctgaacgacctggagaagctgagaaagcaggaggcccacctgagaaaggagaagtacagcaccgacgccaagatcaagaccttcgaggacaacctgatcgaggccagaaaggaggtggaggtgagccagagcaagtacaacgccctgagcctgcagctgagcaacaagcagaccgagctgatccagaaggacatggacatcaccctggtgagaaaggagctgcaggagctgcagaacctgtacaagcagaacagcacccacaccgcccagcaggccgagctgatccagcagctgcaggtgctgaacatggacacccagaaggtgctgagaaaccaggaggacgtgcacaccgccgagagcatcagctaccagaaggtgtgcttctacagcgtgatcaagatgtag

SEQ ID NO: 76216 - DNA, 4221 bp, synthetic construct
  misc_feature 1..4221: note = Description of Artificial Sequence: Synthetic coding sequence
  source 1..4221: mol_type = other DNA
atggccgccagaagcccccccagcccccaccccagcccccccgccagacagctgggccccagaagccccagagtgggcagaggcgccgaggtgcacgccatgagaagcgaggccagcggcttcgccggcgccgccagagaggtggtggccgacgagagcgacaagatctgggtgggcgaggagggcagcggcggcagaagaggccccggcggcgccgcccccgcccacgcccccctgctgagcgcccccatgggcagcagaagactggagggcatcagcgtggaggaggccatggtgaccagaacccagctgctggaggaggagctgagcagcctgaaggaggagctggccctgtgccaggccgacaaggagttcgtgtggagcctgtggaagagactgcaggtgaccaaccccgacctgacccaggtggtgagcctggtggtggagagagagaagcagaagagcgaggccaaggacagaaaggtgctggagatcctgcaggtgaaggacgccaagatccaggagttcgagcagagagagagcgtgctgaagcaggagatcaacgacctggtgaagagaaagatcgccgtggacgaggagaacgccttcctgagaaaggagttcagcgacctggagaagaagttcaaggacaagagccaggagatcaaggacaccaaggagtgcgtgcagaacaaggaggagcagaacagactggtgatcaagaacctggaggaggagaacaagaagctgagcaccagatgcaccgacctgctgaacgacctggagaagctgagaaagcaggaggcccacctgagaaaggagaagtacagcaccgacgccaagatcaagaccttcgaggacaacctgatcgaggccagaaaggaggtggaggtgagccagagcaagtacaacgccctgagcctgcagctgagcaacaagcagaccgagctgatccagaaggacatggacatcaccctggtgagaaaggagctgcaggagctgcagaacctgtacaagcagaacagcacccacaccgcccagcaggccgagctgatccagcagctgcaggtgctgaacatggacacccagaaggtgctgagaaaccaggaggacgtgcacaccgccgagagcatcagctaccagaagctgtacaacgagctgcacatctgcttcgagaccaccaagagcaacgaggccatgctgagacagagcgtgaccaacctgcaggaccagctgctgcagaaggagcaggagaacgccaagctgaaggagaagctgcaggagagccagggcgcccccctgcccctgccccaggagagcgaccccgactacagcgcccaggtgccccacagacccagcctgagcagcctggagaccctgatggtgagccagaagagcgagatcgagtacctgcaggagaagctgaagatcgccaacgagaagctgagcgagaacatcagcgccaacaagggcttcagcagaaagagcatcatgaccagcgccgagggcaagcacaaggagccccccgtgaagagaagcagaagcctgagccccaagagcagcttcaccgacagcgaggagctgcagaagctgagaaaggccgagagaaagatcgagaacctggagaaggccctgcagctgaagagccaggagaacgacgagctgagagacgcccacgagaagagaaaggagagactgcagatgctgcagaccaactacagagccgtgaaggagcagctgaagcagtgggaggagggcagcggcatgaccgagatcagaaagatcaagagagccgacccccagcagctgagacaggaggacagcgacgccgtgtggaacgagctggcctacttcaagagagagaaccaggagctgatgatccagaagatgaacctggaggaggagctggacgagctgaaggtgcacatcagcatcgacaaggccgccatccaggagctgaacagatgcgtggccgagagaagagaggagcagctgttcagaagcggcgaggacgacgaggtgaagagaagcacccccgagaagaacggcaaggagatgctggagcagaccctgcagaaggtgaccgagctggagaacagactgaagagcttcgagaagagaagcagaaagctgaaggagggcaacaagaagctgatgaaggagaacgacttcctgaagagcctgctgaagcagcagcaggaggacaccgagaccagagagaaggagctggagcagatcatcaagggcagcaaggacgtggagaaggagaacaccgagctgcaggtgaagatcagcgagctggagaccgaggtgaccagcctgagaagacaggtggccgaggccaacgccctgagaaacgagaacgaggagctgatcaaccccatggagaagagccaccagagcgccgacagagccaagagcgagatggccaccatgaaggtgagaagcggcagatacgactgcaagaccaccatgaccaaggtgaagttcaaggccgccaagaagaactgcagcgtgggcagacaccacaccgtgctgaaccacagcatcaaggtgatgagcaacgtgttcgagaacctgagcaaggacggctgggaggacgtgagcgagagcagcagcgacagcgaggcccagaccagccagaccctgggcaccatcatcgtggagaccagccagaagatcagccccaccgaggacggcaaggaccagaaggagagcgaccccaccgaggacagccagacccagggcaaggagatcgtgcagacctacctgaacatcgacggcaagacccccaaggactacttccacgacaagaacgccaagaagcccaccttccagaagaagaactgcaagatgcagaagagcagccacaccgccgtgcccaccagagtgaacagagagaagtacaagaacatcaccgcccagaagagcagcagcaacatcatcctgctgagagagagaatcatcagcctgcagcagcagaacagcgtgctgcagaacgccaagaagaccgccgagctgagcgtgaaggagtacaaggaggtgaacgagaagctgctgcaccagcagcaggtgagcgaccagagattccagaccagcagacagaccatcaagaagctgaacctggacctggccggcctgagaaaggagaaggaggacctgctgaagaagctggagagcagcagcgagatcaccagcctggccgaggagaacagccaggtgaccttccccagaatccaggtgaccagcctgagccccagcagaagcatggacctggagatgaagcagctgcagtacaagctgaagaacgccaccaacgagctgaccaagcagagcagcaacgtgaagaccctgaagttcgagctgctggccaaggaggagcacatcaaggagatgcacgagaagatcagcagaatggagagagacatcaccatgaagagacacctgatcgaggacctgaagttcagacagaaggtgaacctggagagcaacaagagcttcagcgagatgctgcagaacctggacaagaaggtgaagaccctgaccgaggagtgcagcaacaagaaggtgagcatcgacagcctgaagcagagactgaacgtggccgtgaaggagaagagccagtacgagcagatgtaccagaagagcaaggaggagctggagaagaaggacctgaagctgaccctgctggtgagcagaatcagcgagaccgagagcgccatggccgagatcgagaccgccgccagcaagcagctgcaggagctggccctgcagagcgagcaggtgctggagggcgcccagaagaccctgctgctggccaacgagaaggtggaggagttcaccaccttcgtgaaggccctggccaaggagctgcagaacgacgtgcacgtggtgagaagacagatcagagagctgaagaagatgaagaagaacagagacgcctgcaagaccagcacccacaaggcccagaccctggccgccagcatcctgaacatcagcagaagcgacctggaggagatcctggacaccgaggaccaggtggagatcgagaagaccaagatcgacgccgagaacgacaaggagtggatgctgtacatccagaagctgctggagggccagctgcccttcgccagctacctgctggaggccgtgctggagaagatcaacgagaagaagaagctggtggagggctacttcaccatcatgaaggacatcagatag

SEQ ID NO: 76217 - DNA, 4221 bp, synthetic construct
  misc_feature 1..4221: note = Description of Artificial Sequence: Synthetic coding sequence
  source 1..4221: mol_type = other DNA
atggccgccagaagcccccccagcccccaccccagcccccccgccagacagctgggccccagaagccccagagtgggcagaggcgccgaggtgcacgccatgagaagcgaggccagcggcttcgccggcgccgccagagaggtggtggccgacgagagcgacaagatctgggtgggcgaggagggcagcggcggcagaagaggccccggcggcgccgcccccgcccacgcccccctgctgagcgcccccatgggcagcagaagactggagggcatcagcgtggaggaggccatggtgaccagaacccagctgctggaggaggagctgagcagcctgaaggaggagctggccctgtgccaggccgacaaggagttcgtgtggagcctgtggaagagactgcaggtgaccaaccccgacctgacccaggtggtgagcctggtggtggagagagagaagcagaagagcgaggccaaggacagaaaggtgctggagatcctgcaggtgaaggacgccaagatccaggagttcgagcagagagagagcgtgctgaagcaggagatcaacgacctggtgaagagaaagatcgccgtggacgaggagaacgccttcctgagaaaggagttcagcgacctggagaagaagttcaaggacaagagccaggagatcaaggacaccaaggagtgcgtgcagaacaaggaggagcagaacagactggtgatcaagaacctggaggaggagaacaagaagctgagcaccagatgcaccgacctgctgaacgacctggagaagctgagaaagcaggaggcccacctgagaaaggagaagtacagcaccgacgccaagatcaagaccttcgaggacaacctgatcgaggccagaaaggaggtggaggtgagccagagcaagtacaacgccctgagcctgcagctgagcaacaagcagaccgagctgatccagaaggacatggacatcaccctggtgagacaggagctgcaggagctgcagaacctgtacaagcagaacagcacccacaccgcccagcaggccgagctgatccagcagctgcaggtgctgaacatggacacccagaaggtgctgagaaaccaggaggacgtgcacaccgccgagagcatcagctaccagaagctgtacaacgagctgcacatctgcttcgagaccaccaagagcaacgaggccatgctgagacagagcgtgaccaacctgcaggaccagctgctgcagaaggagcaggagaacgccaagctgaaggagaagctgcaggagagccagggcgcccccctgcccctgccccaggagagcgaccccgactacagcgcccaggtgccccacagacccagcctgagcagcctggagaccctgatggtgagccagaagagcgagatcgagtacctgcaggagaagctgaagatcgccaacgagaagctgagcgagaacatcagcgccaacaagggcttcagcagaaagagcatcatgaccagcgccgagggcaagcacaaggagccccccgtgaagagaagcagaagcctgagccccaagagcagcttcaccgacagcgaggagctgcagaagctgagaaaggccgagagaaagatcgagaacctggagaaggccctgcagctgaagagccaggagaacgacgagctgagagacgcccacgagaagagaaaggagagactgcagatgctgcagaccaactacagagccgtgaaggagcagctgaagcagtgggaggagggcagcggcatgaccgagatcagaaagatcaagagagccgacccccagcagctgagacaggaggacagcgacgccgtgtggaacgagctggcctacttcaagagagagaaccaggagctgatgatccagaagatgaacctggaggaggagctggacgagctgaaggtgcacatcagcatcgacaaggccgccatccaggagctgaacagatgcgtggccgagagaagagaggagcagctgttcagaagcggcgaggacgacgaggtgaagagaagcacccccgagaagaacggcaaggagatgctggagcagaccctgcagaaggtgaccgagctggagaacagactgaagagcttcgagaagagaagcagaaagctgaaggagggcaacaagaagctgatgaaggagaacgacttcctgaagagcctgctgaagcagcagcaggaggacaccgagaccagagagaaggagctggagcagatcatcaagggcagcaaggacgtggagaaggagaacaccgagctgcaggtgaagatcagcgagctggagaccgaggtgaccagcctgagaagacaggtggccgaggccaacgccctgagaaacgagaacgaggagctgatcaaccccatggagaagagccaccagagcgccgacagagccaagagcgagatggccaccatgaaggtgagaagcggcagatacgactgcaagaccaccatgaccaaggtgaagttcaaggccgccaagaagaactgcagcgtgggcagacaccacaccgtgctgaaccacagcatcaaggtgatgagcaacgtgttcgagaacctgagcaaggacggctgggaggacgtgagcgagagcagcagcgacagcgaggcccagaccagccagaccctgggcaccatcatcgtggagaccagccagaagatcagccccaccgaggacggcaaggaccagaaggagagcgaccccaccgaggacagccagacccagggcaaggagatcgtgcagacctacctgaacatcgacggcaagacccccaaggactacttccacgacaagaacgccaagaagcccaccttccagaagaagaactgcaagatgcagaagagcagccacaccgccgtgcccaccagagtgaacagagagaagtacaagaacatcaccgcccagaagagcagcagcaacatcatcctgctgagagagagaatcatcagcctgcagcagcagaacagcgtgctgcagaacgccaagaagaccgccgagctgagcgtgaaggagtacaaggaggtgaacgagaagctgctgcaccagcagcaggtgagcgaccagagattccagaccagcagacagaccatcaagaagctgaacctggacctggccggcctgagaaaggagaaggaggacctgctgaagaagctggagagcagcagcgagatcaccagcctggccgaggagaacagccaggtgaccttccccagaatccaggtgaccagcctgagccccagcagaagcatggacctggagatgaagcagctgcagtacaagctgaagaacgccaccaacgagctgaccaagcagagcagcaacgtgaagaccctgaagttcgagctgctggccaaggaggagcacatcaaggagatgcacgagaagatcagcagaatggagagagacatcaccatgaagagacacctgatcgaggacctgaagttcagacagaaggtgaacctggagagcaacaagagcttcagcgagatgctgcagaacctggacaagaaggtgaagaccctgaccgaggagtgcagcaacaagaaggtgagcatcgacagcctgaagcagagactgaacgtggccgtgaaggagaagagccagtacgagcagatgtaccagaagagcaaggaggagctggagaagaaggacctgaagctgaccctgctggtgagcagaatcagcgagaccgagagcgccatggccgagatcgagaccgccgccagcaagcagctgcaggagctggccctgcagagcgagcaggtgctggagggcgcccagaagaccctgctgctggccaacgagaaggtggaggagttcaccaccttcgtgaaggccctggccaaggagctgcagaacgacgtgcacgtggtgagaagacagatcagagagctgaagaagatgaagaagaacagagacgcctgcaagaccagcacccacaaggcccagaccctggccgccagcatcctgaacatcagcagaagcgacctggaggagatcctggacaccgaggaccaggtggagatcgagaagaccaagatcgacgccgagaacgacaaggagtggatgctgtacatccagaagctgctggagggccagctgcccttcgccagctacctgctggaggccgtgctggagaagatcaacgagaagaagaagctggtggagggctacttcaccatcatgaaggacatcagatag

SEQ ID NO: 76218 - DNA, 519 bp, synthetic construct
  misc_feature 1..519: note = Description of Artificial Sequence: Synthetic coding sequence
  source 1..519: mol_type = other DNA
atggccagcggcttcaagaagcccagcgccgccagcaccggccagaagagaaaggtggcccccaagcccgagctgaccgaggaccagaagcaggaggtgagagaggccttcgacctgttcgacgtggacggcagcggcaccatcgacgccaaggagctgaaggtggccatgagagccctgggcttcgagcccagaaaggaggagatgaagaagatgatcagcgaggtggacagagagggcaccggcaagatcagcttcaacgacttcctggccgtgatgacccagaagatgagcgagaaggacaccaaggaggagatcctgaaggccttcagactgttcgacgacgacgagaccggcaagatcagcttcaagaacctgaagagagtggccaacgagctgggcgagaacctgaccgacgaggagctgcaggagatgatcgacgaggccgacagagacggcgacggcgaggtgaacgaggaggagttcctgagaatcatgaagaagaccagcctgtactag

SEQ ID NO: 76219 - DNA, 519 bp, synthetic construct
  misc_feature 1..519: note = Description of Artificial Sequence: Synthetic coding sequence
  source 1..519: mol_type = other DNA
atggccagcaacttcaagaaggccaacatggccagcagcagccagagaaagagaatgagccccaagcccgagctgaccgaggagcagaagcaggagatcagagaggccttcgacctgttcgacgccgacggcaccggcaccatcgacgtgaaggagctgaaggtggccatgagagccctgggcttcgagcccaagaaggaggagatcaagaagatgatcagcgagatcgacaaggagggcaccggcaagatgaacttcggcgacttcctgaccgtgatgacccagaagatgagcgagaaggacaccaaggaggagatcctgaaggccttcaagctgttcgacgacgacgagaccggcaagatcagcttcaagaacctgaagagagtggccaaggagctgggcgagaacctgaccgacgaggagctgcaggagatgatcgacgaggccgacagagacggcgacggcgaggtgagcgagcaggagttcctgagaatcatgaagaagaccagcctgtactag

SEQ ID NO: 76220 - DNA, 378 bp, synthetic construct
  misc_feature 1..378: note = Description of Artificial Sequence: Synthetic coding sequence
  source 1..378: mol_type = other DNA
atggccatgcaggccgccaagagagccaacatcagactgccccccgaggtgaacagaatcctgtacatcagaaacctgccctacaagatcaccgccgaggagatgtacgacatcttcggcaagtacggccccatcagacagatcagagtgggcaacacccccgagaccagaggcaccgcctacgtggtgtacgaggacatcttcgacgccaagaacgcctgcgaccacctgagcggcttcaacgtgtgcaacagatacctggtggtgctgtactacaacgccaacagagccttccagaagatggacaccaagaagaaggaggagcagctgaagctgctgaaggagaagtacggcatcaacaccgacccccccaagtag

SEQ ID NO: 76221 - DNA, 423 bp, synthetic construct
  misc_feature 1..423: note = Description of Artificial Sequence: Synthetic coding sequence
  source 1..423: mol_type = other DNA
atgggccccagaagaagaagcagaaagcccgaggcccccagaagaagaagccccagccccacccccacccccggccccagcagaagaggccccagcctgggcgccagcagccaccagcacagcagaagaagacagggctggctgaaggagatcagaaagctgcagaagagcacccacctgctgatcagaaagctgcccttcagcagactggccagagagatctgcgtgaagttcaccagaggcgtggacttcaactggcaggcccaggccctgctggccctgcaggaggccgccgaggccttcctggtgcacctgttcgaggacgcctacctgctgaccctgcacgccggcagagtgaccctgttccccaaggacgtgcagctggccagaagaatcagaggcctggaggagggcctgggctag

SEQ ID NO: 76222 - DNA, 1800 bp, synthetic construct
  misc_feature 1..1800: note = Description of Artificial Sequence: Synthetic coding sequence
  source 1..1800: mol_type = other DNA
atgggccccaagagaagacagctgaccttcagagagaagagcagaatcatccaggaggtggaggagaaccccgacctgagaaagggcgagatcgccagaagattcaacatcccccccagcaccctgagcaccatcctgaagaacaagagagccatcctggccagcgagagaaagtacggcgtggccagcacctgcagaaagaccaacaagctgagcccctacgacaagctggagggcctgctgatcgcctggttccagcagatcagagccgccggcctgcccgtgaagggcatcatcctgaaggagaaggccctgagaatcgccgaggagctgggcatggacgacttcaccgccagcaacggctggctggacagattcagaagaagacacggcgtggtgagctgcagcggcgtggccagagccagagccagaaacgccgcccccagaacccccgccgcccccgccagccccgccgccgtgcccagcgagggcagcggcggcagcaccaccggctggagagccagagaggagcagccccccagcgtggccgagggctacgccagccaggacgtgttcagcgccaccgagaccagcctgtggtacgacttcctgcccgaccaggccgccggcctgtgcggcggcgacggcagacccagacaggccacccagagactgagcgtgctgctgtgcgccaacgccgacggcagcgagaagctgccccccctggtggccggcaagagcgccaagcccagagccggccaggccggcctgccctgcgactacaccgccaacagcaagggcggcgtgaccacccaggccctggccaagtacctgaaggccctggacaccagaatggccgccgagagcagaagagtgctgctgctggccggcagactggccgcccagagcctggacaccagcggcctgagacacgtgcagctggccttcttcccccccggcaccgtgcaccccctggagagaggcgtggtgcagcaggtgaagggccactacagacaggccatgctgctgaaggccatggccgccctggagggccaggaccccagcggcctgcagctgggcctgaccgaggccctgcacttcgtggccgccgcctggcaggccgtggagcccagcgacatcgccgcctgcttcagagaggccggcttcggcggcggccccaacgccaccatcaccaccagcctgaagagcgagggcgaggaggaggaggaggaggaggaggaggaggaggaggaggagggcgagggcgaggaggaggaggaggagggcgaggaggaggaggaggagggcggcgagggcgaggagctgggcgaggaggaggaggtggaggaggagggcgacgtggacagcgacgaggaggaggaggaggacgaggagagcagcagcgagggcctggaggccgaggactgggcccagggcgtggtggaggccggcggcagcttcggcgcctacggcgcccaggaggaggcccagtgccccaccctgcacttcctggagggcggcgaggacagcgacagcgacagcgaggaggaggacgacgaggaggaggacgacgaggacgaggacgacgacgacgacgaggaggacggcgacgaggtgcccgtgcccagcttcggcgaggccatggcctacttcgccatggtgaagagatacctgaccagcttccccatcgacgacagagtgcagagccacatcctgcacctggagcacgacctggtgcacgtgaccagaaagaaccacgccagacaggccggcgtgagaggcctgggccaccagagctag

SEQ ID NO: 76223 - DNA, 417 bp, synthetic construct
  misc_feature 1..417: note = Description of Artificial Sequence: Synthetic coding sequence
  source 1..417: mol_type = other DNA
gaggacgaggagagcagcagcgagggcctggaggccgaggactgggcccagggcgtggtggaggccggcggcagcttcggcgcctacggcgcccaggaggaggcccagtgccccaccctgcacttcctggagggcggcgaggacagcgacagcgacagcgaggaggaggacgacgaggaggaggacgacgaggacgaggacgacgacgacgacgaggaggacggcgacgaggtgcccgtgcccagcttcggcgaggccatggcctacttcgccatggtgaagagatacctgaccagcttccccatcgacgacagagtgcagagccacatcctgcacctggagcacgacctggtgcacgtgaccagaaagaaccacgccagacaggccggcgtgagaggcctgggccaccagagctag

SEQ ID NO: 76224 - DNA, 2832 bp, synthetic construct
  misc_feature 1..2832: note = Description of Artificial Sequence: Synthetic coding sequence
  source 1..2832: mol_type = other DNA
atggccgccagcggcctggaccacctgaagaacggctacagaagaagattctgcagacccagcagagccagagacatcaacaccgagcagggccagaacgtgctggagatcctgcaggactgcttcgaggagaagagcctggccaacgacttcagcaccaacagcaccaagagcgtgcccaacagcaccagaaagatcaaggacacctgcatccagagccccagcaaggagtgccagaagagccaccccaagagcgtgcccgtgagcagcaagaagaaggaggccagcctgcagttcgtggtggagcccagcgaggccaccaacagaagcgtgcaggcccacgaggtgcaccagaagatcctggccaccgacgtgagcagcaagaacacccccgacagcaagaagatcagcagcagaaacatcaacgaccaccacagcgaggccgacgaggagttctacctgagcgtgggcagccccagcgtgctgctggacgccaagaccagcgtgagccagaacgtgatccccagcagcgcccagaagagagagacctacaccttcgagaacagcgtgaacatgctgcccagcagcaccgaggtgagcgtgaagaccaagaagagactgaacttcgacgacaaggtgatgctgaagaagatcgagatcgacaacaaggtgagcgacgaggaggacaagaccagcgagggccaggagagaaagcccagcggcagcagccagaacagaatcagagacagcgagtacgagatccagagacaggccaagaagagcttcagcaccctgttcctggagaccgtgaagagaaagagcgagagcagccccatcgtgagacacgccgccaccgcccccccccacagctgcccccccgacgacaccaagctgatcgaggacgagttcatcatcgacgagagcgaccagagcttcgccagcagaagctggatcaccatccccagaaaggccggcagcctgaagcagagaaccatcagccccgccgagagcaccgccctgctgcagggcagaaagagcagagagaagcaccacaacatcctgcccaagaccctggccaacgacaagcacagccacaagccccaccccgtggagaccagccagcccagcgacaagaccgtgctggacaccagctacgccctgatcggcgagaccgtgaacaactacagaagcaccaagtacgagatgtacagcaagaacgccgagaagcccagcagaagcaagagaaccatcaagcagaagcagagaagaaagttcatggccaagcccgccgaggagcagctggacgtgggccagagcaaggacgagaacatccacaccagccacatcacccaggacgagttccagagaaacagcgacagaaacatggaggagcacgaggagatgggcaacgactgcgtgagcaagaagcagatgccccccgtgggcagcaagaagagcagcaccagaaaggacaaggaggagagcaagaagaagagattcagcagcgagagcaagaacaagctggtgcccgaggaggtgaccagcaccgtgaccaagagcagaagaatcagcagaagacccagcgactggtgggtggtgaagagcgaggagagccccgtgtacagcaacagcagcgtgagaaacgagctgcccatgcaccacaacagcagcagaaagagcaccaagaagaccaaccagagcagcaagaacatcagaaagaagaccatccccctgaagagacagaagaccgccaccaagggcaaccagagagtgcagaagttcctgaacgccgagggcagcggcggcatcgtgggccacgacgagatcagcagatgcagcctgagcgagcccctggagagcgacgaggccgacctggccaagaagaagaacctggactgcagcagaagcaccagaagcagcaagaacgaggacaacatcatgaccgcccagaacgtgcccctgaagccccagaccagcggctacacctgcaacatccccaccgagagcaacctggacagcggcgagcacaagaccagcgtgctggaggagagcggccccagcagactgaacaacaactacctgatgagcggcaagaacgacgtggacgacgaggaggtgcacggcagcagcgacgacagcaagcagagcaaggtgatccccaagaacagaatccaccacaagctggtgctgcccagcaacacccccaacgtgagaagaaccaagagaaccagactgaagcccctggagtactggagaggcgagagaatcgactaccagggcagacccagcggcggcttcgtgatcagcggcgtgctgagccccgacaccatcagcagcaagagaaaggccaaggagaacatcggcaaggtgaacaagaagagcaacaagaagagaatctgcctggacaacgacgagagaaagaccaacctgatggtgaacctgggcatccccctgggcgaccccctgcagcccaccagagtgaaggaccccgagaccagagagatcatcctgatggacctggtgagaccccaggacacctaccagttcttcgtgaagcacggcgagctgaaggtgtacaagaccctggacacccccttcttcagcaccggcaagctgatcctgggcccccaggaggagaagggcaagcagcacgtgggccaggacatcctggtgttctacgtgaacttcggcgacctgctgtgcaccctgcacgagaccccctacatcctgagcaccggcgacagcttctacgtgcccagcggcaactactacaacatcaagaacctgagaaacgaggagagcgtgctgctgttcacccagatcaagagatag

SEQ ID NO: 76225 - DNA, 8106 bp, synthetic construct
  misc_feature 1..8106: note = Description of Artificial Sequence: Synthetic coding sequence
  source 1..8106: mol_type = other DNA
atggccgaggagggcgccgtggccgtgtgcgtgagagtgagacccctgaacagcagagaggagagcctgggcgagaccgcccaggtgtactggaagaccgacaacaacgtgatctaccaggtggacggcagcaagagcttcaacttcgacagagtgttccacggcaacgagaccaccaagaacgtgtacgaggagatcgccgcccccatcatcgacagcgccatccagggctacaacggcaccatcttcgcctacggccagaccgccagcggcaagacctacaccatgatgggcagcgaggaccacctgggcgtgatccccagagccatccacgacatcttccagaagatcaagaagttccccgacagagagttcctgctgagagtgagctacatggagatctacaacgagaccatcaccgacctgctgtgcggcacccagaagatgaagcccctgatcatcagagaggacgtgaacagaaacgtgtacgtggccgacctgaccgaggaggtggtgtacaccagcgagatggccctgaagtggatcaccaagggcgagaagagcagacactacggcgagaccaagatgaaccagagaagcagcagaagccacaccatcttcagaatgatcctggagagcagagagaagggcgagcccagcaactgcgagggcagcgtgaaggtgagccacctgaacctggtggacctggccggcagcgagagagccgcccagaccggcgccgccggcgtgagactgaaggagggctgcaacatcaacagaagcctgttcatcctgggccaggtgatcaagaagctgagcgacggccaggtgggcggcttcatcaactacagagacagcaagctgaccagaatcctgcagaacagcctgggcggcaacgccaagaccagaatcatctgcaccatcacccccgtgagcttcgacgagaccctgaccgccctgcagttcgccagcaccgccaagtacatgaagaacaccccctacgtgaacgaggtgagcaccgacgaggccctgctgaagagatacagaaaggagatcatggacctgaagaagcagctggaggaggtgagcctggagaccagagcccaggccatggagaaggaccagctggcccagctgctggaggagaaggacctgctgcagaaggtgcagaacgagaagatcgagaacctgaccagaatgctggtgaccagcagcagcctgaccctgcagcaggagctgaaggccaagagaaagagaagagtgacctggtgcctgggcaagatcaacaagatgaagaacagcaactacgccgaccagttcaacatccccaccaacatcaccaccaagacccacaagctgagcatcaacctgctgagagagatcgacgagagcgtgtgcagcgagagcgacgtgttcagcaacaccctggacaccctgagcgagatcgagtggaaccccgccaccaagctgctgaaccaggagaacatcgagagcgagctgaacagcctgagagccgactacgacaacctggtgctggactacgagcagctgagaaccgagaaggaggagatggagctgaagctgaaggagaagaacgacctggacgagttcgaggccctggagagaaagaccaagaaggaccaggagatgcagctgatccacgagatcagcaacctgaagaacctggtgaagcacgccgaggtgtacaaccaggacctggagaacgagctgagcagcaaggtggagctgctgagagagaaggaggaccagatcaagaagctgcaggagtacatcgacagccagaagctggagaacatcaagatggacctgagctacagcctggagagcatcgaggaccccaagcagatgaagcagaccctgttcgacgccgagaccgtggccctggacgccaagagagagagcgccttcctgagaagcgagaacctggagctgaaggagaagatgaaggagctggccaccacctacaagcagatggagaacgacatccagctgtaccagagccagctggaggccaagaagaagatgcaggtggacctggagaaggagctgcagagcgccttcaacgagatcaccaagctgaccagcctgatcgacggcaaggtgcccaaggacctgctgtgcaacctggagctggagggcaagatcaccgacctgcagaaggagctgaacaaggaggtggaggagaacgaggccctgagagaggaggtgatcctgctgagcgagctgaagagcctgcccagcgaggtggagagactgagaaaggagatccaggacaagagcgaggagctgcacatcatcaccagcgagaaggacaagctgttcagcgaggtggtgcacaaggagagcagagtgcagggcctgctggaggagatcggcaagaccaaggacgacctggccaccacccagagcaactacaagagcaccgaccaggagttccagaacttcaagaccctgcacatggacttcgagcagaagtacaagatggtgctggaggagaacgagagaatgaaccaggagatcgtgaacctgagcaaggaggcccagaagttcgacagcagcctgggcgccctgaagaccgagctgagctacaagacccaggagctgcaggagaagaccagagaggtgcaggagagactgaacgagatggagcagctgaaggagcagctggagaacagagacagcaccctgcagaccgtggagagagagaagaccctgatcaccgagaagctgcagcagaccctggaggaggtgaagaccctgacccaggagaaggacgacctgaagcagctgcaggagagcctgcagatcgagagagaccagctgaagagcgacatccacgacaccgtgaacatgaacatcgacacccaggagcagctgagaaacgccctggagagcctgaagcagcaccaggagaccatcaacaccctgaagagcaagatcagcgaggaggtgagcagaaacctgcacatggaggagaacaccggcgagaccaaggacgagttccagcagaagatggtgggcatcgacaagaagcaggacctggaggccaagaacacccagaccctgaccgccgacgtgaaggacaacgagatcatcgagcagcagagaaagatcttcagcctgatccaggagaagaacgagctgcagcagatgctggagagcgtgatcgccgagaaggagcagctgaagaccgacctgaaggagaacatcgagatgaccatcgagaaccaggaggagctgagactgctgggcgacgagctgaagaagcagcaggagatcgtggcccaggagaagaaccacgccatcaagaaggagggcgagctgagcagaacctgcgacagactggccgaggtggaggagaagctgaaggagaagagccagcagctgcaggagaagcagcagcagctgctgaacgtgcaggaggagatgagcgagatgcagaagaagatcaacgagatcgagaacctgaagaacgagctgaagaacaaggagctgaccctggagcacatggagaccgagagactggagctggcccagaagctgaacgagaactacgaggaggtgaagagcatcaccaaggagagaaaggtgctgaaggagctgcagaagagcttcgagaccgagagagaccacctgagaggctacatcagagagatcgaggccaccggcctgcagaccaaggaggagctgaagatcgcccacatccacctgaaggagcaccaggagaccatcgacgagctgagaagaagcgtgagcgagaagaccgcccagatcatcaacacccaggacctggagaagagccacaccaagctgcaggaggagatccccgtgctgcacgaggagcaggagctgctgcccaacgtgaaggaggtgagcgagacccaggagaccatgaacgagctggagctgctgaccgagcagagcaccaccaaggacagcaccaccctggccagaatcgagatggagagactgagactgaacgagaagttccaggagagccaggaggagatcaagagcctgaccaaggagagagacaacctgaagaccatcaaggaggccctggaggtgaagcacgaccagctgaaggagcacatcagagagaccctggccaagatccaggagagccagagcaagcaggagcagagcctgaacatgaaggagaaggacaacgagaccaccaagatcgtgagcgagatggagcagttcaagcccaaggacagcgccctgctgagaatcgagatcgagatgctgggcctgagcaagagactgcaggagagccacgacgagatgaagagcgtggccaaggagaaggacgacctgcagagactgcaggaggtgctgcagagcgagagcgaccagctgaaggagaacatcaaggagatcgtggccaagcacctggagaccgaggaggagctgaaggtggcccactgctgcctgaaggagcaggaggagaccatcaacgagctgagagtgaacctgagcgagaaggagaccgagatcagcaccatccagaagcagctggaggccatcaacgacaagctgcagaacaagatccaggagatctacgagaaggaggagcagttcaacatcaagcagatcagcgaggtgcaggagaaggtgaacgagctgaagcagttcaaggagcacagaaaggccaaggacagcgccctgcagagcatcgagagcaagatgctggagctgaccaacagactgcaggagagccaggaggagatccagatcatgatcaaggagaaggaggagatgaagagagtgcaggaggccctgcagatcgagagagaccagctgaaggagaacaccaaggagatcgtggccaagatgaaggagagccaggagaaggagtaccagttcctgaagatgaccgccgtgaacgagacccaggagaagatgtgcgagatcgagcacctgaaggagcagttcgagacccagaagctgaacctggagaacatcgagaccgagaacatcagactgacccagatcctgcacgagaacctggaggagatgagaagcgtgaccaaggagagagacgacctgagaagcgtggaggagaccctgaaggtggagagagaccagctgaaggagaacctgagagagaccatcaccagagacctggagaagcaggaggagctgaagatcgtgcacatgcacctgaaggagcaccaggagaccatcgacaagctgagaggcatcgtgagcgagaagaccaacgagatcagcaacatgcagaaggacctggagcacagcaacgacgccctgaaggcccaggacctgaagatccaggaggagctgagaatcgcccacatgcacctgaaggagcagcaggagaccatcgacaagctgagaggcatcgtgagcgagaagaccgacaagctgagcaacatgcagaaggacctggagaacagcaacgccaagctgcaggagaagatccaggagctgaaggccaacgagcaccagctgatcaccctgaagaaggacgtgaacgagacccagaagaaggtgagcgagatggagcagctgaagaagcagatcaaggaccagagcctgaccctgagcaagctggagatcgagaacctgaacctggcccagaagctgcacgagaacctggaggagatgaagagcgtgatgaaggagagagacaacctgagaagagtggaggagaccctgaagctggagagagaccagctgaaggagagcctgcaggagaccaaggccagagacctggagatccagcaggagctgaagaccgccagaatgctgagcaaggagcacaaggagaccgtggacaagctgagagagaagatcagcgagaagaccatccagatcagcgacatccagaaggacctggacaagagcaaggacgagctgcagaagaagatccaggagctgcagaagaaggagctgcagctgctgagagtgaaggaggacgtgaacatgagccacaagaagatcaacgagatggagcagctgaagaagcagttcgaggcccagaacctgagcatgcagagcgtgagaatggacaacttccagctgaccaagaagctgcacgagagcctggaggagatcagaatcgtggccaaggagagagacgagctgagaagaatcaaggagagcctgaagatggagagagaccagttcatcgccaccctgagagagatgatcgccagagacagacagaaccaccaggtgaagcccgagaagagactgctgagcgacggccagcagcacctgaccgagagcctgagagagaagtgcagcagaatcaaggagctgctgaagagatacagcgagatggacgaccactacgagtgcctgaacagactgagcctggacctggagaaggagatcgagttccagaaggagctgagcatgagagtgaaggccaacctgagcctgccctacctgcagaccaagcacatcgagaagctgttcaccgccaaccagagatgcagcatggagttccacagaatcatgaagaagctgaagtacgtgctgagctacgtgaccaagatcaaggaggagcagcacgagagcatcaacaagttcgagatggacttcatcgacgaggtggagaagcagaaggagctgctgatcaagatccagcacctgcagcaggactgcgacgtgcccagcagagagctgagagacctgaagctgaaccagaacatggacctgcacatcgaggagatcctgaaggacttcagcgagagcgagttccccagcatcaagaccgagttccagcaggtgctgagcaacagaaaggagatgacccagttcctggaggagtggctgaacaccagattcgacatcgagaagctgaagaacggcatccagaaggagaacgacagaatctgccaggtgaacaacttcttcaacaacagaatcatcgccatcatgaacgagagcaccgagttcgaggagagaagcgccaccatcagcaaggagtgggagcaggacctgaagagcctgaaggagaagaacgagaagctgttcaagaactaccagaccctgaagaccagcctggccagcggcgcccaggtgaaccccaccacccaggacaacaagaacccccacgtgaccagcagagccacccagctgaccaccgagaagatcagagagctggagaacagcctgcacgaggccaaggagagcgccatgcacaaggagagcaagatcatcaagatgcagaaggagctggaggtgaccaacgacatcatcgccaagctgcaggccaaggtgcacgagagcaacaagtgcctggagaagaccaaggagaccatccaggtgctgcaggacaaggtggccctgggcgccaagccctacaaggaggagatcgaggacctgaagatgaagctggtgaagatcgacctggagaagatgaagaacgccaaggagttcgagaaggagatcagcgccaccaaggccaccgtggagtaccagaaggaggtgatcagactgctgagagagaacctgagaagaagccagcaggcccaggacaccagcgtgatcagcgagcacaccgacccccagcccagcaacaagcccctgacctgcggcggcggcagcggcatcgtgcagaacaccaaggccctgatcctgaagagcgagcacatcagactggagaaggagatcagcaagctgaagcagcagaacgagcagctgatcaagcagaagaacgagctgctgagcaacaaccagcacctgagcaacgaggtgaagacctggaaggagagaaccctgaagagagaggcccacaagcaggtgacctgcgagaacagccccaagagccccaaggtgaccggcaccgccagcaagaagaagcagatcacccccagccagtgcaaggagagaaacctgcaggaccccgtgcccaaggagagccccaagagctgcttcttcgacagcagaagcaagagcctgcccagcccccaccccgtgagatacttcgacaacagcagcctgggcctgtgccccgaggtgcagaacgccggcgccgagagcgtggacagccagcccggcccctggcacgccagcagcggcaaggacgtgcccgagtgcaagacccagtag

SEQ ID NO: 76226 - DNA, 7743 bp, synthetic construct
  misc_feature 1..7743: note = Description of Artificial Sequence: Synthetic coding sequence
  source 1..7743: mol_type = other DNA
atggccgaggagggcgccgtggccgtgtgcgtgagagtgagacccctgaacagcagagaggagagcctgggcgagaccgcccaggtgtactggaagaccgacaacaacgtgatctaccaggtggacggcagcaagagcttcaacttcgacagagtgttccacggcaacgagaccaccaagaacgtgtacgaggagatcgccgcccccatcatcgacagcgccatccagggctacaacggcaccatcttcgcctacggccagaccgccagcggcaagacctacaccatgatgggcagcgaggaccacctgggcgtgatccccagagccatccacgacatcttccagaagatcaagaagttccccgacagagagttcctgctgagagtgagctacatggagatctacaacgagaccatcaccgacctgctgtgcggcacccagaagatgaagcccctgatcatcagagaggacgtgaacagaaacgtgtacgtggccgacctgaccgaggaggtggtgtacaccagcgagatggccctgaagtggatcaccaagggcgagaagagcagacactacggcgagaccaagatgaaccagagaagcagcagaagccacaccatcttcagaatgatcctggagagcagagagaagggcgagcccagcaactgcgagggcagcgtgaaggtgagccacctgaacctggtggacctggccggcagcgagagagccgcccagaccggcgccgccggcgtgagactgaaggagggctgcaacatcaacagaagcctgttcatcctgggccaggtgatcaagaagctgagcgacggccaggtgggcggcttcatcaactacagagacagcaagctgaccagaatcctgcagaacagcctgggcggcaacgccaagaccagaatcatctgcaccatcacccccgtgagcttcgacgagaccctgaccgccctgcagttcgccagcaccgccaagtacatgaagaacaccccctacgtgaacgaggtgagcaccgacgaggccctgctgaagagatacagaaaggagatcatggacctgaagaagcagctggaggaggtgagcctggagaccagagcccaggccatggagaaggaccagctggcccagctgctggaggagaaggacctgctgcagaaggtgcagaacgagaagatcgagaacctgaccagaatgctggtgaccagcagcagcctgaccctgcagcaggagctgaaggccaagagaaagagaagagtgacctggtgcctgggcaagatcaacaagatgaagaacagcaactacgccgaccagttcaacatccccaccaacatcaccaccaagacccacaagctgagcatcaacctgctgagagagatcgacgagagcgtgtgcagcgagagcgacgtgttcagcaacaccctggacaccctgagcgagatcgagtggaaccccgccaccaagctgctgaaccaggagaacatcgagagcgagctgaacagcctgagagccgactacgacaacctggtgctggactacgagcagctgagaaccgagaaggaggagatggagctgaagctgaaggagaagaacgacctggacgagttcgaggccctggagagaaagaccaagaaggaccaggagaacgagctgagcagcaaggtggagctgctgagagagaaggaggaccagatcaagaagctgcaggagtacatcgacagccagaagctggagaacatcaagatggacctgagctacagcctggagagcatcgaggaccccaagcagatgaagcagaccctgttcgacgccgagaccgtggccctggacgccaagagagagagcgccttcctgagaagcgagaacctggagctgaaggagaagatgaaggagctggccaccacctacaagcagatggagaacgacatccagctgtaccagagccagctggaggccaagaagaagatgcaggtggacctggagaaggagctgcagagcgccttcaacgagatcaccaagctgaccagcctgatcgacggcaaggtgcccaaggacctgctgtgcaacctggagctggagggcaagatcaccgacctgcagaaggagctgaacaaggaggtggaggagaacgaggccctgagagaggaggtgatcctgctgagcgagctgaagagcctgcccagcgaggtggagagactgagaaaggagatccaggacaagagcgaggagctgcacatcatcaccagcgagaaggacaagctgttcagcgaggtggtgcacaaggagagcagagtgcagggcctgctggaggagatcggcaagaccaaggacgacctggccaccacccagagcaactacaagagcaccgaccaggagttccagaacttcaagaccctgcacatggacttcgagcagaagtacaagatggtgctggaggagaacgagagaatgaaccaggagatcgtgaacctgagcaaggaggcccagaagttcgacagcagcctgggcgccctgaagaccgagctgagctacaagacccaggagctgcaggagaagaccagagaggtgcaggagagactgaacgagatggagcagctgaaggagcagctggagaacagagacagcaccctgcagaccgtggagagagagaagaccctgatcaccgagaagctgcagcagaccctggaggaggtgaagaccctgacccaggagaaggacgacctgaagcagctgcaggagagcctgcagatcgagagagaccagctgaagagcgacatccacgacaccgtgaacatgaacatcgacacccaggagcagctgagaaacgccctggagagcctgaagcagcaccaggagaccatcaacaccctgaagagcaagatcagcgaggaggtgagcagaaacctgcacatggaggagaacaccggcgagaccaaggacgagttccagcagaagatggtgggcatcgacaagaagcaggacctggaggccaagaacacccagaccctgaccgccgacgtgaaggacaacgagatcatcgagcagcagagaaagatcttcagcctgatccaggagaagaacgagctgcagcagatgctggagagcgtgatcgccgagaaggagcagctgaagaccgacctgaaggagaacatcgagatgaccatcgagaaccaggaggagctgagactgctgggcgacgagctgaagaagcagcaggagatcgtggcccaggagaagaaccacgccatcaagaaggagggcgagctgagcagaacctgcgacagactggccgaggtggaggagaagctgaaggagaagagccagcagctgcaggagaagcagcagcagctgctgaacgtgcaggaggagatgagcgagatgcagaagaagatcaacgagatcgagaacctgaagaacgagctgaagaacaaggagctgaccctggagcacatggagaccgagagactggagctggcccagaagctgaacgagaactacgaggaggtgaagagcatcaccaaggagagaaaggtgctgaaggagctgcagaagagcttcgagaccgagagagaccacctgagaggctacatcagagagatcgaggccaccggcctgcagaccaaggaggagctgaagatcgcccacatccacctgaaggagcaccaggagaccatcgacgagctgagaagaagcgtgagcgagaagaccgcccagatcatcaacacccaggacctggagaagagccacaccaagctgcaggaggagatccccgtgctgcacgaggagcaggagctgctgcccaacgtgaaggaggtgagcgagacccaggagaccatgaacgagctggagctgctgaccgagcagagcaccaccaaggacagcaccaccctggccagaatcgagatggagagactgagactgaacgagaagttccaggagagccaggaggagatcaagagcctgaccaaggagagagacaacctgaagaccatcaaggaggccctggaggtgaagcacgaccagctgaaggagcacatcagagagaccctggccaagatccaggagagccagagcaagcaggagcagagcctgaacatgaaggagaaggacaacgagaccaccaagatcgtgagcgagatggagcagttcaagcccaaggacagcgccctgctgagaatcgagatcgagatgctgggcctgagcaagagactgcaggagagccacgacgagatgaagagcgtggccaaggagaaggacgacctgcagagactgcaggaggtgctgcagagcgagagcgaccagctgaaggagaacatcaaggagatcgtggccaagcacctggagaccgaggaggagctgaaggtggcccactgctgcctgaaggagcaggaggagaccatcaacgagctgagagtgaacctgagcgagaaggagaccgagatcagcaccatccagaagcagctggaggccatcaacgacaagctgcagaacaagatccaggagatctacgagaaggaggagcagttcaacatcaagcagatcagcgaggtgcaggagaaggtgaacgagctgaagcagttcaaggagcacagaaaggccaaggacagcgccctgcagagcatcgagagcaagatgctggagctgaccaacagactgcaggagagccaggaggagatccagatcatgatcaaggagaaggaggagatgaagagagtgcaggaggccctgcagatcgagagagaccagctgaaggagaacaccaaggagatcgtggccaagatgaaggagagccaggagaaggagtaccagttcctgaagatgaccgccgtgaacgagacccaggagaagatgtgcgagatcgagcacctgaaggagcagttcgagacccagaagctgaacctggagaacatcgagaccgagaacatcagactgacccagatcctgcacgagaacctggaggagatgagaagcgtgaccaaggagagagacgacctgagaagcgtggaggagaccctgaaggtggagagagaccagctgaaggagaacctgagagagaccatcaccagagacctggagaagcaggaggagctgaagatcgtgcacatgcacctgaaggagcaccaggagaccatcgacaagctgagaggcatcgtgagcgagaagaccaacgagatcagcaacatgcagaaggacctggagcacagcaacgacgccctgaaggcccaggacctgaagatccaggaggagctgagaatcgcccacatgcacctgaaggagcagcaggagaccatcgacaagctgagaggcatcgtgagcgagaagaccgacaagctgagcaacatgcagaaggacctggagaacagcaacgccaagctgcaggagaagatccaggagctgaaggccaacgagcaccagctgatcaccctgaagaaggacgtgaacgagacccagaagaaggtgagcgagatggagcagctgaagaagcagatcaaggaccagagcctgaccctgagcaagctggagatcgagaacctgaacctggcccagaagctgcacgagaacctggaggagatgaagagcgtgatgaaggagagagacaacctgagaagagtggaggagaccctgaagctggagagagaccagctgaaggagagcctgcaggagaccaaggccagagacctggagatccagcaggagctgaagaccgccagaatgctgagcaaggagcacaaggagaccgtggacaagctgagagagaagatcagcgagaagaccatccagatcagcgacatccagaaggacctggacaagagcaaggacgagctgcagaagaagcaggacagacagaaccaccaggtgaagcccgagaagagactgctgagcgacggccagcagcacctgaccgagagcctgagagagaagtgcagcagaatcaaggagctgctgaagagatacagcgagatggacgaccactacgagtgcctgaacagactgagcctggacctggagaaggagatcgagttccagaaggagctgagcatgagagtgaaggccaacctgagcctgccctacctgcagaccaagcacatcgagaagctgttcaccgccaaccagagatgcagcatggagttccacagaatcatgaagaagctgaagtacgtgctgagctacgtgaccaagatcaaggaggagcagcacgagagcatcaacaagttcgagatggacttcatcgacgaggtggagaagcagaaggagctgctgatcaagatccagcacctgcagcaggactgcgacgtgcccagcagagagctgagagacctgaagctgaaccagaacatggacctgcacatcgaggagatcctgaaggacttcagcgagagcgagttccccagcatcaagaccgagttccagcaggtgctgagcaacagaaaggagatgacccagttcctggaggagtggctgaacaccagattcgacatcgagaagctgaagaacggcatccagaaggagaacgacagaatctgccaggtgaacaacttcttcaacaacagaatcatcgccatcatgaacgagagcaccgagttcgaggagagaagcgccaccatcagcaaggagtgggagcaggacctgaagagcctgaaggagaagaacgagaagctgttcaagaactaccagaccctgaagaccagcctggccagcggcgcccaggtgaaccccaccacccaggacaacaagaacccccacgtgaccagcagagccacccagctgaccaccgagaagatcagagagctggagaacagcctgcacgaggccaaggagagcgccatgcacaaggagagcaagatcatcaagatgcagaaggagctggaggtgaccaacgacatcatcgccaagctgcaggccaaggtgcacgagagcaacaagtgcctggagaagaccaaggagaccatccaggtgctgcaggacaaggtggccctgggcgccaagccctacaaggaggagatcgaggacctgaagatgaagctggtgaagatcgacctggagaagatgaagaacgccaaggagttcgagaaggagatcagcgccaccaaggccaccgtggagtaccagaaggaggtgatcagactgctgagagagaacctgagaagaagccagcaggcccaggacaccagcgtgatcagcgagcacaccgacccccagcccagcaacaagcccctgacctgcggcggcggcagcggcatcgtgcagaacaccaaggccctgatcctgaagagcgagcacatcagactggagaaggagatcagcaagctgaagcagcagaacgagcagctgatcaagcagaagaacgagctgctgagcaacaaccagcacctgagcaacgaggtgaagacctggaaggagagaaccctgaagagagaggcccacaagcaggtgacctgcgagaacagccccaagagccccaaggtgaccggcaccgccagcaagaagaagcagatcacccccagccagtgcaaggagagaaacctgcaggaccccgtgcccaaggagagccccaagagctgcttcttcgacagcagaagcaagagcctgcccagcccccaccccgtgagatacttcgacaacagcagcctgggcctgtgccccgaggtgcagaacgccggcgccgagagcgtggacagccagcccggcccctggcacgccagcagcggcaaggacgtgcccgagtgcaagacccagtag

SEQ ID NO: 76227 - DNA, 7038 bp, synthetic construct
  misc_feature 1..7038: note = Description of Artificial Sequence: Synthetic coding sequence
  source 1..7038: mol_type = other DNA
atggccgaggagggcgccgtggccgtgtgcgtgagagtgagacccctgaacagcagagaggagagcctgggcgagaccgcccaggtgtactggaagaccgacaacaacgtgatctaccaggtggacggcagcaagagcttcaacttcgacagagtgttccacggcaacgagaccaccaagaacgtgtacgaggagatcgccgcccccatcatcgacagcgccatccagggctacaacggcaccatcttcgcctacggccagaccgccagcggcaagacctacaccatgatgggcagcgaggaccacctgggcgtgatccccagagccatccacgacatcttccagaagatcaagaagttccccgacagagagttcctgctgagagtgagctacatggagatctacaacgagaccatcaccgacctgctgtgcggcacccagaagatgaagcccctgatcatcagagaggacgtgaacagaaacgtgtacgtggccgacctgaccgaggaggtggtgtacaccagcgagatggccctgaagtggatcaccaagggcgagaagagcagacactacggcgagaccaagatgaaccagagaagcagcagaagccacaccatcttcagaatgatcctggagagcagagagaagggcgagcccagcaactgcgagggcagcgtgaaggtgagccacctgaacctggtggacctggccggcagcgagagagccgcccagaccggcgccgccggcgtgagactgaaggagggctgcaacatcaacagaagcctgttcatcctgggccaggtgatcaagaagctgagcgacggccaggtgggcggcttcatcaactacagagacagcaagctgaccagaatcctgcagaacagcctgggcggcaacgccaagaccagaatcatctgcaccatcacccccgtgagcttcgacgagaccctgaccgccctgcagttcgccagcaccgccaagtacatgaagaacaccccctacgtgaacgaggtgagcaccgacgaggccctgctgaagagatacagaaaggagatcatggacctgaagaagcagctggaggaggtgagcctggagaccagagcccaggccatggagaaggaccagctggcccagctgctggaggagaaggacctgctgcagaaggtgcagaacgagaagatcgagaacctgaccagaatgctggtgaccagcagcagcctgaccctgcagcaggagctgaaggccaagagaaagagaagagtgacctggtgcctgggcaagatcaacaagatgaagaacagcaactacgccgaccagttcaacatccccaccaacatcaccaccaagacccacaagctgagcatcaacctgctgagagagatcgacgagagcgtgtgcagcgagagcgacgtgttcagcaacaccctggacaccctgagcgagatcgagtggaaccccgccaccaagctgctgaaccaggagaacatcgagagcgagctgaacagcctgagagccgactacgacaacctggtgctggactacgagcagctgagaaccgagaaggaggagatggagctgaagctgaaggagaagaacgacctggacgagttcgaggccctggagagaaagaccaagaaggaccaggagatgcagctgatccacgagatcagcaacctgaagaacctggtgaagcacgccgaggtgtacaaccaggacctggagaacgagctgagcagcaaggtggagctgctgagagagaaggaggaccagatcaagaagctgcaggagtacatcgacagccagaagctggagaacatcaagatggacctgagctacagcctggagagcatcgaggaccccaagcagatgaagcagaccctgttcgacgccgagaccgtggccctggacgccaagagagagagcgccttcctgagaagcgagaacctggagctgaaggagaagatgaaggagctggccaccacctacaagcagatggagaacgacatccagctgtaccagagccagctggaggccaagaagaagatgcaggtggacctggagaaggagctgcagagcgccttcaacgagatcaccaagctgaccagcctgatcgacggcaaggtgcccaaggacctgctgtgcaacctggagctggagggcaagatcaccgacctgcagaaggagctgaacaaggaggtggaggagaacgaggccctgagagaggaggtgatcctgctgagcgagctgaagagcctgcccagcgaggtggagagactgagaaaggagatccaggacaagagcgaggagctgcacatcatcaccagcgagaaggacaagctgttcagcgaggtggtgcacaaggagagcagagtgcagggcctgctggaggagatcggcaagaccaaggacgacctggccaccacccagagcaactacaagagcaccgaccaggagttccagaacttcaagaccctgcacatggacttcgagcagaagtacaagatggtgctggaggagaacgagagaatgaaccaggagatcgtgaacctgagcaaggaggcccagaagttcgacagcagcctgggcgccctgaagaccgagctgagctacaagacccaggagctgcaggagaagaccagagaggtgcaggagagactgaacgagatggagcagctgaaggagcagctggagaacagagacagcaccctgcagaccgtggagagagagaagaccctgatcaccgagaagctgcagcagaccctggaggaggtgaagaccctgacccaggagaaggacgacctgaagcagctgcaggagagcctgcagatcgagagagaccagctgaagagcgacatccacgacaccgtgaacatgaacatcgacacccaggagcagctgagaaacgccctggagagcctgaagcagcaccaggagaccatcaacaccctgaagagcaagatcagcgaggaggtgagcagaaacctgcacatggaggagaacaccggcgagaccaaggacgagttccagcagaagatggtgggcatcgacaagaagcaggacctggaggccaagaacacccagaccctgaccgccgacgtgaaggacaacgagatcatcgagcagcagagaaagatcttcagcctgatccaggagaagaacgagctgcagcagatgctggagagcgtgatcgccgagaaggagcagctgaagaccgacctgaaggagaacatcgagatgaccatcgagaaccaggaggagctgagactgctgggcgacgagctgaagaagcagcaggagatcgtggcccaggagaagaaccacgccatcaagaaggagggcgagctgagcagaacctgcgacagactggccgaggtggaggagaagctgaaggagaagagccagcagctgcaggagaagcagcagcagctgctgaacgtgcaggaggagatgagcgagatgcagaagaagatcaacgagatcgagaacctgaagaacgagctgaagaacaaggagctgaccctggagcacatggagaccgagagactggagctggcccagaagctgaacgagaactacgaggaggtgaagagcatcaccaaggagagaaaggtgctgaaggagctgcagaagagcttcgagaccgagagagaccacctgagaggctacatcagagagatcgaggccaccggcctgcagaccaaggaggagctgaagatcgcccacatccacctgaaggagcaccaggagaccatcgacgagctgagaagaagcgtgagcgagaagaccgcccagatcatcaacacccaggacctggagaagagccacaccaagctgcaggaggagatccccgtgctgcacgaggagcaggagctgctgcccaacgtgaaggaggtgagcgagacccaggagaccatgaacgagctggagctgctgaccgagcagagcaccaccaaggacagcaccaccctggccagaatcgagatggagagactgagactgaacgagaagttccaggagagccaggaggagatcaagagcctgaccaaggagagagacaacctgaagaccatcaaggaggccctggaggtgaagcacgaccagctgaaggagcacatcagagagaccctggccaagatccaggagagccagagcaagcaggagcagagcctgaacatgaaggagaaggacaacgagaccaccaagatcgtgagcgagatggagcagttcaagcccaaggacagcgccctgctgagaatcgagatcgagatgctgggcctgagcaagagactgcaggagagccacgacgagatgaagagcgtggccaaggagaaggacgacctgcagagactgcaggaggtgctgcagagcgagagcgaccagctgaaggagaacatcaaggagatcgtggccaagcacctggagaccgaggaggagctgaaggtggcccactgctgcctgaaggagcaggaggagaccatcaacgagctgagagtgaacctgagcgagaaggagaccgagatcagcaccatccagaagcagctggaggccatcaacgacaagctgcagaacaagatccaggagatctacgagaaggaggagcagttcaacatcaagcagatcagcgaggtgcaggagaaggtgaacgagctgaagcagttcaaggagcacagaaaggccaaggacagcgccctgcagagcatcgagagcaagatgctggagctgaccaacagactgcaggagagccaggaggagatccagatcatgatcaaggagaaggaggagatgaagagagtgcaggaggccctgcagatcgagagagaccagctgaaggagaacaccaaggagatcgtggccaagatgaaggagagccaggagaaggagtaccagttcctgaagatgaccgccgtgaacgagacccaggagaagatgtgcgagatcgagcacctgaaggagcagttcgagacccagaagctgaacctggagaacatcgagaccgagaacatcagactgacccagatcctgcacgagaacctggaggagatgagaagcgtgaccaaggagagagacgacctgagaagcgtggaggagaccctgaaggtggagagagaccagctgaaggagaacctgagagagaccatcaccagagacctggagaagcaggaggagctgaagatcgtgcacatgcacctgaaggagcaccaggagaccatcgacaagctgagaggcatcgtgagcgagaagaccaacgagatcagcaacatgcagaaggacctggagcacagcaacgacgccctgaaggcccaggacctgaagatccaggaggagctgagaatcgcccacatgcacctgaaggagcagcaggagaccatcgacaagctgagaggcatcgtgagcgagaagaccgacaagctgagcaacatgcagaaggacctggagaacagcaacgccaagctgcaggagaagatccaggagctgaaggccaacgagcaccagctgatcaccctgaagaaggacgtgaacgagacccagaagaaggtgagcgagatggagcagctgaagaagcagatcaaggaccagagcctgaccctgagcaagctggagatcgagaacctgaacctggcccagaagctgcacgagaacctggaggagatgaagagcgtgatgaaggagagagacaacctgagaagagtggaggagaccctgaagctggagagagaccagctgaaggagagcctgcaggagaccaaggccagagacctggagatccagcaggagctgaagaccgccagaatgctgagcaaggagcacaaggagaccgtggacaagctgagagagaagatcagcgagaagaccatccagatcagcgacatccagaaggacctggacaagagcaaggacgagctgcagaagaagatccaggagctgcagaagaaggagctgcagctgctgagagtgaaggaggacgtgaacatgagccacaagaagatcaacgagatggagcagctgaagaagcagttcgaggcccagaacctgagcatgcagagcgtgagaatggacaacttccagctgaccaagaagctgcacgagagcctggaggagatcagaatcgtggccaaggagagagacgagctgagaagaatcaaggagagcctgaagatggagagagaccagttcatcgccaccctgagagagatgatcgccagagacagacagaaccaccaggtgaagcccgagaagagactgctgagcgacggccagcagcacctgaccgagagcctgagagagaagtgcagcagaatcaaggagctgctgaagagatacagcgagatggacgaccactacgagtgcctgaacagactgagcctggacctggagaaggagatcgagttccacagaatcatgaagaagctgaagtacgtgctgagctacgtgaccaagatcaaggaggagcagcacgagagcatcaacaagttcgagatggacttcatcgacgaggtggagaagcagaaggagctgctgatcaagatccagcacctgcagcaggactgcgacgtgcccagcagagagctgagagacctgaagctgaaccagaacatggacctgcacatcgaggagatcctgaaggacttcagcgagagcgagttccccagcatcaagaccgagttccagcaggtgctgagcaacagaaaggagatgacccagttcctggaggagtggctgaacaccagattcgacatcgagaagctgaagaacggcatccagaaggagaacgacagaatctgccaggtgaacaacttcttcaacaacagaatcatcgccatcatgaacgagagcaccgagttcgaggagagaagcgccaccatcagcaaggagtgggagcaggacctgaagagcctgaaggagaagaacgagaagctgttcaagaactaccagaccctgaagaccagcctggccagcggcgcccaggtgaaccccaccacccaggacaacaagaacccccacgtgaccagcagagccacccagctgaccaccgagtag

SEQ ID NO: 76228 - DNA, 9345 bp, synthetic construct
  misc_feature 1..9345: note = Description of Artificial Sequence: Synthetic coding sequence
  source 1..9345: mol_type = other DNA
atgagctgggccctggaggagtggaaggagggcctgcccaccagagccctgcagaagatccaggagctggagggccagctggacaagctgaagaaggagaagcagcagagacagttccagctggacagcctggaggccgccctgcagaagcagaagcagaaggtggagaacgagaagaccgagggcaccaacctgaagagagagaaccagagactgatggagatctgcgagagcctggagaagaccaagcagaagatcagccacgagctgcaggtgaaggagagccaggtgaacttccaggagggccagctgaacagcggcaagaagcagatcgagaagctggagcaggagctgaagagatgcaagagcgagctggagagaagccagcaggccgcccagagcgccgacgtgagcctgaacccctgcaacaccccccagaagatcttcaccacccccctgacccccagccagtactacagcggcagcaagtacgaggacctgaaggagaagtacaacaaggaggtggaggagagaaagagactggaggccgaggtgaaggccctgcaggccaagaaggccagccagaccctgccccaggccaccatgaaccacagagacatcgccagacaccaggccagcagcagcgtgttcagctggcagcaggagaagacccccagccacctgagcagcaacagccagagaacccccatcagaagagacttcagcgccagctacttcagcggcgagcaggaggtgacccccagcagaagcaccctgcagatcggcaagagagacgccaacagcagcttcttcgacaacagcagcagcccccacctgctggaccagctgaaggcccagaaccaggagctgagaaacaagatcaacgagctggagctgagactgcagggccacgagaaggagatgaagggccaggtgaacaagttccaggagctgcagctgcagctggagaaggccaaggtggagctgatcgagaaggagaaggtgctgaacaagtgcagagacgagctggtgagaaccaccgcccagtacgaccaggccagcaccaagtacaccgccctggagcagaagctgaagaagctgaccgaggacctgagctgccagagacagaacgccgagagcgccagatgcagcctggagcagaagatcaaggagaaggagaaggagttccaggaggagctgagcagacagcagagaagcttccagaccctggaccaggagtgcatccagatgaaggccagactgacccaggagctgcagcaggccaagaacatgcacaacgtgctgcaggccgagctggacaagctgaccagcgtgaagcagcagctggagaacaacctggaggagttcaagcagaagctgtgcagagccgagcaggccttccaggccagccagatcaaggagaacgagctgagaagaagcatggaggagatgaagaaggagaacaacctgctgaagagccacagcgagcagaaggccagagaggtgtgccacctggaggccgagctgaagaacatcaagcagtgcctgaaccagagccagaacttcgccgaggagatgaaggccaagaacaccagccaggagaccatgctgagagacctgcaggagaagatcaaccagcaggagaacagcctgaccctggagaagctgaagctggccgtggccgacctggagaagcagagagactgcagccaggacctgctgaagaagagagagcaccacatcgagcagctgaacgacaagctgagcaagaccgagaaggagagcaaggccctgctgagcgccctggagctgaagaagaaggagtacgaggagctgaaggaggagaagaccctgttcagctgctggaagagcgagaacgagaagctgctgacccagatggagagcgagaaggagaacctgcagagcaagatcaaccacctggagacctgcctgaagacccagcagatcaagagccacgagtacaacgagagagtgagaaccctggagatggacagagagaacctgagcgtggagatcagaaacctgcacaacgtgctggacagcaagagcgtggaggtggagacccagaagctggcctacatggagctgcagcagaaggccgagttcagcgaccagaagcaccagaaggagatcgagaacatgtgcctgaagaccagccagctgaccggccaggtggaggacctggagcacaagctgcagctgctgagcaacgagatcatggacaaggacagatgctaccaggacctgcacgccgagtacgagagcctgagagacctgctgaagagcaaggacgccagcctggtgaccaacgaggaccaccagagaagcctgctggccttcgaccagcagcccgccatgcaccacagcttcgccaacatcatcggcgagcagggcagcatgcccagcgagagaagcgagtgcagactggaggccgaccagagccccaagaacagcgccatcctgcagaacagagtggacagcctggagttcagcctggagagccagaagcagatgaacagcgacctgcagaagcagtgcgaggagctggtgcagatcaagggcgagatcgaggagaacctgatgaaggccgagcagatgcaccagagcttcgtggccgagaccagccagagaatcagcaagctgcaggaggacaccagcgcccaccagaacgtggtggccgagaccctgagcgccctggagaacaaggagaaggagctgcagctgctgaacgacaaggtggagaccgagcaggccgagatccaggagctgaagaagagcaaccacctgctggaggacagcctgaaggagctgcagctgctgagcgagaccctgagcctggagaagaaggagatgagcagcatcatcagcctgaacaagagagagatcgaggagctgacccaggagaacggcaccctgaaggagatcaacgccagcctgaaccaggagaagatgaacctgatccagaagagcgagagcttcgccaactacatcgacgagagagagaagagcatcagcgagctgagcgaccagtacaagcaggagaagctgatcctgctgcagagatgcgaggagaccggcaacgcctacgaggacctgagccagaagtacaaggccgcccaggagaagaacagcaagctggagtgcctgctgaacgagtgcaccagcctgtgcgagaacagaaagaacgagctggagcagctgaaggaggccttcgccaaggagcaccaggagttcctgaccaagctggccttcgccgaggagagaaaccagaacctgatgctggagctggagaccgtgcagcaggccctgagaagcgagatgaccgacaaccagaacaacagcaagagcgaggccggcggcctgaagcaggagatcatgaccctgaaggaggagcagaacaagatgcagaaggaggtgaacgacctgctgcaggagaacgagcagctgatgaaggtgatgaagaccaagcacgagtgccagaacctggagagcgagcccatcagaaacagcgtgaaggagagagagagcgagagaaaccagtgcaacttcaagccccagatggacctggaggtgaaggagatcagcctggacagctacaacgcccagctggtgcagctggaggccatgctgagaaacaaggagctgaagctgcaggagagcgagaaggagaaggagtgcctgcagcacgagctgcagaccatcagaggcgacctggagaccagcaacctgcaggacatgcagagccaggagatcagcggcctgaaggactgcgagatcgacgccgaggagaagtacatcagcggcccccacgagctgagcaccagccagaacgacaacgcccacctgcagtgcagcctgcagaccaccatgaacaagctgaacgagctggagaagatctgcgagatcctgcaggccgagaagtacgagctggtgaccgagctgaacgacagcagaagcgagtgcatcaccgccaccagaaagatggccgaggaggtgggcaagctgctgaacgaggtgaagatcctgaacgacgacagcggcctgctgcacggcgagctggtggaggacatccccggcggcgagttcggcgagcagcccaacgagcagcaccccgtgagcctggcccccctggacgagagcaacagctacgagcacctgaccctgagcgacaaggaggtgcagatgcacttcgccgagctgcaggagaagttcctgagcctgcagagcgagcacaagatcctgcacgaccagcactgccagatgagcagcaagatgagcgagctgcagacctacgtggacagcctgaaggccgagaacctggtgctgagcaccaacctgagaaacttccagggcgacctggtgaaggagatgcagctgggcctggaggagggcctggtgcccagcctgagcagcagctgcgtgcccgacagcagcagcctgagcagcctgggcgacagcagcttctacagagccctgctggagcagaccggcgacatgagcctgctgagcaacctggagggcgccgtgagcgccaaccagtgcagcgtggacgaggtgttctgcagcagcctgcaggaggagaacctgaccagaaaggagacccccagcgcccccgccaagggcgtggaggagctggagagcctgtgcgaggtgtacagacagagcctggagaagctggaggagaagatggagagccagggcatcatgaagaacaaggagatccaggagctggagcagctgctgagcagcgagagacaggagctggactgcctgagaaagcagtacctgagcgagaacgagcagtggcagcagaagctgaccagcgtgaccctggagatggagagcaagctggccgccgagaagaagcagaccgagcagctgagcctggagctggaggtggccagactgcagctgcagggcctggacctgagcagcagaagcctgctgggcatcgacaccgaggacgccatccagggcagaaacgagagctgcgacatcagcaaggagcacaccagcgagaccaccgagagaacccccaagcacgacgtgcaccagatctgcgacaaggacgcccagcaggacctgaacctggacatcgagaagatcaccgagaccggcgccgtgaagcccaccggcgagtgcagcggcgagcagagccccgacaccaactacgagccccccggcgaggacaagacccagggcagcagcgagtgcatcagcgagctgagcttcagcggccccaacgccctggtgcccatggacttcctgggcaaccaggaggacatccacaacctgcagctgagagtgaaggagaccagcaacgagaacctgagactgctgcacgtgatcgaggacagagacagaaaggtggagagcctgctgaacgagatgaaggagctggacagcaagctgcacctgcaggaggtgcagctgatgaccaagatcgaggcctgcatcgagctggagaagatcgtgggcgagctgaagaaggagaacagcgacctgagcgagaagctggagtacttcagctgcgaccaccaggagctgctgcagagagtggagaccagcgagggcctgaacagcgacctggagatgcacgccgacaagagcagcagagaggacatcggcgacaacgtggccaaggtgaacgacagctggaaggagagattcctggacgtggagaacgagctgagcagaatcagaagcgagaaggccagcatcgagcacgaggccctgtacctggaggccgacctggaggtggtgcagaccgagaagctgtgcctggagaaggacaacgagaacaagcagaaggtgatcgtgtgcctggaggaggagctgagcgtggtgaccagcgagagaaaccagctgagaggcgagctggacaccatgagcaagaagaccaccgccctggaccagctgagcgagaagatgaaggagaagacccaggagctggagagccaccagagcgagtgcctgcactgcatccaggtggccgaggccgaggtgaaggagaagaccgagctgctgcagaccctgagcagcgacgtgagcgagctgctgaaggacaagacccacctgcaggagaagctgcagagcctggagaaggacagccaggccctgagcctgaccaagtgcgagctggagaaccagatcgcccagctgaacaaggagaaggagctgctggtgaaggagagcgagagcctgcaggccagactgagcgagagcgactacgagaagctgaacgtgagcaaggccctggaggccgccctggtggagaagggcgagttcgccctgagactgagcagcacccaggaggaggtgcaccagctgagaagaggcatcgagaagctgagagtgagaatcgaggccgacgagaagaagcagctgcacatcgccgagaagctgaaggagagagagagagagaacgacagcctgaaggacaaggtggagaacctggagagagagctgcagatgagcgaggagaaccaggagctggtgatcctggacgccgagaacagcaaggccgaggtggagaccctgaagacccagatcgaggagatggccagaagcctgaaggtgttcgagctggacctggtgaccctgagaagcgagaaggagaacctgaccaagcagatccaggagaagcagggccagctgagcgagctggacaagctgctgagcagcttcaagagcctgctggaggagaaggagcaggccgagatccagatcaaggaggagagcaagaccgccgtggagatgctgcagaaccagctgaaggagctgaacgaggccgtggccgccctgtgcggcgaccaggagatcatgaaggccaccgagcagagcctggacccccccatcgaggaggagcaccagctgagaaacagcatcgagaagctgagagccagactggaggccgacgagaagaagcagctgtgcgtgctgcagcagctgaaggagagcgagcaccacgccgacctgctgaagggcagagtggagaacctggagagagagctggagatcgccagaaccaaccaggagcacgccgccctggaggccgagaacagcaagggcgaggtggagaccctgaaggccaagatcgagggcatgacccagagcctgagaggcctggagctggacgtggtgaccatcagaagcgagaaggagaacctgaccaacgagctgcagaaggagcaggagagaatcagcgagctggagatcatcaacagcagcttcgagaacatcctgcaggagaaggagcaggagaaggtgcagatgaaggagaagagcagcaccgccatggagatgctgcagacccagctgaaggagctgaacgagagagtggccgccctgcacaacgaccaggaggcctgcaaggccaaggagcagaacctgagcagccaggtggagtgcctggagctggagaaggcccagctgctgcagggcctggacgaggccaagaacaactacatcgtgctgcagagcagcgtgaacggcctgatccaggaggtggaggacggcaagcagaagctggagaagaaggacgaggagatcagcagactgaagaaccagatccaggaccaggagcagctggtgagcaagctgagccaggtggagggcgagcaccagctgtggaaggagcagaacctggagctgagaaacctgaccgtggagctggagcagaagatccaggtgctgcagagcaagaacgccagcctgcaggacaccctggaggtgctgcagagcagctacaagaacctggagaacgagctggagctgaccaagatggacaagatgagcttcgtggagaaggtgaacaagatgaccgccaaggagaccgagctgcagagagagatgcacgagatggcccagaagaccgccgagctgcaggaggagctgagcggcgagaagaacagactggccggcgagctgcagctgctgctggaggagatcaagagcagcaaggaccagctgaaggagctgaccctggagaacagcgagctgaagaagagcctggactgcatgcacaaggaccaggtggagaaggagggcaaggtgagagaggagatcgccgagtaccagctgagactgcacgaggccgagaagaagcaccaggccctgctgctggacaccaacaagcagtacgaggtggagatccagacctacagagagaagctgaccagcaaggaggagtgcctgagcagccagaagctggagatcgacctgctgaagagcagcaaggaggagctgaacaacagcctgaaggccaccacccagatcctggaggagctgaagaagaccaagatggacaacctgaagtacgtgaaccagctgaagaaggagaacgagagagcccagggcaagatgaagctgctgatcaagagctgcaagcagctggaggaggagaaggagatcctgcagaaggagctgagccagctgcaggccgcccaggagaagcagaagaccggcaccgtgatggacaccaaggtggacgagctgaccaccgagatcaaggagctgaaggagaccctggaggagaagaccaaggaggccgacgagtacctggacaagtactgcagcctgctgatcagccacgagaagctggagaaggccaaggagatgctggagacccaggtggcccacctgtgcagccagcagagcaagcaggacagcagaggcagccccctgctgggccccgtggtgcccggccccagccccatccccagcgtgaccgagaagagactgagcagcggccagaacaaggccagcggcaagagacagagaagcagcggcatctgggagaacggcagaggccccacccccgccacccccgagagcttcagcaagaagagcaagaaggccgtgatgagcggcatccaccccgccgaggacaccgagggcaccgagttcgagcccgagggcctgcccgaggtggtgaagaagggcttcgccgacatccccaccggcaagaccagcccctacatcctgagaagaaccaccatggccaccagaaccagccccagactggccgcccagaagctggccctgagccccctgagcctgggcaaggagaacctggccgagagcagcaagcccaccgccggcggcagcagaagccagaaggtgaaggtggcccagagaagccccgtggacagcggcaccatcctgagagagcccaccaccaagagcgtgcccgtgaacaacctgcccgagagaagccccaccgacagccccagagagggcctgagagtgaagagaggcagactggtgcccagccccaaggccggcctggagagcaacggcagcgagaactgcaaggtgcagtag

SEQ ID NO: 76229 - DNA, 528 bp, synthetic construct
  misc_feature 1..528: note = Description of Artificial Sequence: Synthetic coding sequence
  source 1..528: mol_type = other DNA
ctgatgatcaagggcagaaagggcaaggtgaacaagatgaccgccaaggagaccgagctgcagagagagatgcacgagatggcccagaagaccgccgagctgcaggaggagctgagcggcgagaagaacagactggccggcgagctgcagctgctgctggaggagatcaagagcagcaaggaccagctgaaggagctgaccctggagaacagcgagctgaagaagagcctggactgcatgcacaaggaccaggtggagaaggagggcaaggtgagagaggagatcgccgagtaccagctgagactgcacgaggccgagaagaagcaccaggccctgctgctggacaccaacaagcagtacgaggtggagatccagacctacagagagaagctgaccagcaaggaggagtgcctgagcagccagaagctggagatcgacctgctgaagagcagcaaggaggagctgaacaacagcctgaaggccaccacccagatcctggaggagctgaagaagaccaaggagaactag

SEQ ID NO: 76230 - DNA, 4017 bp, synthetic construct
  misc_feature 1..4017: note = Description of Artificial Sequence: Synthetic coding sequence
  source 1..4017: mol_type = other DNA
atgttcctgatgcccaccagcagcgagctgaacagcggccagaacttcctgacccagtggatgaccaaccccagcagagccggcgtgatcctgaacagaggcttccccatcctggaggccgacaaggagaagagagccgccgtggacatcagcaccagcttccccatcaagggcacccacttcagcgacagcttcagcttcatcaacgaggaggacagcctgctggaggagcagaagctggagagcaacaacccctacaagccccagagcgacaagagcgagacccacaccgccttcccctgcatcaagaagggcccccaggtggccgcctgccacagcgcccccggccaccaggaggagaacaagaacgacttcatccccgacctggccagcgagttcaaggagggcgcctacaaggaccccctgttcaagaagctggagcagctgaaggaggtgcagcagaagaagcaggagcagctgaagagacagcagctggagcagctgcagagactgatggaggagcaggagaagctgctgaccatggtgagcggccagtgcaccctgcccggcctgagcctgctgcccgacgaccagagccagaagcacagaagccccggcaacaccaccaccggcgagagagccacctgctgcttccccagctacgtgtaccccgaccccacccaggaggagacctaccccagcaacatcctgagccacgagcagagcaacttctgcagaaccgcccacggcgacttcgtgctgaccagcaagagagccagccccaacctgttcagcgaggcccagtaccaggaggcccccgtggagaagaacaacctgaaggaggagaacagaaaccaccccaccggcgagagcatcctgtgctgggagaaggtgaccgagcagatccaggaggccaacgacaagaacctgcagaagcacgacgacagcagcgaggtggccaacatcgaggagagacccatcaaggccgccatcggcgagagaaagcagaccttcgaggactacctggaggagcagatccagctggaggagcaggagctgaagcagaagcagctgaaggaggccgagggccccctgcccatcaaggccaagcccaagcagcccttcctgaagagaggcgagggcctggccagattcaccaacgccaagagcaagttccagaagggcaaggagagcaagctggtgaccaaccagagcaccagcgaggaccagcccctgttcaagatggacagacagcagctgcagagaaagaccgccctgaagaacaaggagctgtgcgccgacaaccccatcctgaagaaggacagcaaggccagaaccaagagcggcagcgtgaccctgagccagaagcccaagatgctgaagtgcagcaacagaaagagcctgagccccagcggcctgaagatccagaccggcaagaagtgcgacggccagttcagagaccagatcaagttcgagaacaaggtgaccagcaacaacaaggagaacgtgaccgagtgccccaagccctgcgacaccggctgcaccggctggaacaagacccagggcaaggacagactgcccctgagcaccggccccgccagcagactggccgccaagagccccatcagagagaccatgaaggagagcgagagcagcctggacgtgagcctgcagaagaagctggagacctgggagagagagaaggagaaggagaacctggagctggacgagttcctgttcctggagcaggccgccgacgagatcagcttcagcagcaacagcagcttcgtgctgaagatcctggagagagaccagcagatctgcaagggccacagaatgagcagcacccccgtgaaggccgtgccccagaagaccaaccccgccgaccccatcagccactgcaacagaagcgaggacctggaccacaccgccagagagaaggagagcgagtgcgaggtggcccccaagcagctgcacagcctgagcagcgccgacgagctgagagagcagccctgcaagatcagaaaggccgtgcagaagagcaccagcgagaaccagaccgagtggaacgccagagacgacgagggcgtgcccaacagcgacagcagcaccgacagcgaggagcagctggacgtgaccatcaagcccagcaccgaggacagagagagaggcatcagcagcagagaggacagcccccaggtgtgcgacgacaagggccccttcaaggacaccagaacccaggaggacaagagaagagacgtggacctggacctgagcgacaaggactacagcagcgacgagagcatcatggagagcatcaagcacaaggtgagcgagcccagcagaagcagcagcctgagcctgagcaagatggacttcgacgacgagagaacctggaccgacctggaggagaacctgtgcaaccacgacgtggtgctgggcaacgagagcacctacggcaccccccagacctgctaccccaacaacgagatcggcatcctggacaagaccatcaagagaaagatcgcccccgtgaagagaggcgaggacctgagcaagagcagaagaagcagaagcccccccaccagcgagctgatgatgaagttcttccccagcctgaagcccaagcccaagagcgacagccacctgggcaacgagctgaagctgaacatcagccaggaccagccccccggcgacaacgccagaagccaggtgctgagagagaagatcatcgagctggagaccgagatcgagaagttcaaggccgagaacgccagcctggccaagctgagaatcgagagagagagcgccctggagaagctgagaaaggagatcgccgacttcgagcagcagaaggccaaggagctggccagaatcgaggagttcaagaaggaggagatgagaaagctgcagaaggagagaaaggtgttcgagaagtacaccaccgccgccagaaccttccccgacaagaaggagagagaggagatccagaccctgaagcagcagatcgccgacctgagagaggacctgaagagaaaggagaccaagtggagcagcacccacagcagactgagaagccagatccagatgctggtgagagagaacaccgacctgagagaggagatcaaggtgatggagagattcagactggacgcctggaagagagccgaggccatcgagagcagcctggaggtggagaagaaggacaagctggccaacaccagcgtgagattccagaacagccagatcagcagcggcacccaggtggagaagtacaagaagaactacctgcccatgcagggcaacccccccagaagaagcaagagcgccccccccagagacctgggcaacctggacaagggccaggccgccagccccagagagcccctggagcccctgaacttccccgaccccgagtacaaggaggaggaggaggaccaggacatccagggcgagatcagccaccccgacggcaaggtggagaaggtgtacaagaacggctgcagagtgatcctgttccccaacggcaccagaaaggaggtgagcgccgacggcaagaccatcaccgtgaccttcttcaacggcgacgtgaagcaggtgatgcccgaccagagagtgatctactactacgccgccgcccagaccacccacaccacctaccccgagggcctggaggtgctgcacttcagcagcggccagatcgagaagcactaccccgacggcagaaaggagatcaccttccccgaccagaccgtgaagaacctgttccccgacggccaggaggagagcatcttccccgacggcaccatcgtgagagtgcagagagacggcaacaagctgatcgagttcaacaacggccagagagagctgcacaccgcccagttcaagagaagagagtaccccgacggcaccgtgaagaccgtgtacgccaacggccaccaggagaccaagtacagaagcggcagaatcagagtgaaggacaaggagggcaacgtgctgatggacaccgagctgtag

SEQ ID NO: 76231 - DNA, 3411 bp, synthetic construct
  misc_feature 1..3411: note = Description of Artificial Sequence: Synthetic coding sequence
  source 1..3411: mol_type = other DNA
atgttcctgatgcccaccagcagcgagctgaacagcggccagaacttcctgacccagtggatgaccaaccccagcagagccggcgtgatcctgaacagaggcttccccatcctggaggccgacaaggagaagagagccgccgtggacatcagcaccagcttccccatcaagggcacccacttcagcgacagcttcagcttcatcaacgaggaggacagcctgctggaggagcagaagctggagagcaacaacccctacaagccccagagcgacaagagcgagacccacaccgccttcccctgcatcaagaagggcccccaggtggccgcctgccacagcgcccccggccaccaggaggagaacaagaacgacttcatccccgacctggccagcgagttcaaggagggcgcctacaaggaccccctgttcaagaagctggagcagctgaaggaggtgcagcagaagaagcaggagcagctgaagagacagcagctggagcagctgcagagactgatggaggagcaggagaagctgctgaccatggtgagcggccagtgcaccctgcccggcctgagcctgctgcccgacgaccagagccagaagcacagaagccccggcaacaccaccaccggcgagagagccacctgctgcttccccagctacgtgtaccccgaccccacccaggaggagacctaccccagcaacatcctgagccacgagcagagcaacttctgcagaaccgcccacggcgacttcgtgctgaccagcaagagagccagccccaacctgttcagcgaggcccagtaccaggaggcccccgtggagaagaacaacctgaaggaggagaacagaaaccaccccaccggcgagagcatcctgtgctgggagaaggtgaccgagcagatccaggaggccaacgacaagaacctgcagaagcacgacgacagcagcgaggtggccaacatcgaggagagacccatcaaggccgccatcggcgagagaaagcagaccttcgaggactacctggaggagcagatccagctggaggagcaggagctgaagcagaagcagctgaaggaggccgagggccccctgcccatcaaggccaagcccaagcagcccttcctgaagagaggcgagggcctggccagattcaccaacgccaagagcaagttccagaagggcaaggagagcaagctggtgaccaaccagagcaccagcgaggaccagcccctgttcaagatggacagacagcagctgcagagaaagaccgccctgaagaacaaggagctgtgcgccgacaaccccatcctgaagaaggacagcaaggccagaaccaagagcggcagcgtgaccctgagccagaagcccaagatgctgaagtgcagcaacagaaagagcctgagccccagcggcctgaagatccagaccggcaagaagtgcgacggccagttcagagaccagatcaagttcgagaacaaggtgaccagcaacaacaaggagaacgtgaccgagtgccccaagccctgcgacaccggctgcaccggctggaacaagacccagggcaaggacagactgcccctgagcaccggccccgccagcagactggccgccaagagccccatcagagagaccatgaaggagagcgagagcagcctggacgtgagcctgcagaagaagctggagacctgggagagagagaaggagaaggagaacctggagctggacgagttcctgttcctggagcaggccgccgacgagatcagcttcagcagcaacagcagcttcgtgctgaagatcctggagagagaccagcagatctgcaagggccacagaatgagcagcacccccgtgaaggccgtgccccagaagaccaaccccgccgaccccatcagccactgcaacagaagcgaggacctggaccacaccgccagagagaaggagagcgagtgcgaggtggcccccaagcagctgcacagcctgagcagcgccgacgagctgagagagcagccctgcaagatcagaaaggccgtgcagaagagcaccagcgagaaccagaccgagtggaacgccagagacgacgagggcgtgcccaacagcgacagcagcaccgacagcgaggagcagctggacgtgaccatcaagcccagcaccgaggacagagagagaggcatcagcagcagagaggacagcccccaggtgtgcgacgacaagggccccttcaaggacaccagaacccaggaggacaagagaagagacgtggacctggacctgagcgacaaggactacagcagcgacgagagcatcatggagagcatcaagcacaaggtgagcgagcccagcagaagcagcagcctgagcctgagcaagatggacttcgacgacgagagaacctggaccgacctggaggagaacctgtgcaaccacgacgtggtgctgggcaacgagagcacctacggcaccccccagacctgctaccccaacaacgagatcggcatcctggacaagaccatcaagagaaagatcgcccccgtgaagagaggcgaggacctgagcaagagcagaagaagcagaagcccccccaccagcgagctgatgatgaagttcttccccagcctgaagcccaagcccaagagcgacagccacctgggcaacgagctgaagctgaacatcagccaggaccagccccccggcgacaacgccagaagccaggtgctgagagagaagatcatcgagctggagaccgagatcgagaagttcaaggccgagaacgccagcctggccaagctgagaatcgagagagagagcgccctggagaagctgagaaaggagatcgccgacttcgagcagcagaaggccaaggagctggccagaatcgaggagttcaagaaggaggagatgagaaagctgcagaaggagagaaaggtgttcgagaagtacaccaccgccgccagaaccttccccgacaagaaggagagagaggagatccagaccctgaagcagcagatcgccgacctgagagaggacctgaagagaaaggagaccaagtggagcagcacccacagcagactgagaagccagatccagatgctggtgagagagaacaccgacctgagagaggagatcaaggtgatggagagattcagactggacgcctggaagagagccgaggccatcgagagcagcctggaggtggagaagaaggacaagctggccaacaccagcgtgagattccagaacagccagatcagcagcggcacccaggtggagaagtacaagaagaactacctgcccatgcagggcaccgcccagcccccccacacccccagcagcctgctggccgaccacctgccccccctgagcagcttcagacccttcagcagaaacatccagctgtgctacaccttctag

SEQ ID NO: 76232 - DNA, 3261 bp, synthetic construct
  misc_feature 1..3261: note = Description of Artificial Sequence: Synthetic coding sequence
  source 1..3261: mol_type = other DNA
atgttcctgatgcccaccagcagcgagctgaacagcggccagaacttcctgacccagtggatgaccaaccccagcagagccggcgtgatcctgaacagaggcttccccatcctggaggccgacaaggagaagagagccgccgtggacatcagcaccagcttccccatcaagggcacccacttcagcgacagcttcagcttcatcaacgaggaggacagcctgctggaggagcagaagctggagagcaacaacccctacaagccccagagcgacaagagcgagacccacaccgccttcccctgcatcaagaagggcccccaggtggccgcctgccacagcgcccccggccaccaggaggagaacaagaacgacttcatccccgacctggccagcgagttcaaggagggcgcctacaaggaccccctgttcaagaagctggagcagctgaaggaggtgcagcagaagaagcaggagcagctgaagagacagcagctggagcagctgcagagactgatggaggagcaggagaagctgctgaccatggtgagcggccagtgcaccctgcccggcctgagcctgctgcccgacgaccagagccagaagcacagaagccccggcaacaccaccaccggcgagagagccacctgctgcttccccagctacgtgtaccccgaccccacccaggaggagacctaccccagcaacatcctgagccacgagcagagcaacttctgcagaaccgcccacggcgacttcgtgctgaccagcaagagagccagccccaacctgttcagcgaggcccagtaccaggaggcccccgtggagaagaacaacctgaaggaggagaacagaaaccaccccaccggcgagagcatcctgtgctgggagaaggtgaccgagcagatccaggaggccaacgacaagaacctgcagaagcacgacgacagcagcgaggtggccaacatcgaggagagacccatcaaggccgccatcggcgagagaaagcagaccttcgaggactacctggaggagcagatccagctggaggagcaggagctgaagcagaagcagctgaaggaggccgagggccccctgcccatcaaggccaagcccaagcagcccttcctgaagagaggcgagggcctggccagattcaccaacgccaagagcaagttccagaagggcaaggagagcaagctggtgaccaaccagagcaccagcgaggaccagcccctgttcaagatggacagacagcagctgcagagaaagaccgccctgaagaacaaggagctgtgcgccgacaaccccatcctgaagaaggacagcaaggccagaaccaagagcggcagcgtgaccctgagccagaagcccaagatgctgaagtgcagcaacagaaagagcctgagccccagcggcctgaagatccagaccggcaagaagtgcgacggccagttcagagaccagatcaagttcgagaacaaggtgaccagcaacaacaaggagaacgtgaccgagtgccccaagccctgcgacaccggctgcaccggctggaacaagacccagggcaaggacagactgcccctgagcaccggccccgccagcagactggccgccaagagccccatcagagagaccatgaaggagagcgagagcagcctggacgtgagcctgcagaagaagctggagacctgggagagagagaaggagaaggagaacctggagctggacgagttcctgttcctggagcaggccgccgacgagatcagcttcagcagcaacagcagcttcgtgctgaagatcctggagagagaccagcagatctgcaagggccacagaatgagcagcacccccgtgaaggccgtgccccagaagaccaaccccgccgaccccatcagccactgcaacagaagcgaggacctggaccacaccgccagagagaaggagagcgagtgcgaggtggcccccaagcagctgcacagcctgagcagcgccgacgagctgagagagcagccctgcaagatcagaaaggccgtgcagaagagcaccagcgagaaccagaccgagtggaacgccagagacgacgagggcgtgcccaacagcgacagcagcaccgacagcgaggagcagctggacgtgaccatcaagcccagcaccgaggacagagagagaggcatcagcagcagagaggacagcccccaggtgtgcgacgacaagggccccttcaaggacaccagaacccaggaggacaagagaagagacgtggacctggacctgagcgacaaggactacagcagcgacgagagcatcatggagagcatcaagcacaaggtgagcgagcccagcagaagcagcagcctgagcctgagcaagatggacttcgacgacgagagaacctggaccgacctggaggagaacctgtgcaaccacgacgtggtgctgggcaacgagagcacctacggcaccccccagacctgctaccccaacaacgagatcggcatcctggacaagaccatcaagagaaagatcgcccccgtgaagagaggcgaggacctgagcaagagcagaagaagcagaagcccccccaccagcgagctgatgatgaagttcttccccagcctgaagcccaagcccaagagcgacagccacctgggcaacgagctgaagctgaacatcagccaggaccagccccccggcgacaacgccagaagccaggtgctgagagagaagatcatcgagctggagaccgagatcgagaagttcaaggccgagaacgccagcctggccaagctgagaatcgagagagagagcgccctggagaagctgagaaaggagatcgccgacttcgagcagcagaaggccaaggagctggccagaatcgaggagttcaagaaggaggagatgagaaagctgcagaaggagagaaaggtgttcgagaagtacaccaccgccgccagaaccttccccgacaagaaggagagagaggagatccagaccctgaagcagcagatcgccgacctgagagaggacctgaagagaaaggagaccaagtggagcagcacccacagcagactgagaagccagatccagatgctggtgagagagaacaccgacctgagagaggagatcaaggtgatggagagattcagactggacgcctggaagagagccgaggccatcgagagcagcctggaggtggagaagaaggacaagctggccgccatccacctggaggaccccagcctgcacctgctggtgatctag

SEQ ID NO: 76233 - DNA, 1035 bp, synthetic construct
  misc_feature 1..1035: note = Description of Artificial Sequence: Synthetic coding sequence
  source 1..1035: mol_type = other DNA
atggacagctacagcgcccccgagagcacccccagcgccagcagcagacccgaggactacttcatcggcgccacccccctgcagaagagactggagagcgtgagaaagcagagcagcttcatcctgaccccccccagaagaaagatcccccagtgcagccagctgcaggaggacgtggacccccagaaggtggccttcctgctgcacaagcagtggaccctgtacagcctgacccccctgtacaagttcagctacagcaacctgaaggagtacagcagactgctgaacgccttcatcgtggccgagaagcagaagggcctggccgtggaggtgggcgaggacttcaacatcaaggtgatcttcagcaccctgctgggcatgaagggcacccagagagaccccgaggccttcctggtgcagatcgtgagcaagagccagctgcccagcgagaacagagagggcaaggtgctgtggaccggctggttctgctgcgtgttcggcgacagcctgctggagaccgtgagcgaggacttcacctgcctgcccctgttcctggccaacggcgccgagagcaacaccgccatcatcggcacctggttccagaagaccttcgactgctacttcagccccctggccatcaacgccttcaacctgagctggatggccgccatgtggaccgcctgcaagatggaccactacgtggccaccaccgagttcctgtggagcgtgccctgcagcccccagagcctggacatcagcttcgccatccaccccgaggacgccaaggccctgtgggacagcgtgcacaagacccccggcgaggtgacccaggaggaggtggacctgttcatggactgcctgtacagccacttccacagacacttcaagatccacctgagcgccaccagactggtgagagtgagcaccagcgtggccagcgcccacaccgacggcaagatcaagatcctgtgccacaagtacctgatcggcgtgctggcctacctgaccgagctggccatcttccagatcgagtag

SEQ ID NO: 76234 - DNA, 1173 bp, synthetic construct
  misc_feature 1..1173: note = Description of Artificial Sequence: Synthetic coding sequence
  source 1..1173: mol_type = other DNA
atggacagctacagcgcccccgagagcacccccagcgccagcagcagacccgaggactacttcatcggcgccacccccctgcagaagagactggagagcgtgagaaagcagagcagcttcatcctgaccccccccagaagaaagatcccccagtgcagccagctgcaggaggacgtggacccccagaaggtggccttcctgctgcacaagcagtggaccctgtacagcctgacccccctgtacaagttcagctacagcaacctgaaggagtacagcagactgctgaacgccttcatcgtggccgagaagcagaagggcctggccgtggaggtgggcgaggacttcaacatcaaggtgatcttcagcaccctgctgggcatgaagggcacccagagagaccccgaggccttcctggtgcagggcctgatcctgagccccagactggagtacagcggcaccatcctggtggactgcaacctgtgcctgctgggcagcagcgaccccagcaccctggccttccaggtggccggcaccgccggcgcctgccaccacaccagaatcgtgagcaagagccagctgcccagcgagaacagagagggcaaggtgctgtggaccggctggttctgctgcgtgttcggcgacagcctgctggagaccgtgagcgaggacttcacctgcctgcccctgttcctggccaacggcgccgagagcaacaccgccatcatcggcacctggttccagaagaccttcgactgctacttcagccccctggccatcaacgccttcaacctgagctggatggccgccatgtggaccgcctgcaagatggaccactacgtggccaccaccgagttcctgtggagcgtgccctgcagcccccagagcctggacatcagcttcgccatccaccccgaggacgccaaggccctgtgggacagcgtgcacaagacccccggcgaggtgacccaggaggaggtggacctgttcatggactgcctgtacagccacttccacagacacttcaagatccacctgagcgccaccagactggtgagagtgagcaccagcgtggccagcgcccacaccgacggcaagatcaagatcctgtgccacaagtacctgatcggcgtgctggcctacctgaccgagctggccatcttccagatcgagtag

SEQ ID NO: 76235 - DNA, 1035 bp, synthetic construct; identical to SEQ ID NO: 76233
  misc_feature 1..1035: note = Description of Artificial Sequence: Synthetic coding sequence
  source 1..1035: mol_type = other DNA

SEQ ID NO: 76236 - DNA, 615 bp, synthetic construct
  misc_feature 1..615: note = Description of Artificial Sequence: Synthetic coding sequence
  source 1..615: mol_type = other DNA
atggacgagaccgtggccgagttcatcaagagaaccatcctgaagatccccatgaacgagctgaccaccatcctgaaggcctgggacttcctgagcgagaaccagctgcagaccgtgaacttcagacagagaaaggagagcgtggtgcagcacctgatccacctgtgcgaggagaagagagccagcatcagcgacgccgccctgctggacatcatctacatgcagttccaccagcaccagaaggtgtgggaggtgttccagatgagcaagggccccggcgaggacgtggacctgttcgacatgaagcagttcaagaacagcttcaagaagatcctgcagagagccctgaagaacgtgaccgtgagcttcagagagaccgaggagaacgccgtgtggatcagaatcgcctggggcacccagtacaccaagcccaaccagtacaagcccacctacgtggtgtactacagccagaccccctacgccttcaccagcagcagcatgctgagaagaaacacccccctgctgggccaggagctggaggccaccggcaagatctacctgagacaggaggagatcatcctggacatcaccgagatgaagaaggcctgcaactag

SEQ ID NO: 76237 - DNA, 1020 bp, synthetic construct
  misc_feature 1..1020: note = Description of Artificial Sequence: Synthetic coding sequence
  source 1..1020: mol_type = other DNA
atggacgagaccgtggccgagttcatcaagagaaccatcctgaagatccccatgaacgagctgaccaccatcctgaaggcctgggacttcctgagcgagaaccagctgcagaccgtgaacttcagacagagaaaggagagcgtggtgcagcacctgatccacctgtgcgaggagaagagagccagcatcagcgacgccgccctgctggacatcatctacatgcagttccaccagcaccagaaggtgtgggaggtgttccagatgagcaagggccccggcgaggacgtggacctgttcgacatgaagcagttcaagaacagcttcaagaagatcctgcagagagccctgaagaacgtgaccgtgagcttcagagagaccgaggagaacgccgtgtggatcagaatcgcctggggcacccagtacaccaagcccaaccagtacaagcccacctacgtggtgtactacagccagaccccctacgccttcaccagcagcagcatgctgagaagaaacacccccctgctgggccaggccctgaccatcgccagcaagcaccaccagatcgtgaagatggacctgagaagcagatacctggacagcctgaaggccatcgtgttcaagcagtacaaccagaccttcgagacccacaacagcaccacccccctgcaggagagaagcctgggcctggacatcaacatggacagcagaatcatccacgagaacatcgtggagaaggagagagtgcagagaatcacccaggagaccttcggcgactacccccagccccagctggagttcgcccagtacaagctggagaccaagttcaagagcggcctgaacggcagcatcctggccgagagagaggagcccctgagatgcctgatcaagttcagcagcccccacctgctggaggccctgaagagcctggcccccgccggcatcgccgacgcccccctgagccccctgctgacctgcatccccaacaagagaatgaactacttcaagatcagagacaagtag

SEQ ID NO: 76238 - DNA, 918 bp, synthetic construct
  misc_feature 1..918: note = Description of Artificial Sequence: Synthetic coding sequence
  source 1..918: mol_type = other DNA
atggacgagaccgtggccgagttcatcaagagaaccatcctgaagatccccatgaacgagctgaccaccatcctgaaggcctgggacttcctgagcgagaaccagctgcagaccgtgaacttcagacagagaaaggagagcgtggtgcagcacctgatccacctgtgcgaggagaagagagccagcatcagcgacgccgccctgctggacatcatctacatgcagttccaccagcaccagaaggtgtgggaggtgttccagatgagcaagggccccggcgaggacgtggacctgttcgacatgaagcagttcaagaacagcttcaagaagatcctgcagagagccctgaagaacgtgaccgtgagcttcagagagaccgaggagaacgccgtgtggatcagaatcgcctggggcacccagtacaccaagcccaaccagtacaagcccacctacgtggtgtactacagccagaccccctacgccttcaccagcagcagcatgctgagaagaaacacccccctgctgggccagaccttcgagacccacaacagcaccacccccctgcaggagagaagcctgggcctggacatcaacatggacagcagaatcatccacgagaacatcgtggagaaggagagagtgcagagaatcacccaggagaccttcggcgactacccccagccccagctggagttcgcccagtacaagctggagaccaagttcaagagcggcctgaacggcagcatcctggccgagagagaggagcccctgagatgcctgatcaagttcagcagcccccacctgctggaggccctgaagagcctggcccccgccggcatcgccgacgcccccctgagccccctgctgacctgcatccccaacaagagaatgaactacttcaagatcagagacaagtag

SEQ ID NO: 76239 - DNA, 960 bp, synthetic construct
  misc_feature 1..960: note = Description of Artificial Sequence: Synthetic coding sequence
  source 1..960: mol_type = other DNA
atggacgagaccgtggccgagttcatcaagagaaccatcctgaagatccccatgaacgagctgaccaccatcctgaaggcctgggacttcctgagcgagaaccagctgcagaccgtgaacttcagacagagaaaggagagcgtggtgcagcacctgatccacctgtgcgaggagaagagagccagcatcagcgacgccgccctgctggacatcatctgcgaggacgtggacctgttcgacatgaagcagttcaagaacagcttcaagaagatcctgcagagagccctgaagaacgtgaccgtgagcttcagagagaccgaggagaacgccgtgtggatcagaatcgcctggggcacccagtacaccaagcccaaccagtacaagcccacctacgtggtgtactacagccagaccccctacgccttcaccagcagcagcatgctgagaagaaacacccccctgctgggccaggccctgaccatcgccagcaagcaccaccagatcgtgaagatggacctgagaagcagatacctggacagcctgaaggccatcgtgttcaagcagtacaaccagaccttcgagacccacaacagcaccacccccctgcaggagagaagcctgggcctggacatcaacatggacagcagaatcatccacgagaacatcgtggagaaggagagagtgcagagaatcacccaggagaccttcggcgactacccccagccccagctggagttcgcccagtacaagctggagaccaagttcaagagcggcctgaacggcagcatcctggccgagagagaggagcccctgagatgcctgatcaagttcagcagcccccacctgctggaggccctgaagagcctggcccccgccggcatcgccgacgcccccctgagccccctgctgacctgcatccccaacaagagaatgaactacttcaagatcagagacaagtag

SEQ ID NO: 76240 - DNA, 1062 bp, synthetic construct
  misc_feature 1..1062: note = Description of Artificial Sequence: Synthetic coding sequence
  source 1..1062: mol_type = other DNA
atggacgagaccgtggccgagttcatcaagagaaccatcctgaagatccccatgaacgagctgaccaccatcctgaaggcctgggacttcctgagcgagaaccagctgcagaccgtgaacttcagacagagaaaggagagcgtggtgcagcacctgatccacctgtgcgaggagaagagagccagcatcagcgacgccgccctgctggacatcatctacatgcagttccaccagcaccagaaggtgtgggaggtgttccagatgagcaagggccccggcgaggacgtggacctgttcgacatgaagcagttcaagaacagcttcaagaagatcctgcagagagccctgaagaacgtgaccgtgagcttcagagagaccgaggagaacgccgtgtggatcagaatcgcctggggcacccagtacaccaagcccaaccagtacaagcccacctacgtggtgtactacagccagaccccctacgccttcaccagcagcagcatgctgagaagaaacacccccctgctgggccaggccctgaccatcgccagcaagcaccaccagatcgtgaagatggacctgagaagcagatacctggacagcctgaaggccatcgtgttcaagcagtacaaccagaccttcgagacccacaacagcaccacccccctgcaggagagaagcctgggcctggacatcaacatggacagcagaatcatccacgagaacatcgtggagaaggagagagtgcagagaatcacccaggagaccttcggcgactacccccagccccagctggagttcgcccagtacaagctggagaccaagttcaagagcggcctgaacggcagcatcctggccgagagagaggagcccctgagatgcctgatcaagttcagcagcccccacctgctggaggccctgaagagcctggcccccgccgccctggtgtgcagaatccagaagctgctgtgctacagcggcagccacagccagggcacccaggaccccagcagctggcagaaggacctgtacctgctgttcgtgcccctgtaccccagatgctag

SEQ ID NO: 76241 - DNA, 903 bp, synthetic construct
  misc_feature 1..903: note = Description of Artificial Sequence: Synthetic coding sequence
  source 1..903: mol_type = other DNA
atggagcaggccaaccccctgagacccgacggcgagagcaagggcggcgtgctggcccacctggagagactggagacccaggtgagcagaagcagaaagcagagcgaggagctgcagagcgtgcaggcccaggagggcgccctgggcaccaagatccacaagctgagaagactgagagacgagctgagagccgtggtgagacacagaagagccagcgtgaaggcctgcatcgccaacgtggagcccaaccagaccgtggagatcaacgagcaggaggccctggaggagaagctggagaacgtgaaggccatcctgcaggcctaccacttcaccggcctgagcggcaagctgaccagcagaggcgtgtgcgtgtgcatcagcaccgccttcgagggcaacctgctggacagctacttcgtggacctggtgatccagaagcccctgagaatccaccaccacagcgtgcccgtgttcatccccctggaggagatcgccgccaagtacctgcagaccaacatccagcacttcctgttcagcctgtgcgagtacctgaacgcctacagcggcagaaagtaccaggccgacagactgcagagcgacttcgccgccctgctgaccggccccctgcagagaaaccccctgtgcaacctgctgagcttcacctacaagctggaccccggcggccagagcttccccttctgcgccagactgctgtacaaggacctgaccgccaccctgcccaccgacgtgaccgtgacctgccagggcgtggaggtgctgagcaccagctgggaggagcagagagccagccacgagaccctgttctgcaccaagcccctgcaccaggtgttcgccagcttcaccagaaagggcgagaagctggacatgagcctggtgagctag

SEQ ID NO: 76242 - DNA, 903 bp, synthetic construct; identical to SEQ ID NO: 76241
  misc_feature 1..903: note = Description of Artificial Sequence: Synthetic coding sequence
  source 1..903: mol_type = other DNA

SEQ ID NO: 76243 - DNA, 885 bp, synthetic construct
  misc_feature 1..885: note = Description of Artificial Sequence: Synthetic coding sequence
  source 1..885: mol_type = other DNA
atggccggcatcctggccagcggcctgggcgtgctggcccacctggagagactggagacccaggtgagcagaagcagaaagcagagcgaggagctgcagagcgtgcaggcccaggagggcgccctgggcaccaagatccacaagctgagaagactgagagacgagctgagagccgtggtgagacacagaagagccagcgtgaaggcctgcatcgccaacgtggagcccaaccagaccgtggagatcaacgagcaggaggccctggaggagaagctggagaacgtgaaggccatcctgcaggcctaccacttcaccggcctgagcggcaagctgaccagcagaggcgtgtgcgtgtgcatcagcaccgccttcgagggcaacctgctggacagctacttcgtggacctggtgatccagaagcccctgagaatccaccaccacagcgtgcccgtgttcatccccctggaggagatcgccgccaagtacctgcagaccaacatccagcacttcctgttcagcctgtgcgagtacctgaacgcctacagcggcagaaagtaccaggccgacagactgcagagcgacttcgccgccctgctgaccggccccctgcagagaaaccccctgtgcaacctgctgagcttcacctacaagctggaccccggcggccagagcttccccttctgcgccagactgctgtacaaggacctgaccgccaccctgcccaccgacgtgaccgtgacctgccagggcgtggaggtgctgagcaccagctgggaggagcagagagccagccacgagaccctgttctgcaccaagcccctgcaccaggtgttcgccagcttcaccagaaagggcgagaagctggacatgagcctggtgagctag

SEQ ID NO: 76244 - DNA, 309 bp, synthetic construct
  misc_feature 1..309: note = Description of Artificial Sequence: Synthetic coding sequence
  source 1..309: mol_type = other DNA
atgcaggagaagtaccccgacgccgtgtacctgagcgagggccccagcagctgcagcatgggcatcagaagcgccagcagacccggcttcgagctggtgatcgtgtggagaatccagatcgacgaggacggcaaggtgttccccaagctggacctgctgaccaaggtgccccagagagccctggagctggacaagaacagagccatcgagaccgcccccctgagcttcagaaccctggtgggcctgctgggcatcgaggccgccctggagagcctgatcaagagcctgtgcgccgaggagaacaactag

SEQ ID NO: 76245 - DNA, 348 bp, synthetic construct
  misc_feature 1..348: note = Description of Artificial Sequence: Synthetic coding sequence
  source 1..348: mol_type = other DNA
atggaggcccccagctggagcgtgctgcagagaagcggcgacgaggagaagtaccccgacgccgtgtacctgagcgagggccccagcagctgcagcatgggcatcagaagcgccagcagacccggcttcgagctggtgatcgtgtggagaatccagatcgacgaggacggcaaggtgttccccaagctggacctgctgaccaaggtgccccagagagccctggagctggacaagaacagagccatcgagaccgcccccctgagcttcagaaccctggtgggcctgctgggcatcgaggccgccctggagagcctgatcaagagcctgtgcgccgaggagaacaactag

SEQ ID NO: 76246 - DNA, 867 bp, synthetic construct
  misc_feature 1..867: note = Description of Artificial Sequence: Synthetic coding sequence
  source 1..867: mol_type = other DNA
atggacgccgagctggccgaggtgagagccctgcaggccgagatcgccgccctgagaagagcctgcgaggacccccccgccccctgggaggagaagagcagagtgcagaagagcttccaggccatccaccagttcaacctggagggctggaagagcagcaaggacctgaagaaccagctgggccacctggagagcgagctgagcttcctgagcaccctgaccggcatcaacatcagaaaccacagcaagcagaccgaggacctgaccagcaccgagatgaccgagaagagcatcagaaaggtgctgcagagacacagactgagcggcaactgccacatggtgaccttccagctggagttccagatcctggagatccagaacaaggagagactgagcagcgccgtgaccgacctgaacatcatcatggagcccaccgagtgcagcgagctgagcgagttcgtgagcagagccgaggagagaaaggacctgttcatgttcttcagaagcctgcacttcttcgtggagtggttcgagtacagaaagagaaccttcaagcacctgaaggagaagtaccccgacgccgtgtacctgagcgagggccccagcagctgcagcatgggcatcagaagcgccagcagacccggcttcgagctggtgatcgtgtggagaatccagatcgacgaggacggcaaggtgttccccaagctggacctgctgaccaaggtgccccagagagccctggagctggacaagaacagagccatcgagaccgcccccctgagcttcagaaccctggtgggcctgctgggcatcgaggccgccctggagagcctgatcaagagcctgtgcgccgaggagaacaactag

SEQ ID NO: 76247 - DNA, 744 bp, synthetic construct
  misc_feature 1..744: note = Description of Artificial Sequence: Synthetic coding sequence
  source 1..744: mol_type = other DNA
aagagagccggcagaagcgacagctgcgccgccggccccgccgccgtgagcaacgccccctggacccagagctggcagagatgcgccccctgcaagctgagaagcagaccctgcggcgagagagtgagaacccacagaagacccggcaagagaagccccgagagcagcatcagaaaggtgctgcagagacacagactgagcggcaactgccacatggtgaccttccagctggagttccagatcctggagatccagaacaaggagagactgagcagcgccgtgaccgacctgaacatcatcatggagcccaccgagtgcagcgagctgagcgagttcgtgagcagagccgaggagagaaaggacctgttcatgttcttcagaagcctgcacttcttcgtggagtggttcgagtacagaaagagaaccttcaagcacctgaaggagaagtaccccgacgccgtgtacctgagcgagggccccagcagctgcagcatgggcatcagaagcgccagcagacccggcttcgagctggtgatcgtgtggagaatccagatcgacgaggacggcaaggtgttccccaagctggacctgctgaccaaggtgccccagagagccctggagctggacaagaacagagccatcgagaccgcccccctgagcttcagaaccctggtgggcctgctgggcatcgaggccgccctggagagcctgatcaagagcctgtgcgccgaggagaacaactag

SEQ ID NO: 76248 - DNA, 807 bp, synthetic construct
  misc_feature 1..807: note = Description of Artificial Sequence: Synthetic coding sequence
  source 1..807: mol_type = other DNA
atgagcggcaaggccaacgccagcaagaagaacgcccagcagctgaagagaaaccccaagagaaagaaggacaacgaggaggtggtgctgagcgagaacaaggtgagaaacaccgtgaagaagaacaagaaccacctgaaggacctgagcagcgagggccagaccaagcacaccaacctgaagcacggcaagaccgccgccagcaagagaaagacctggcagcccctgagcaagagcaccagagaccacctgcagaccatgatggagagcgtgatcatgaccatcctgagcaacagcatcaaggagaaggaggagatccagtaccacctgaacttcctgaagaagagactgctgcagcagtgcgagaccctgaaggtgccccccaagaagatggaggacctgaccaacgtgagcagcctgctgaacatggagagagccagagacaaggccaacgaggagggcctggccctgctgcaggaggagatcgacaagatggtggagaccaccgagctgatgaccggcaacatccagagcctgaagaacaagatccagatcctggccagcgaggtggaggaggaggaggagagagtgaagcagatgcaccagatcaacagcagcggcgtgctgagcctgcccgagctgagccagaagaccctgaaggcccccaccctgcagaaggagatcctggccctgatccccaaccagaacgccctgctgaaggacctggacatcctgcacaacagcagccagatgaagagcatgagcaccttcatcgaggaggcctacaagaagctggacgccagctag

SEQ ID NO: 76249 - DNA, 807 bp, synthetic construct; identical to SEQ ID NO: 76248
  misc_feature 1..807: note = Description of Artificial Sequence: Synthetic coding sequence
  source 1..807: mol_type = other DNA

SEQ ID NO: 76250 - DNA, 384 bp, synthetic construct
  misc_feature 1..384: note = Description of Artificial Sequence: Synthetic coding sequence
  source 1..384: mol_type = other DNA
atgggcgacaagcccatctgggagcagatcggcagcagcttcatccagcactactaccagctgttcgacaacgacagaacccagctgggcgccatctacatcgacgccagctgcctgacctgggagggccagcagttccagggcaaggccgccatcgtggagaagctgagcagcctgcccttccagaagatccagcacagcatcaccgcccaggaccaccagcccacccccgacagctgcatcatcagcatggtggtgggccagctgaaggccgacgaggaccccatcatgggcttccaccagatgttcctgctgaagaacatcaacgacgcctgggtgtgcaccaacgacatgttcagactggccctgcacaacttcggctag

SEQ ID NO: 76251 - DNA, 786 bp, synthetic construct
  misc_feature 1..786: note = Description of Artificial Sequence: Synthetic coding sequence
  source 1..786: mol_type = other DNA
atgagctggtgctgcctgtggctgtgcctgagcagcgtgggcagaaccggcagcgccggccccagcctgcccttcagcgagctgtgcagcctgggcctgctgagactgagacccgtgttcagccccctgcacagcggccccggcaagcccgcccagttcctggccggcgaggccgaggaggtgaacgccttcgccctgggcttcctgagcaccagcagcggcgtgagcggcgaggacgaggtggagcccctgcacgacggcgtggaggaggccgagaagaagatggaggaggagggcgtgagcgtgagcgagatggaggccaccggcgcccagggccccagcagagtggaggaggccgagggccacaccgaggtgaccgaggccgagggcagccagggcaccgccgaggccgacggccccggcgccagcagcggcgacgaggacgccagcggcagagccgccagccccgagagcgccagcagcacccccgagagcctgcaggccagaagacaccaccagttcctggagcccgcccccgcccccggcgccgccgtgctgagcagcgagcccgccgagcccctgctggtgagacacccccccagacccagaaccaccggccccagacccagacaggacccccacaaggccggcctgagccactacgtgaagctgttcagcttctacgccaagatgcccatggagagaaaggccctggagatggtggagaagtgcatcttcgtgatgatctggagatacctgctgctgatgctggccgccagactgtag

SEQ ID NO: 76252 - DNA, 1686 bp, synthetic construct
  misc_feature 1..1686: note = Description of Artificial Sequence: Synthetic coding sequence
  source 1..1686: mol_type = other DNA
atggccgaccacaaccccgacagcgacagcacccccagaaccctgctgagaagagtgctggacaccgccgaccccagaacccccagaagacccagaagcgccagagccggcgccagaagagccctgctggagaccgccagccccagaaagctgagcggccagaccagaaccatcgccagaggcagaagccacggcgccagaagcgtgggcagaagcgcccacatccaggccagcggccacctggaggagcagacccccagaaccctgctgaagaacatcctgctgaccgcccccgagagcagcatcctgatgcccgagagcgtggtgaagcccgtgcccgccccccaggccgtgcagcccagcagacaggagagcagctgcggcagcctggagctgcagctgcccgagctggagccccccaccaccctggcccccggcctgctggcccccggcagaagaaagcagagactgagactgagcgtgttccagcagggcgtggaccagggcctgagcctgagccaggagccccagggcaacgccgacgccagcagcctgaccagaagcctgaacctgaccttcgccacccccctgcagccccagagcgtgcagagacccggcctggccagaagaccccccgccagaagagccgtggacgtgggcgccttcctgagagacctgagagacaccagcctggccccccccaacatcgtgctggaggacacccagcccttcagccagcccatggtgggcagccccaacgtgtaccacagcctgccctgcaccccccacaccggcgccgaggacgccgagcaggccgccggcagaaagacccagagcagcggccccggcctgcagaagaacagccccggcaagcccgcccagttcctggccggcgaggccgaggaggtgaacgccttcgccctgggcttcctgagcaccagcagcggcgtgagcggcgaggacgaggtggagcccctgcacgacggcgtggaggaggccgagaagaagatggaggaggagggcgtgagcgtgagcgagatggaggccaccggcgcccagggccccagcagagtggaggaggccgagggccacaccgaggtgaccgaggccgagggcagccagggcaccgccgaggccgacggccccggcgccagcagcggcgacgaggacgccagcggcagagccgccagccccgagagcgccagcagcacccccgagagcctgcaggccagaagacaccaccagttcctggagcccgcccccgcccccggcgccgccgtgctgagcagcgagcccgccgagcccctgctggtgagacacccccccagacccagaaccaccggccccagacccagacaggacccccacaaggccggcctgagccactacgtgaagctgttcagcttctacgccaagatgcccatggagagaaaggccctggagatggtggagaagtgcctggacaagtacttccagcacctgtgcgacgacctggaggtgttcgccgcccacgccggcagaaagaccgtgaagcccgaggacctggagctgctgatgagaagacagggcctggtgaccgaccaggtgagcctgcacgtgctggtggagagacacctgcccctggagtacagacagctgctgatcccctgcgcctacagcggcaacagcgtgttccccgcccagtag

SEQ ID NO: 76253 - DNA, 447 bp, synthetic construct
  misc_feature 1..447: note = Description of Artificial Sequence: Synthetic coding sequence
  source 1..447: mol_type = other DNA
atgcccgagagcgtggtgaagcccgtgcccgccccccaggccgtgcagcccagcagacaggagagcagctgcggcagcctggagctgcagctgcccgagctggagccccccaccaccctggcccccggcctgctggcccccggcagaagaaagcagagactgagactgagcgtgttccagcagggcgtggaccagggcctgagcctgagccaggagccccagggcaacgccgacgccagcagcctgaccagaagcctgaacctgaccttcgccacccccctgcagccccagagcgtgcagagacccggcctggccagaagaccccccgccagaagagccgtggacgtgggcgccttcctgagagacctgagagacaccagcctggccccccccagcaaggtgggcttcagccccgccggcctgtggggcaagctgagccccctgtag

SEQ ID NO: 76254 - DNA, 1686 bp, synthetic construct; identical to SEQ ID NO: 76252
  misc_feature 1..1686: note = Description of Artificial Sequence: Synthetic coding sequence
  source 1..1686: mol_type = other DNA

SEQ ID NO: 76255 - DNA, 819 bp, synthetic construct
  misc_feature 1..819: note = Description of Artificial Sequence: Synthetic coding sequence
  source 1..819: mol_type = other DNA
atgagaagaagcagaagcagcgccgccgccaagctgagaggccagaagagaagcggcgccagcgccgcccccgccgccagcgccgccgccgccctggcccccagcgccaccagaaccagaagaagcgccagccaggccggcagcaagagccaggccgtggagaagccccccagcgagaagcccagactgagaagaagcagccccagagcccaggaggagggccccggcgagccccccccccccgagctggccctgctgccccccccccccccccccccccccacccccgccacccccaccagcagcgccagcaacctggacctgggcgagcagagagagagatgggagaccttccagaagagacagaagctgaccagcgagggcgccgccaagctgctgctggacaccttcgagtaccagggcctggtgaagcacaccggcggctgccactgcggcgccgtgagattcgaggtgtgggccagcgccgacctgcacatcttcgactgcaactgcagcatctgcaagaagaagcagaacagacacttcatcgtgcccgccagcagattcaagctgctgaagggcgccgagcacatcaccacctacaccttcaacacccacaaggcccagcacaccttctgcaagagatgcggcgtgcagagcttctacacccccagaagcaaccccggcggcttcggcatcgccccccactgcctggacgagggcaccgtgagaagcatggtgaccgaggagttcaacggcagcgactgggagaaggccatgaaggagcacaagaccatcaagaacatgagcaaggagtag

SEQ ID NO: 76256 - DNA, 2961 bp, synthetic construct
  misc_feature 1..2961: note = Description of Artificial Sequence: Synthetic coding sequence
  source 1..2961: mol_type = other DNA
atggtgagcaagagcgaccagctgctgatcgtggtgagcatcctggagggcagacacttccccaagagacccaagcacatgctggtggtggaggccaagttcgacggcgagcagctggccaccgaccccgtggaccacaccgaccagcccgagttcgccaccgagctggcctgggagatcgacagaaaggccctgcaccagcacagactgcagagaacccccatcaagctgcagtgcttcgccctggaccccgtgaccagcgccaaggagaccatcggctacatcgtgctggacctgagaaccgcccaggagaccaagcaggcccccaagtggtaccagctgctgagcaacaagtacaccaagttcaagagcgagatccagatcagcatcgccctggagaccgacaccaagccccccgtggacagcttcaaggccaagggcgccccccccagagacggcaaggtgcccgccatcctggccggcctggaccccagagacatcgtggccgtgctgaacgaggagggcggctaccaccagatcggccccgccgagtactgcaccgacagcttcatcatgagcgtgaccatcgccttcgccacccagctggagcagctgatcccctgcaccatgaagctgcccgagagacagcccgagttcttcttctactacagcctgctgggcaacgacgtgaccaacgagcccttcaacgacctgatcaaccccaacttcgagcccgagagagccagcgtgagaatcagaagcagcgtggagatcctgagagtgtacctggccctgcagagcaagctgcagatccacctgtgctgcggcgaccagagcctgggcagcaccgagatccccctgaccggcctgctgaagaagggcagcaccgagatcaaccagcaccccgtgaccgtggagggcgccttcaccctggacccccccaacagagccaagcagaagctggcccccatccccgtggagctggcccccaccgtgggcgtgagcgtggccctgcagagagagggcatcgacagccagagcctgatcgagctgaagacccagaacgagcacgagcccgagcacagcaagaagaaggtgctgacccccatcaaggagaagaccctgaccggccccaagagccccaccgtgagccccgtgcccagccacaaccagagcccccccaccaaggacgacgccaccgagagcgaggtggagagcctgcagtacgacaaggacaccaagcccaaccccaaggccagcagcagcgtgcccgccagcctggcccagctggtgaccaccagcaacgccagcgaggtggccagcggccagaagatcgccgtgcccgccaccagccaccacttctgcttcagcatcgacctgagaagcatccacgccctggagatcggcttccccatcaactgcatcctgagatacagctaccccttcttcggcagcgccgcccccatcatgaccaacccccccgtggaggtgagaaagaacatggaggtgttcctgccccagagctactgcgccttcgacttcgccaccatgccccaccagctgcaggacaccttcctgagaatccccctgctggtggagctgtggcacaaggacaagatgagcaaggacctgctgctgggcatcgccagaatccagctgagcaacatcctgagcagcgagaagaccagattcctgggcagcaacggcgagcagtgctggagacagacctacagcgagagcgtgcccgtgatcgccgcccagggcagcaacaacagaatcgccgacctgagctacaccgtgaccctggaggactacggcctggtgaagatgagagagatcttcatcagcgacagcagccagggcgtgagcgccgtgcagcagaagcccagcagcctgccccccgccccctgccccagcgagatccagaccgagcccagagagaccctggagtacaaggccgccctggagctggagatgtggaaggagatgcaggaggacatcttcgagaaccagctgaagcagaaggagctggcccacatgcaggccctggccgaggagtggaagaagagagacagagagagagagagcctggtgaagaagaaggtggccgagtacaccatcctggagggcaagctgcagaagaccctgatcgacctggagaagagagagcagcagctggccagcgtggagagcgagctgcagagagagaagaaggagctgcagagcgagagacagagaaacctgcaggagctgcaggacagcatcagaagagccaaggaggactgcatccaccaggtggagctggagagactgaagatcaagcagctggaggaggacaagcacagactgcagcagcagctgaacgacgccgagaacaagtacaagatcctggagaaggagttccagcagttcaaggaccagcagaacaacaagcccgagatcagactgcagagcgagatcaacctgctgaccctggagaaggtggagctggagagaaagctggagagcgccaccaagagcaagctgcactacaagcagcagtggggcagagccctgaaggagctggccagactgaagcagagagagcaggagagccagatggccagactgaagaagcagcaggaggagctggagcagatgagactgagatacctggccgccgaggagaaggacaccgtgaagaccgagagacaggagctgctggacatcagaaacgagctgaacagactgagacagcaggagcagaagcagtaccaggacagcaccgagatcgccagcggcaagaaggacggcccccacggcagcgtgctggaggagggcctggacgactacctgaccagactgatcgaggagagagacaccctgatgagaaccggcgtgtacaaccacgaggacagaatcatcagcgagctggacagacagatcagagagatcctggccaagagcaacgccagcaactag

SEQ ID NO: 76257 - DNA, 2883 bp, synthetic construct
  misc_feature 1..2883: note = Description of Artificial Sequence: Synthetic coding sequence
  source 1..2883: mol_type = other DNA
atgctggtggtggaggccaagttcgacggcgagcagctggccaccgaccccgtggaccacaccgaccagcccgagttcgccaccgagctggcctgggagatcgacagaaaggccctgcaccagcacagactgcagagaacccccatcaagctgcagtgcttcgccctggaccccgtgaccagcgccaaggagaccatcggctacatcgtgctggacctgagaaccgcccaggagaccaagcaggcccccaagtggtaccagctgctgagcaacaagtacaccaagttcaagagcgagatccagatcagcatcgccctggagaccgacaccaagccccccgtggacagcttcaaggccaagggcgccccccccagagacggcaaggtgcccgccatcctggccggcctggaccccagagacatcgtggccgtgctgaacgaggagggcggctaccaccagatcggccccgccgagtactgcaccgacagcttcatcatgagcgtgaccatcgccttcgccacccagctggagcagctgatcccctgcaccatgaagctgcccgagagacagcccgagttcttcttctactacagcctgctgggcaacgacgtgaccaacgagcccttcaacgacctgatcaaccccaacttcgagcccgagagagccagcgtgagaatcagaagcagcgtggagatcctgagagtgtacctggccctgcagagcaagctgcagatccacctgtgctgcggcgaccagagcctgggcagcaccgagatccccctgaccggcctgctgaagaagggcagcaccgagatcaaccagcaccccgtgaccgtggagggcgccttcaccctggacccccccaacagagccaagcagaagctggcccccatccccgtggagctggcccccaccgtgggcgtgagcgtggccctgcagagagagggcatcgacagccagagcctgatcgagctgaagacccagaacgagcacgagcccgagcacagcaagaagaaggtgctgacccccatcaaggagaagaccctgaccggccccaagagccccaccgtgagccccgtgcccagccacaaccagagcccccccaccaaggacgacgccaccgagagcgaggtggagagcctgcagtacgacaaggacaccaagcccaaccccaaggccagcagcagcgtgcccgccagcctggcccagctggtgaccaccagcaacgccagcgaggtggccagcggccagaagatcgccgtgcccgccaccagccaccacttctgcttcagcatcgacctgagaagcatccacgccctggagatcggcttccccatcaactgcatcctgagatacagctaccccttcttcggcagcgccgcccccatcatgaccaacccccccgtggaggtgagaaagaacatggaggtgttcctgccccagagctactgcgccttcgacttcgccaccatgccccaccagctgcaggacaccttcctgagaatccccctgctggtggagctgtggcacaaggacaagatgagcaaggacctgctgctgggcatcgccagaatccagctgagcaacatcctgagcagcgagaagaccagattcctgggcagcaacggcgagcagtgctggagacagacctacagcgagagcgtgcccgtgatcgccgcccagggcagcaacaacagaatcgccgacctgagctacaccgtgaccctggaggactacggcctggtgaagatgagagagatcttcatcagcgacagcagccagggcgtgagcgccgtgcagcagaagcccagcagcctgccccccgccccctgccccagcgagatccagaccgagcccagagagaccctggagtacaaggccgccctggagctggagatgtggaaggagatgcaggaggacatcttcgagaaccagctgaagcagaaggagctggcccacatgcaggccctggccgaggagtggaagaagagagacagagagagagagagcctggtgaagaagaaggtggccgagtacaccatcctggagggcaagctgcagaagaccctgatcgacctggagaagagagagcagcagctggccagcgtggagagcgagctgcagagagagaagaaggagctgcagagcgagagacagagaaacctgcaggagctgcaggacagcatcagaagagccaaggaggactgcatccaccaggtggagctggagagactgaagatcaagcagctggaggaggacaagcacagactgcagcagcagctgaacgacgccgagaacaagtacaagatcctggagaaggagttccagcagttcaaggaccagcagaacaacaagcccgagatcagactgcagagcgagatcaacctgctgaccctggagaaggtggagctggagagaaagctggagagcgccaccaagagcaagctgcactacaagcagcagtggggcagagccctgaaggagctggccagactgaagcagagagagcaggagagccagatggccagactgaagaagcagcaggaggagctggagcagatgagactgagatacctggccgccgaggagaaggacaccgtgaagaccgagagacaggagctgctggacatcagaaacgagctgaacagactgagacagcaggagcagaagcagtaccaggacagcaccgagatcgccagcggcaagaaggacggcccccacggcagcgtgctggaggagggcctggacgactacctgaccagactgatcgaggagagagacaccctgatgagaaccggcgtgtacaaccacgaggacagaatcatcagcgagctggacagacagatcagagagatcctggccaagagcaacgccagcaactag

SEQ ID NO: 76258 - DNA, 2961 bp, synthetic construct; identical to SEQ ID NO: 76256
  misc_feature 1..2961: note = Description of Artificial Sequence: Synthetic coding sequence
  source 1..2961: mol_type = other DNA

SEQ ID NO: 76259 - DNA, 1143 bp, synthetic construct
  misc_feature 1..1143: note = Description of Artificial Sequence: Synthetic coding sequence
  source 1..1143: mol_type = other DNA
atggtgagcaagagcgaccagctgctgatcgtggtgagcatcctggagggcagacacttccccaagagacccaagcacatgctggtggtggaggccaagttcgacggcgagcagctggccaccgaccccgtggaccacaccgaccagcccgagttcgccaccgagctggcctgggagatcgacagaaaggccctgcaccagcacagactgcagagaacccccatcaagctgcagtgcttcgccctggaccccgtgaccagcgccaaggagaccatcggctacatcgtgctggacctgagaaccgcccaggagaccaagcaggcccccaagtggtaccagctgctgagcaacaagtacaccaagttcaagagcgagatccagatcagcatcgccctggagaccgacaccaagccccccgtggacagcttcaaggccaagggcgccccccccagagacggcaaggtgcccgccatcctggccggcctggaccccagagacatcgtggccgtgctgaacgaggagggcggctaccaccagatcggccccgccgagtactgcaccgacagcttcatcatgagcgtgaccatcgccttcgccacccagctggagcagctgatcccctgcaccatgaagctgcccgagagacagcccgagttcttcttctactacagcctgctgggcaacgacgtgaccaacgagcccttcaacgacctgatcaaccccaacttcgagcccgagagagccagcgtgagaatcagaagcagcgtggagatcctgagagtgtacctggccctgcagagcaagctgcagatccacctgtgctgcggcgaccagagcctgggcagcaccgagatccccctgaccggcctgctgaagaagggcagcaccgagatcaaccagcaccccgtgaccgtggagggcgccttcaccctggacccccccaacagagccaagcagaagctggcccccatccccgtggagctggcccccaccgtgggcgtgagcgtggccctgcagagagagggcatcgacagccaggacgccttctggtacagcgccctggacatcatcttccccctgttcatcttcctgttcctggtgctggacgccatcagaaagttcgccaactacgaggagaagtag

SEQ ID NO: 76260 - DNA, 3828 bp, synthetic construct
  misc_feature 1..3828: note = Description of Artificial Sequence: Synthetic coding sequence
  source 1..3828: mol_type = other DNA
atgagcctggacttcggcagcgtggccctgcccgtgcagaacgaggacgaggagtacgacgaggaggactacgagagagagaaggagctgcagcagctgctgaccgacctgccccacgacatgctggacgacgacctgagcagccccgagctgcagtacagcgactgcagcgaggacggcaccgacggccagccccaccaccccgagcagctggagatgagctggaacgagcagatgctgcccaagagccagagcgtgaacggccccagctgccagggcctggagccctacaacaaggtgacctacaagccctaccagagcagcgcccagaacaacggcagccccgcccaggagatcaccggcagcgacaccttcgagggcctgcagcagcagttcctgggcgccaacgagaacagcgccgagaacatgcagatcatccagctgcaggtgctgaacaaggccaaggagagacagctggagaacctgatcgagaagctgaacgagagcgagagacagatcagatacctgaaccaccagctggtgatcatcaaggacgagaaggacggcctgaccctgagcctgagagagagccagaagctgttccagaacggcaaggagagagagatccagctggaggcccagatcaaggccctggagacccagatccaggccctgaaggtgaacgaggagcagatgatcaagaagagcagaaccaccgagatggccctggagagcctgaagcagcagctggtggacctgcaccacagcgagagcctgcagagagccagagagcagcacgagagcatcgtgatgggcctgaccaagaagtacgaggagcaggtgctgagcctgcagaagaacctggacgccaccgtgaccgccctgaaggagcaggaggacatctgcagcagactgaaggaccacgtgaagcagctggagagaaaccaggaggccatcaagctggagaagaccgagatcatcaacaagctgaccagaagcctggaggagagccagaagcagtgcgcccacctgctgcagagcggcagcgtgcaggaggtggcccagctgcagttccagctgcagcaggcccagaaggcccacgccatgagcgccaacatgaacaaggccctgcaggaggagctgaccgagctgaaggacgagatcagcctgtacgagagcgccgccaagctgggcatccaccccagcgacagcgagggcgagctgaacatcgagctgaccgagagctacgtggacctgggcatcaagaaggtgaactggaagaagagcaaggtgaccagcatcgtgcaggaggaggaccccaacgaggagctgagcaaggacgagttcatcctgaagctgaaggccgaggtgcagagactgctgggcagcaacagcatgaagagacacctggtgagccagctgcagaacgacctgaaggactgccacaagaagatcgaggacctgcaccaggtgaagaaggacgagaagagcatcgaggtggagaccaagaccgacaccagcgagaagcccaagaaccagctgtggcccgagagcagcaccagcgacgtggtgagagacgacatcctgctgctgaagaacgagatccaggtgctgcagcagcagaaccaggagctgaaggagaccgagggcaagctgagaaacaccaaccaggacctgtgcaaccagatgagacagatggtgcaggacttcgaccacgacaagcaggaggccgtggacagatgcgagagaacctaccagcagcaccacgaggccatgaagacccagatcagagagagcctgctggccaagcacgccctggagaagcagcagctgttcgaggcctacgagagaacccacctgcagctgagaagcgagctggacaagctgaacaaggaggtgaccgccgtgcaggagtgctacctggaggtgtgcagagagaaggacaacctggagctgaccctgagaaagaccaccgagaaggagcagcagacccaggagaagatcaaggagaagctgatccagcagctggagaaggagtggcagagcaagctggaccagaccatcaaggccatgaagaagaagaccctggactgcggcagccagaccgaccaggtgaccaccagcgacgtgatcagcaagaaggagatggccatcatgatcgaggagcagaagtgcaccatccagcagaacctggagcaggagaaggacatcgccatcaagggcgccatgaagaagctggagatcgagctggagctgaagcactgcgagaacatcaccaagcaggtggagatcgccgtgcagaacgcccaccagagatggctgggcgagctgcccgagctggccgagtaccaggccctggtgaaggccgagcagaagaagtgggaggagcagcacgaggtgagcgtgaacaagagaatcagcttcgccgtgagcgaggccaaggagaagtggaagagcgagctggagaacatgagaaagaacatcctgcccggcaaggagctggaggagaagatccacagcctgcagaaggagctggagctgaagaacgaggaggtgcccgtggtgatcagagccgagctggccaaggccagaagcgagtggaacaaggagaagcaggaggagatccacagaatccaggagcagaacgagcaggactacagacagttcctggacgaccacagaaacaagatcaacgaggtgctggccgccgccaaggaggacttcatgaagcagaagaccgagctgctgctgcagaaggagaccgagctgcagacctgcctggaccagagcagaagagagtggaccatgcaggaggccaagagaatccagctggagatctaccagtacgaggaggacatcctgaccgtgctgggcgtgctgctgagcgacacccagaaggagcacatcagcgacagcgaggacaagcagctgctggagatcatgagcacctgcagcagcaagtggatgagcgtgcagtacttcgagaagctgaagggctgcatccagaaggccttccaggacaccctgcccctgctggtggagaacgccgaccccgagtggaagaagagaaacatggccgagctgagcaaggacagcgccagccagggcaccggccagggcgaccccggccccgccgccggccaccacgcccagcccctggccctgcaggccaccgaggccgaggccgacaagaagaaggtgctggagatcaaggacctgtgctgcggccactgcttccaggagctggagaaggccaagcaggagtgccaggacctgaagggcaagctggagaagtgctgcagacacctgcagcacctggagagaaagcacaaggccgtggtggagaagatcggcgaggagaacaacaaggtggtggaggagctgatcgaggagaacaacgacatgaagaacaagctggaggagctgcagaccctgtgcaagaccccccccagaagcctgagcgccggcgccatcgagaacgcctgcctgccctgcagcggcggcgccctggaggagctgagaggccagtacatcaaggccgtgaagaagatcaagtgcgacatgctgagatacatccaggagagcaaggagagagccgccgagatggtgaaggccgaggtgctgagagagagacaggagaccgccagaaagatgagaaagtactacctgatctgcctgcagcagatcctgcaggacgacggcaaggagggcgccgagaagaagatcatgaacgccgccagcaagctggccaccatggccaagctgctggagacccccatcagcagcaagagccagagcaagaccacccagagcggcatgagcaagtag

SEQ ID NO: 76261 - DNA, 5133 bp, synthetic construct
  misc_feature 1..5133: note = Description of Artificial Sequence: Synthetic coding sequence
  source 1..5133: mol_type = other DNA
atgagcctggacttcggcagcgtggccctgcccgtgcagaacgaggacgaggagtacgacgaggaggactacgagagagagaaggagctgcagcagctgctgaccgacctgccccacgacatgctggacgacgacctgagcagccccgagctgcagtacagcgactgcagcgaggacggcaccgacggccagccccaccaccccgagcagctggagatgagctggaacgagcagatgctgcccaagagccagagcgtgaacggctacaacgagatccagagcctgtacgccggcgagaagtgcggcaacgtgtgggaggagaacagaagcaagaccgaggacagacaccccgtgtaccaccccgaggagggcggcgacgagggcggcagcggctacagcccccccagcaagtgcgagcagaccgacctgtaccacctgcccgagaacttcagaccctacaccaacggccagaagcaggagttcaacaaccaggccaccaacgtgatcaagttcagcgacccccagtggaaccacttccagggccccagctgccagggcctggagccctacaacaaggtgacctacaagccctaccagagcagcgcccagaacaacggcagccccgcccaggagatcaccggcagcgacaccttcgagggcctgcagcagcagttcctgggcgccaacgagaacagcgccgagaacatgcagatcatccagctgcaggtgctgaacaaggccaaggagagacagctggagaacctgatcgagaagctgaacgagagcgagagacagatcagatacctgaaccaccagctggtgatcatcaaggacgagaaggacggcctgaccctgagcctgagagagagccagaagctgttccagaacggcaaggagagagagatccagctggaggcccagatcaaggccctggagacccagatccaggccctgaaggtgaacgaggagcagatgatcaagaagagcagaaccaccgagatggccctggagagcctgaagcagcagctggtggacctgcaccacagcgagagcctgcagagagccagagagcagcacgagagcatcgtgatgggcctgaccaagaagtacgaggagcaggtgctgagcctgcagaagaacctggacgccaccgtgaccgccctgaaggagcaggaggacatctgcagcagactgaaggaccacgtgaagcagctggagagaaaccaggaggccatcaagctggagaagaccgagatcatcaacaagctgaccagaagcctggaggagagccagaagcagtgcgcccacctgctgcagagcggcagcgtgcaggaggtggcccagctgcagttccagctgcagcaggcccagaaggcccacgccatgagcgccaacatgaacaaggccctgcaggaggagctgaccgagctgaaggacgagatcagcctgtacgagagcgccgccaagctgggcatccaccccagcgacagcgagggcgagctgaacatcgagctgaccgagagctacgtggacctgggcatcaagaaggtgaactggaagaagagcaaggtgaccagcatcgtgcaggaggaggaccccaacgaggagctgagcaaggacgagttcatcctgaagctgaaggccgaggtgcagagactgctgggcagcaacagcatgaagagacacctggtgagccagctgcagaacgacctgaaggactgccacaagaagatcgaggacctgcaccaggtgaagaaggacgagaagagcatcgaggtggagaccaagaccgacaccagcgagaagcccaagaaccagctgtggcccgagagcagcaccagcgacgtggtgagagacgacatcctgctgctgaagaacgagatccaggtgctgcagcagcagaaccaggagctgaaggagaccgagggcaagctgagaaacaccaaccaggacctgtgcaaccagatgagacagatggtgcaggacttcgaccacgacaagcaggaggccgtggacagatgcgagagaacctaccagcagcaccacgaggccatgaagacccagatcagagagagcctgctggccaagcacgccctggagaagcagcagctgttcgaggcctacgagagaacccacctgcagctgagaagcgagctggacaagctgaacaaggaggtgaccgccgtgcaggagtgctacctggaggtgtgcagagagaaggacaacctggagctgaccctgagaaagaccaccgagaaggagcagcagacccaggagaagatcaaggagaagctgatccagcagctggagaaggagtggcagagcaagctggaccagaccatcaaggccatgaagaagaagaccctggactgcggcagccagaccgaccaggtgaccaccagcgacgtgatcagcaagaaggagatggccatcatgatcgaggagcagaagtgcaccatccagcagaacctggagcaggagaaggacatcgccatcaagggcgccatgaagaagctggagatcgagctggagctgaagcactgcgagaacatcaccaagcaggtggagatcgccgtgcagaacgcccaccagagatggctgggcgagctgcccgagctggccgagtaccaggccctggtgaaggccgagcagaagaagtgggaggagcagcacgaggtgagcgtgaacaagagaatcagcttcgccgtgagcgaggccaaggagaagtggaagagcgagctggagaacatgagaaagaacatcctgcccggcaaggagctggaggagaagatccacagcctgcagaaggagctggagctgaagaacgaggaggtgcccgtggtgatcagagccgagctggccaaggccagaagcgagtggaacaaggagaagcaggaggagatccacagaatccaggagcagaacgagcaggactacagacagttcctggacgaccacagaaacaagatcaacgaggtgctggccgccgccaaggaggacttcatgaagcagaagaccgagctgctgctgcagaaggagaccgagctgcagacctgcctggaccagagcagaagagagtggaccatgcaggaggccaagagaatccagctggagatctaccagtacgaggaggacatcctgaccgtgctgggcgtgctgctgagcgacacccagaaggagcacatcagcgacagcgaggacaagcagctgctggagatcatgagcacctgcagcagcaagtggatgagcgtgcagtacttcgagaagctgaagggctgcatccagaaggccttccaggacaccctgcccctgctggtggagaacgccgaccccgagtggaagaagagaaacatggccgagctgagcaaggacagcgccagccagggcaccggccagggcgaccccggccccgccgccggccaccacgcccagcccctggccctgcaggccaccgaggccgaggccgacaagaagaaggtgctggagatcaaggacctgtgctgcggccactgcttccaggagctggagaaggccaagcaggagtgccaggacctgaagggcaagctggagaagtgctgcagacacctgcagcacctggagagaaagcacaaggccgtggtggagaagatcggcgaggagaacaacaaggtggtggaggagctgatcgaggagaacaacgacatgaagaacaagctggaggagctgcagaccctgtgcaagaccccccccagaagcctgagcgccggcgccatcgagaacgcctgcctgccctgcagcggcggcgccctggaggagctgagaggccagtacatcaaggccgtgaagaagatcaagtgcgacatgctgagatacatccaggagagcaaggagagagccgccgagatggtgaaggccgaggtgctgagagagagacaggagaccgccagaaagatgagaaagtactacctgatctgcctgcagcagatcctgcaggacgacggcaaggagggcgccgagaagaagatcatgaacgccgccagcaagctggccaccatggccaagctgctggagacccccatcagcagcaagagccagagcaagaccacccagagcgccctgcccctgaccagcgagatgctgatcgccgtgaagaagagcaagagaaacgacgtgaaccagaagatcccctgctgcatcgagagcaagagcaacagcgtgaacaccatcaccagaaccctgtgcgagcaggcccccaagagaagagccgcctgcaacctgcagagactgctggagaacagcgagcaccagagcatcaagcacgtgggcagcaaggagacccacctggagttccagttcggcgacggcagctgcaagcacctgaacagcctgcccagaaacgtgagccccgagttcgtgccctgcgagggcgagggcggcttcggcctgcacaagaagaaggacctgctgagcgacaacggcagcgagagcctgccccacagcgccgcctaccccttcctgggcaccctgggcaacaagcccagccccagatgcacccccggccccagcgagagcggctgcatgcacatcaccttcagagacagcaacgagagactgggcctgaaggtgtacaagtgcaaccccctgatggagagcgagaacgccgccagcgagaagagccagggcctggacgtgcaggagccccccgtgaaggacggcggcgacctgagcgactgcctgggctggcccagcagcagcgccaccctgagcttcgacagcagagaggccagcttcgtgcacggcagaccccagggcaccctggagatccccagcgagagcgtgaagagcaagcagttcagccccagcggctacctgagcgacaccgaggagagcaacatgatctgccagaccatgaagtgccagagataccagaccccctacctgagcgaggagaccacctacctggagcccggcaagatcagcgtgaactgcggccaccccagcagacacaaggccgacagactgaagagcgacttcaagaagctgagcagcaccctgcccagcagcgtgtgccagcagcccagcagaaagctgatcgtgcccctgagcagccagcaggacagcggcttcgacagccccttcgtgaacctggactag

SEQ ID NO: 76262 - DNA, 4965 bp, synthetic construct
  misc_feature 1..4965: note = Description of Artificial Sequence: Synthetic coding sequence
  source 1..4965: mol_type = other DNA
atgagcctggacttcggcagcgtggccctgcccgtgcagaacgaggacgaggagtacgacgaggaggactacgagagagagaaggagctgcagcagctgctgaccgacctgccccacgacatgctggacgacgacctgagcagccccgagctgcagtacagcgactgcagcgaggacggcaccgacggccagccccaccaccccgagcagctggagatgagctggaacgagcagatgctgcccaagagccagagcgtgaacggctacaacgagatccagagcctgtacgccggcgagaagtgcggcaacgtgtgggaggagaacagaagcaagaccgaggacagacaccccgtgtaccaccccgaggagggcggcgacgagggcggcagcggctacagcccccccagcaagtgcgagcagaccgacctgtaccacctgcccgagaacttcagaccctacaccaacggccagaagcaggagttcaacaaccaggccaccaacgtgatcaagttcagcgacccccagtggaaccacttccagggccccagctgccagggcctggagccctacaacaaggtgacctacaagccctaccagagcagcgcccagaacaacggcagccccgcccaggagatcaccggcagcgacaccttcgagggcctgcagcagcagttcctgggcgccaacgagaacagcgccgagaacatgcagatcatccagctgcaggtgctgaacaaggccaaggagagacagctggagaacctgatcgagaagctgaacgagagcgagagacagatcagatacctgaaccaccagctggtgatcatcaaggacgagaaggacggcctgaccctgagcctgagagagagccagaagctgttccagaacggcaaggagagagagatccagctggaggcccagatcaaggccctggagacccagatccaggccctgaaggtgaacgaggagcagatgatcaagaagagcagaaccaccgagatggccctggagagcctgaagcagcagctggtggacctgcaccacagcgagagcctgcagagagccagagagcagcacgagagcatcgtgatgggcctgaccaagaagtacgaggagcaggtgctgagcctgcagaagaacctggacgccaccgtgaccgccctgaaggagcaggaggacatctgcagcagactgaaggaccacgtgaagcagctggagagaaaccaggaggccatcaagctggagaagaccgagatcatcaacaagctgaccagaagcctggaggagagccagaagcagtgcgcccacctgctgcagagcggcagcgtgcaggaggtggcccagctgcagttccagctgcagcaggcccagaaggcccacgccatgagcgccaacatgaacaaggccctgcaggaggagctgaccgagctgaaggacgagatcagcctgtacgagagcgccgccaagctgggcatccaccccagcgacagcgagggcgagctgaacatcgagctgaccgagagctacgtggacctgggcatcaagaaggtgaactggaagaagagcaaggtgaccagcatcgtgcaggaggaggaccccaacgaggagctgagcaaggacgagttcatcctgaagctgaaggccgaggtgcagagactgctgggcagcaacagcatgaagagacacctggtgagccagctgcagaacgacctgaaggactgccacaagaagatcgaggacctgcaccaggtgaagaaggacgagaagagcatcgaggtggagaccaagaccgacaccagcgagaagcccaagaaccagctgtggcccgagagcagcaccagcgacgtggtgagagacgacatcctgctgctgaagaacgagatccaggtgctgcagcagcagaaccaggagctgaaggagaccgagggcaagctgagaaacaccaaccaggacctgtgcaaccagatgagacagatggtgcaggacttcgaccacgacaagcaggaggccgtggacagatgcgagagaacctaccagcagcaccacgaggccatgaagacccagatcagagagagcctgctggccaagcacgccctggagaagcagcagctgttcgaggcctacgagagaacccacctgcagctgagaagcgagctggacaagctgaacaaggaggtgaccgccgtgcaggagtgctacctggaggtgtgcagagagaaggacaacctggagctgaccctgagaaagaccaccgagaaggagcagcagacccaggagaagatcaaggagaagctgatccagcagctggagaaggagtggcagagcaagctggaccagaccatcaaggccatgaagaagaagaccctggactgcggcagccagaccgaccaggtgaccaccagcgacgtgatcagcaagaaggagatggccatcatgatcgaggagcagaagtgcaccatccagcagaacctggagcaggagaaggacatcgccatcaagggcgccatgaagaagctggagatcgagctggagctgaagcactgcgagaacatcaccaagcaggtggagatcgccgtgcagaacgcccaccagagatggctgggcgagctgcccgagctggccgagtaccaggccctggtgaaggccgagcagaagaagtgggaggagcagcacgaggtgagcgtgaacaagagaatcagcttcgccgtgagcgaggccaaggagaagtggaagagcgagctggagaacatgagaaagaacatcctgcccggcaaggagctggaggagaagatccacagcctgcagaaggagctggagctgaagaacgaggaggtgcccgtggtgatcagagccgagctggccaaggccagaagcgagtggaacaaggagaagcaggaggagatccacagaatccaggagcagaacgagcaggactacagacagttcctggacgaccacagaaacaagatcaacgaggtgctggccgccgccaaggaggacttcatgaagcagaagaccgagctgctgctgcagaaggagaccgagctgcagacctgcctggaccagagcagaagagagtggaccatgcaggaggccaagagaatccagctggagatctaccagtacgaggaggacatcctgaccgtgctgggcgtgctgctgagcgacacccagaaggagcacatcagcgacagcgaggacaagcagctgctggagatcatgagcacctgcagcagcaagtggatgagcgtgcagtacttcgagaagctgaagggctgcatccagaaggccttccaggacaccctgcccctgctggtggagaacgccgaccccgagtggaagaagagaaacatggccgagctgagcaaggacagcgccagccagggcaccggccagggcgaccccggccccgccgccggccaccacgcccagcccctggccctgcaggccaccgaggccgaggccgaggagaacaacaaggtggtggaggagctgatcgaggagaacaacgacatgaagaacaagctggaggagctgcagaccctgtgcaagaccccccccagaagcctgagcgccggcgccatcgagaacgcctgcctgccctgcagcggcggcgccctggaggagctgagaggccagtacatcaaggccgtgaagaagatcaagtgcgacatgctgagatacatccaggagagcaaggagagagccgccgagatggtgaaggccgaggtgctgagagagagacaggagaccgccagaaagatgagaaagtactacctgatctgcctgcagcagatcctgcaggacgacggcaaggagggcgccgagaagaagatcatgaacgccgccagcaagctggccaccatggccaagctgctggagacccccatcagcagcaagagccagagcaagaccacccagagcgccctgcccctgaccagcgagatgctgatcgccgtgaagaagagcaagagaaacgacgtgaaccagaagatcccctgctgcatcgagagcaagagcaacagcgtgaacaccatcaccagaaccctgtgcgagcaggcccccaagagaagagccgcctgcaacctgcagagactgctggagaacagcgagcaccagagcatcaagcacgtgggcagcaaggagacccacctggagttccagttcggcgacggcagctgcaagcacctgaacagcctgcccagaaacgtgagccccgagttcgtgccctgcgagggcgagggcggcttcggcctgcacaagaagaaggacctgctgagcgacaacggcagcgagagcctgccccacagcgccgcctaccccttcctgggcaccctgggcaacaagcccagccccagatgcacccccggccccagcgagagcggctgcatgcacatcaccttcagagacagcaacgagagactgggcctgaaggtgtacaagtgcaaccccctgatggagagcgagaacgccgccagcgagaagagccagggcctggacgtgcaggagccccccgtgaaggacggcggcgacctgagcgactgcctgggctggcccagcagcagcgccaccctgagcttcgacagcagagaggccagcttcgtgcacggcagaccccagggcaccctggagatccccagcgagagcgtgaagagcaagcagttcagccccagcggctacctgagcgacaccgaggagagcaacatgatctgccagaccatgaagtgccagagataccagaccccctacctgagcgaggagaccacctacctggagcccggcaagatcagcgtgaactgcggccaccccagcagacacaaggccgacagactgaagagcgacttcaagaagctgagcagcaccctgcccagcagcgtgtgccagcagcccagcagaaagctgatcgtgcccctgagcagccagcaggacagcggcttcgacagccccttcgtgaacctggactag

SEQ ID NO: 76263 - DNA, 1779 bp, synthetic construct
  misc_feature 1..1779: note = Description of Artificial Sequence: Synthetic coding sequence
  source 1..1779: mol_type = other DNA
atgagcctggacttcggcagcgtggccctgcccgtgcagaacgaggacgaggagtacgacgaggaggactacgagagagagaaggagctgcagcagctgctgaccgacctgccccacgacatgctggacgacgacctgagcagccccgagctgcagtacagcgactgcagcgaggacggcaccgacggccagccccaccaccccgagcagctggagatgagctggaacgagcagatgctgcccaagagccagagcgtgaacggctacaacgagatccagagcctgtacgccggcgagaagtgcggcaacgtgtgggaggagaacagaagcaagaccgaggacagacaccccgtgtaccaccccgaggagggcggcgacgagggcggcagcggctacagcccccccagcaagtgcgagcagaccgacctgtaccacctgcccgagaacttcagaccctacaccaacggccagaagcaggagttcaacaaccaggccaccaacgtgatcaagttcagcgacccccagtggaaccacttccagggccccagctgccagggcctggagccctacaacaaggtgacctacaagccctaccagagcagcgcccagaacaacggcagccccgcccaggagatcaccggcagcgacaccttcgagggcctgcagcagcagttcctgggcgccaacgagaacagcgccgagaacatgcagatcatccagctgcaggtgctgaacaaggccaaggagagacagctggagaacctgatcgagaagctgaacgagagcgagagacagatcagatacctgaaccaccagctggtgatcatcaaggacgagaaggacggcctgaccctgagcctgagagagagccagaagctgttccagaacggcaaggagagagagatccagctggaggcccagatcaaggccctggagacccagatccaggccctgaaggtgaacgaggagcagatgatcaagaagagcagaaccaccgagatggccctggagagcctgaagcagcagctggtggacctgcaccacagcgagagcctgcagagagccagagagcagcacgagagcatcgtgatgggcctgaccaagaagtacgaggagcaggtgctgagcctgcagaagaacctggacgccaccgtgaccgccctgaaggagcaggaggacatctgcagcagactgaaggaccacgtgaagcagctggagagaaaccaggaggccatcaagctggagaagaccgagatcatcaacaagctgaccagaagcctggaggagagccagaagcagtgcgcccacctgctgcagagcggcagcgtgcaggaggtggcccagctgcagttccagctgcagcaggcccagaaggcccacgccatgagcgccaacatgaacaaggccctgcaggaggagctgaccgagctgaaggacgagatcagcctgtacgagagcgccgccaagctgggcatccaccccagcgacagcgagggcgagctgaacatcgagctgaccgagagctacgtggacctgggcatcaagaaggtgaactggaagaagagcaaggtgaccagcatcgtgcaggaggaggaccccaacgaggagctgagcaaggacgagttcatcctgaagctgaaggccgaggtgcagagactgctgggcagcaacagcatgaagagacacctggtgagccagctgcagaacgacctgaaggactgccacaagaagatcgaggacctgcaccaggtgaagaagaagaagaagaagaagaagtag

SEQ ID NO: 76264 - DNA, 207 bp, synthetic construct
  misc_feature 1..207: note = Description of Artificial Sequence: Synthetic coding sequence
  source 1..207: mol_type = other DNA
atgagcctggacttcggcagcgtggccctgcccgtgcagaacgaggacgaggagtacgacgaggaggactacgagagagagaaggagctgcagcagctgctgaccgacctgccccacgacatgctggacgacgacctgagcagccccgagctgcagtacagcgactgcagcgaggacggcaccgacggccagccccaccacccctag

SEQ ID NO: 76265 - DNA, 4755 bp, synthetic construct
  misc_feature 1..4755: note = Description of Artificial Sequence: Synthetic coding sequence
  source 1..4755: mol_type = other DNA
atgagcctgaccagctggttcctggtgagcagcggcggcaccagacacagactgcccagagagatgatcttcgtgggcagagacgactgcgagctgatgctgcagagcagaagcgtggacaagcagcacgccgtgatcaactacgacgccagcaccgacgagcacctggtgaaggacctgggcagcctgaacggcaccttcgtgaacgacgtgagaatccccgagcagacctacatcaccctgaagctggaggacaagctgagattcggctacgacaccaacctgttcaccgtggtgcagggcgagatgagagtgcccgaggaggccctgaagcacgagaagttcaccatccagctgcagctgagccagaagagcagcgagagcgagctgagcaagagcgccagcgccaagagcatcgacagcaaggtggccgacgccgccaccgaggtgcagcacaagaccaccgaggccctgaagagcgaggagaaggccatggacatcagcgccatgcccagaggcacccccctgtacggccagcccagctggtggggcgacgacgaggtggacgagaagagagccttcaagaccaacggcaagcccgaggagaagaaccacgaggccggcaccagcggctgcggcatcgacgccaagcaggtggaggagcagagcgccgccgccaacgaggaggtgctgttccccttctgcagagagcccagctacttcgagatccccaccaaggagttccagcagcccagccagatcaccgagagcaccatccacgagatccccaccaaggacacccccagcagccacatcaccggcgccggccacgccagcttcaccatcgagttcgacgacagcacccccggcaaggtgaccatcagagaccacgtgaccaagttcaccagcgaccagagacacaagagcaagaagagcagccccggcacccaggacctgctgggcatccagaccggcatgatggcccccgagaacaaggtggccgactggctggcccagaacaaccccccccagatgctgtgggagagaaccgaggaggacagcaagagcatcaagagcgacgtgcccgtgtacctgaagagactgaagggcaacaagcacgacgacggcacccagagcgacagcgagaacgccggcgcccacagaagatgcagcaagagagccaccctggaggagcacctgagaagacaccacagcgagcacaagaagctgcagaaggtgcaggccaccgagaagcaccaggaccaggccgtgaccagcagcgcccaccacagaggcggccacggcgtgccccacggcaagctgctgaagcagaagagcgaggagcccagcgtgagcatccccttcctgcagaccgccctgctgagaagcagcggcagcctgggccacagacccagccaggagatggacaagatgctgaagaaccaggccaccagcgccaccagcgagaaggacaacgacgacgaccagagcgacaagggcacctacaccatcgagctggagaaccccaacagcgaggaggtggaggccagaaagatgatcgacaaggtgttcggcgtggacgacaaccaggactacaacagacccgtgatcaacgagaagcacaaggacctgatcaaggactgggccctgagcagcgccgccgccgtgatggaggagagaaagcccctgaccaccagcggcttccaccacagcgaggagggcaccagcagcagcggcagcaagagatgggtgagccagtgggccagcctggccgccaaccacaccagacacgaccaggaggagagaatcatggagttcagcgcccccctgcccctggagaacgagaccgagatcagcgagagcggcatgaccgtgagaagcaccggcagcgccaccagcctggccagccagggcgagagaagaagaagaaccctgccccagctgcccaacgaggagaagagcctggagagccacagagccaaggtggtgacccagagaagcgagatcggcgagaagcaggacaccgagctgcaggagaaggagacccccacccaggtgtaccagaaggacaagcaggacgccgacagacccctgagcaagatgaacagagccgtgaacggcgagaccctgaagaccggcggcgacaacaagaccctgctgcacctgggcagcagcgcccccggcaaggagaagagcgagaccgacaaggagaccagcctggtgaagcagaccctggccaagctgcagcagcaggagcagagagaggaggcccagtggacccccaccaagctgagcagcaagaacgtgagcggccagaccgacaagtgcagagaggagaccttcaagcaggagagccagccccccgagaagaacagcggccacagcaccagcaagggcgacagagtggcccagagcgagagcaagagaagaaaggccgaggagatcctgaagagccagacccccaagggcggcgacaagaaggagagcagcaagagcctggtgagacagggcagcttcaccatcgagaagcccagccccaacatccccatcgagctgatcccccacatcaacaagcagaccagcagcacccccagcagcctggccctgaccagcgccagcagaatcagagagagaagcgagagcctggaccccgacagcagcatggacaccaccctgatcctgaaggacaccgaggccgtgatggccttcctggaggccaagctgagagaggacaacaagaccgacgagggccccgacacccccagctacaacagagacaacagcatcagccccgagagcgacgtggacaccgccagcaccatcagcctggtgaccggcgagaccgagagaaagagcacccagaagagaaagagcttcaccagcctgtacaaggacagatgcagcaccggcagccccagcaaggacgtgaccaagagcagcagcagcggcgccagagagaagatggagaagaagaccaagagcagaagcaccgacgtgggcagcagagccgacggcagaaagttcgtgcagagcagcggcagaatcagacagcccagcgtggacctgaccgacgacgaccagaccagcagcgtgccccacagcgccatcagcgacatcatgagcagcgaccaggagacctacagctgcaagccccacggcagaacccccctgaccagcgccgacgagcacgtgcacagcaagctggagggcagcaaggtgaccaagagcaagaccagccccgtggtgagcggcagcagcagcaagagcaccaccctgcccagacccagacccaccagaaccagcctgctgagaagagccagactgggcgaggccagcgacagcgagctggccgacgccgacaaggccagcgtggccagcgaggtgagcaccaccagcagcaccagcaagccccccaccggcagaagaaacatcagcagaatcgacctgctggcccagcccagaagaaccagactgggcagcctgagcgccagaagcgacagcgaggccaccatcagcagaagcagcgccagcagcagaaccgccgaggccatcatcagaagcggcgccagactggtgcccagcgacaagttcagccccagaatcagagccaacagcatcagcagactgagcgacagcaaggtgaagagcatgaccagcgcccacggcagcgccagcgtgaacagcagatggagaagattccccaccgactacgccagcaccagcgaggacgagttcggcagcaacagaaacagccccaagcacaccagactgagaaccagccccgccctgaagaccaccagactgcagagcgccggcagcgccatgcccaccagcagcagcttcaagcacagaatcaaggagcaggaggactacatcagagactggaccgcccacagagaggagatcgccagaatcagccaggacctggccctgatcgccagagagatcaacgacgtggccggcgagatcgacagcgtgaccagcagcggcaccgcccccagcaccaccgtgagcaccgccgccaccacccccggcagcgccatcgacaccagagaggagctggtggacagagtgttcgacgagagcctgaacttcagaaagatcccccccctggtgcacagcaagacccccgagggcaacaacggcagaagcggcgaccccagaccccaggccgccgagccccccgaccacctgaccatcaccagaagaagaacctggagcagagacgaggtgatgggcgacaacctgctgctgagcagcgtgttccagttcagcaagaagatcagacagagcatcgacaagaccgccggcaagatcagaatcctgttcaaggacaaggacagaaactgggacgacatcgagagcaagctgagagccgagagcgaggtgcccatcgtgaagaccagcagcatggagatcagcagcatcctgcaggagctgaagagagtggagaagcagctgcaggccatcaacgccatgatcgaccccgacggcaccctggaggccctgaacaacatgggcttccccagcgccatgctgcccagcccccccaagcagaagagcagccccgtgaacaaccaccacagccccggccagacccccaccctgggccagcccgaggccagagccctgcaccccgccgccgtgagcgccgccgccgagttcgagaacgccgagagcgaggccgacttcagcatccacttcaacagattcaaccccgacggcgaggaggaggacgtgaccgtgcaggagtag

SEQ ID NO: 76266 - DNA, 4383 bp, synthetic construct
  misc_feature 1..4383: note = Description of Artificial Sequence: Synthetic coding sequence
  source 1..4383: mol_type = other DNA
atgagcctgaccagctggttcctggtgagcagcggcggcaccagacacagactgcccagagagatgatcttcgtgggcagagacgactgcgagctgatgctgcagagcagaagcgtggacaagcagcacgccgtgatcaactacgacgccagcaccgacgagcacctggtgaaggacctgggcagcctgaacggcaccttcgtgaacgacgtgagaatccccgagcagacctacatcaccctgaagctggaggacaagctgagattcggctacgacaccaacctgttcaccgtggtgcagggcgagatgagagtgcccgaggaggccctgaagcacgagaagttcaccatccagctgcagctgagccagaagagcagcgagagcgagctgagcaagagcgccagcgccaagagcatcgacagcaaggtggccgacgccgccaccgaggtgcagcacaagaccaccgaggccctgaagagcgaggagaaggccatggacatcagcgccatgcccagaggcacccccctgtacggccagcccagctggtggggcgacgacgaggtggacgagaagagagccttcaagaccaacggcaagcccgaggagaagaaccacgaggccggcaccagcggctgcggcatcgacgccaagcaggtggaggagcagagcgccgccgccaacgaggaggtgctgttccccttctgcagagagcccagctacttcgagatccccaccaaggagttccagcagcccagccagatcaccgagagcaccatccacgagatccccaccaaggacacccccagcagccacatcaccggcgccggccacgccagcttcaccatcgagttcgacgacagcacccccggcaaggtgaccatcagagaccacgtgaccaagttcaccagcgaccagagacacaagagcaagaagagcagccccggcacccaggacctgctgggcatccagaccggcatgatggcccccgagaacaaggtggccgactggctggcccagaacaaccccccccagatgctgtgggagagaaccgaggaggacagcaagagcatcaagagcgacgtgcccgtgtacctgaagagactgaagggcaacaagcacgacgacggcacccagagcgacagcgagaacgccggcgcccacagaagatgcagcaagagagccaccctggaggagcacctgagaagacaccacagcgagcacaagaagctgcagaaggtgcaggccaccgagaagcaccaggaccaggccgtggtgttcggcgtggacgacaaccaggactacaacagacccgtgatcaacgagaagcacaaggacctgatcaaggactgggccctgagcagcgccgccgccgtgatggaggagagaaagcccctgaccaccagcggcttccaccacagcgaggagggcaccagcagcagcggcagcaagagatgggtgagccagtgggccagcctggccgccaaccacaccagacacgaccaggaggagagaatcatggagttcagcgcccccctgcccctggagaacgagaccgagatcagcgagagcggcatgaccgtgagaagcaccggcagcgccaccagcctggccagccagggcgagagaagaagaagaaccctgccccagctgcccaacgaggagaagagcctggagagccacagagccaaggtggtgacccagagaagcgagatcggcgagaagcaggacaccgagctgcaggagaaggagacccccacccaggtgtaccagaaggacaagcaggacgccgacagacccctgagcaagatgaacagagccgtgaacggcgagaccctgaagaccggcggcgacaacaagaccctgctgcacctgggcagcagcgcccccggcaaggagaagagcgagaccgacaaggagaccagcctggtgaagcagaccctggccaagctgcagcagcaggagcagagagaggaggcccagtggacccccaccaagctgagcagcaagaacgtgagcggccagaccgacaagtgcagagaggagaccttcaagcaggagagccagccccccgagaagaacagcggccacagcaccagcaagggcgacagagtggcccagagcgagagcaagagaagaaaggccgaggagatcctgaagagccagacccccaagggcggcgacaagaaggagagcagcaagagcctggtgagacagggcagcttcaccatcgagaagcccagccccaacatccccatcgagctgatcccccacatcaacaagcagaccagcagcacccccagcagcctggccctgaccagcgccagcagaatcagagagagaagcgagagcctggaccccgacagcagcatggacaccaccctgatcctgaaggacaccgaggccgtgatggccttcctggaggccaagctgagagaggacaacaagaccgacgagggccccgacacccccagctacaacagagacaacagcatcagccccgagagcgacgtggacaccgccagcaccatcagcctggtgaccggcgagaccgagagaaagagcacccagaagagaaagagcttcaccagcctgtacaaggacagatgcagcaccggcagccccagcaaggacgtgaccaagagcagcagcagcggcgccagagagaagatggagaagaagaccaagagcagaagcaccgacgtgggcagcagagccgacggcagaaagttcgtgcagagcagcggcagaatcagacagcccagcgtggacctgaccgacgacgaccagaccagcagcgtgccccacagcgccatcagcgacatcatgagcagcgaccaggagacctacagctgcaagccccacggcagaacccccctgaccagcgccgacgagcacgtgcacagcaagctggagggcagcaaggtgaccaagagcaagaccagccccgtggtgagcggcagcagcagcaagagcaccaccctgcccagacccagacccaccagaaccagcctgctgagaagagccagactgggcgaggccagcgacagcgagctggccgacgccgacaaggccagcgtggccagcgaggtgagcaccaccagcagcaccagcaagccccccaccggcagaagaaacatcagcagaatcgacctgctggcccagcccagaagaaccagactgggcagcctgagcgccagaagcgacagcgaggccaccatcagcagaagcagcgccagcagcagaaccgccgaggccatcatcagaagcggcgccagactggtgcccagcgacaagttcagccccagaatcagagccaacagcatcagcagactgagcgacagcaaggtgaagagcatgaccagcgcccacggcagcgccagcgccctgaagaccaccagactgcagagcgccggcagcgccatgcccaccagcagcagcttcaagcacagaatcaaggagcaggaggactacatcagagactggaccgcccacagagaggagatcgccagaatcagccaggacctggccctgatcgccagagagatcaacgacgtggccggcgagatcgacagcgtgaccagcagcggcaccgcccccagcaccaccgtgagcaccgccgccaccacccccggcagcgccatcgacaccagagaggaggtgggcgacctgcacggcgagatgcacaagctggtggacagagtgttcgacgagagcctgaacttcagaaagatcccccccctggtgcacagcaagacccccgagggcaacaacggcagaagcggcgaccccagaccccaggccgccgagccccccgaccacctgaccatcaccagaagaagaacctggagcagagacgaggtgatgggcgacaacctgctgctgagcagcgtgttccagttcagcaagaagatcagacagagcatcgacaagaccgccggcaagatcagaatcctgttcaaggacaaggacagaaactgggacgacatcgagagcaagctgagagccgagagcgaggtgcccatcgtgaagaccagcagcatggagatcagcagcatcctgcaggagctgaagagagtggagaagcagctgcaggccatcaacgccatgatcgaccccgacggcaccctggaggccctgaacaacatgggcttccccagcgccatgctgcccagcccccccaagcagaagagcagccccgtgaacaaccaccacagccccggccagacccccaccctgggccagcccgaggccagagccctgcaccccgccgccgtgagcgccgccgccgagttcgagaacgccgagagcgaggccgacttcagcatccacttcaacagattcaaccccgacggcgaggaggaggacgtgaccgtgcaggagtag

SEQ ID NO: 76267 - DNA, 4461 bp, synthetic construct
  misc_feature 1..4461: note = Description of Artificial Sequence: Synthetic coding sequence
  source 1..4461: mol_type = other DNA
atgagcctgaccagctggttcctggtgagcagcggcggcaccagacacagactgcccagagagatgatcttcgtgggcagagacgactgcgagctgatgctgcagagcagaagcgtggacaagcagcacgccgtgatcaactacgacgccagcaccgacgagcacctggtgaaggacctgggcagcctgaacggcaccttcgtgaacgacgtgagaatccccgagcagacctacatcaccctgaagctggaggacaagctgagattcggctacgacaccaacctgttcaccgtggtgcagggcgagatgagagtgcccgaggaggccctgaagcacgagaagttcaccatccagctgcagctgagccagaagagcagcgagagcgagctgagcaagagcgccagcgccaagagcatcgacagcaaggtggccgacgccgccaccgaggtgcagcacaagaccaccgaggccctgaagagcgaggagaaggccatggacatcagcgccatgcccagaggcacccccctgtacggccagcccagctggtggggcgacgacgaggtggacgagaagagagccttcaagaccaacggcaagcccgaggagaagaaccacgaggccggcaccagcggctgcggcatcgacgccaagcaggtggaggagcagagcgccgccgccaacgaggaggtgctgttccccttctgcagagagcccagctacttcgagatccccaccaaggagttccagcagcccagccagatcaccgagagcaccatccacgagatccccaccaaggacacccccagcagccacatcaccggcgccggccacgccagcttcaccatcgagttcgacgacagcacccccggcaaggtgaccatcagagaccacgtgaccaagttcaccagcgaccagagacacaagagcaagaagagcagccccggcacccaggacctgctgggcatccagaccggcatgatggcccccgagaacaaggtggccgactggctggcccagaacaaccccccccagatgctgtgggagagaaccgaggaggacagcaagagcatcaagagcgacgtgcccgtgtacctgaagagactgaagggcaacaagcacgacgacggcacccagagcgacagcgagaacgccggcgcccacagaagatgcagcaagagagccaccctggaggagcacctgagaagacaccacagcgagcacaagaagctgcagaaggtgcaggccaccgagaagcaccaggaccaggccgtggtgttcggcgtggacgacaaccaggactacaacagacccgtgatcaacgagaagcacaaggacctgatcaaggactgggccctgagcagcgccgccgccgtgatggaggagagaaagcccctgaccaccagcggcttccaccacagcgaggagggcaccagcagcagcggcagcaagagatgggtgagccagtgggccagcctggccgccaaccacaccagacacgaccaggaggagagaatcatggagttcagcgcccccctgcccctggagaacgagaccgagatcagcgagagcggcatgaccgtgagaagcaccggcagcgccaccagcctggccagccagggcgagagaagaagaagaaccctgccccagctgcccaacgaggagaagagcctggagagccacagagccaaggtggtgacccagagaagcgagatcggcgagaagcaggacaccgagctgcaggagaaggagacccccacccaggtgtaccagaaggacaagcaggacgccgacagacccctgagcaagatgaacagagccgtgaacggcgagaccctgaagaccggcggcgacaacaagaccctgctgcacctgggcagcagcgcccccggcaaggagaagagcgagaccgacaaggagaccagcctggtgaagcagaccctggccaagctgcagcagcaggagcagagagaggaggcccagtggacccccaccaagctgagcagcaagaacgtgagcggccagaccgacaagtgcagagaggagaccttcaagcaggagagccagccccccgagaagaacagcggccacagcaccagcaagggcgacagagtggcccagagcgagagcaagagaagaaaggccgaggagatcctgaagagccagacccccaagggcggcgacaagaaggagagcagcaagagcctggtgagacagggcagcttcaccatcgagaagcccagccccaacatccccatcgagctgatcccccacatcaacaagcagaccagcagcacccccagcagcctggccctgaccagcgccagcagaatcagagagagaagcgagagcctggaccccgacagcagcatggacaccaccctgatcctgaaggacaccgaggccgtgatggccttcctggaggccaagctgagagaggacaacaagaccgacgagggccccgacacccccagctacaacagagacaacagcatcagccccgagagcgacgtggacaccgccagcaccatcagcctggtgaccggcgagaccgagagaaagagcacccagaagagaaagagcttcaccagcctgtacaaggacagatgcagcaccggcagccccagcaaggacgtgaccaagagcagcagcagcggcgccagagagaagatggagaagaagaccaagagcagaagcaccgacgtgggcagcagagccgacggcagaaagttcgtgcagagcagcggcagaatcagacagcccagcgtggacctgaccgacgacgaccagaccagcagcgtgccccacagcgccatcagcgacatcatgagcagcgaccaggagacctacagctgcaagccccacggcagaacccccctgaccagcgccgacgagcacgtgcacagcaagctggagggcagcaaggtgaccaagagcaagaccagccccgtggtgagcggcagcagcagcaagagcaccaccctgcccagacccagacccaccagaaccagcctgctgagaagagccagactgggcgaggccagcgacagcgagctggccgacgccgacaaggccagcgtggccagcgaggtgagcaccaccagcagcaccagcaagccccccaccggcagaagaaacatcagcagaatcgacctgctggcccagcccagaagaaccagactgggcagcctgagcgccagaagcgacagcgaggccaccatcagcagaagcagcgccagcagcagaaccgccgaggccatcatcagaagcggcgccagactggtgcccagcgacaagttcagccccagaatcagagccaacagcatcagcagactgagcgacagcaaggtgaagagcatgaccagcgcccacggcagcgccagcgtgaacagcagatggagaagattccccaccgactacgccagcaccagcgaggacgagttcggcagcaacagaaacagccccaagcacaccagactgagaaccagccccgccctgaagaccaccagactgcagagcgccggcagcgccatgcccaccagcagcagcttcaagcacagaatcaaggagcaggaggactacatcagagactggaccgcccacagagaggagatcgccagaatcagccaggacctggccctgatcgccagagagatcaacgacgtggccggcgagatcgacagcgtgaccagcagcggcaccgcccccagcaccaccgtgagcaccgccgccaccacccccggcagcgccatcgacaccagagaggagctggtggacagagtgttcgacgagagcctgaacttcagaaagatcccccccctggtgcacagcaagacccccgagggcaacaacggcagaagcggcgaccccagaccccaggccgccgagccccccgaccacctgaccatcaccagaagaagaacctggagcagagacgaggtgatgggcgacaacctgctgctgagcagcgtgttccagttcagcaagaagatcagacagagcatcgacaagaccgccggcaagatcagaatcctgttcaaggacaaggacagaaactgggacgacatcgagagcaagctgagagccgagagcgaggtgcccatcgtgaagaccagcagcatggagatcagcagcatcctgcaggagctgaagagagtggagaagcagctgcaggccatcaacgccatgatcgaccccgacggcaccctggaggccctgaacaacatgggcttccccagcgccatgctgcccagcccccccaagcagaagagcagccccgtgaacaaccaccacagccccggccagacccccaccctgggccagcccgaggccagagccctgcaccccgccgccgtgagcgccgccgccgagttcgagaacgccgagagcgaggccgacttcagcatccacttcaacagattcaaccccgacggcgaggaggaggacgtgaccgtgcaggagtag

SEQ ID NO: 76268 - DNA, 1239 bp, synthetic construct
  misc_feature 1..1239: note = Description of Artificial Sequence: Synthetic coding sequence
  source 1..1239: mol_type = other DNA
atgagagtgcccgaggaggccctgaagcacgagaagttcaccatccagctgcagctgagccagaagagcagcgagagcgagctgagcaagagcgccagcgccaagagcatcgacagcaaggtggccgacgccgccaccgaggtgcagcacaagaccaccgaggccctgaagagcgaggagaaggccatggacatcagcgccatgcccagaggcacccccctgtacggccagcccagctggtggggcgacgacgaggtggacgagaagagagccttcaagaccaacggcaagcccgaggagaagaaccacgaggccggcaccagcggctgcggcatcgacgccaagcaggtggaggagcagagcgccgccgccaacgaggaggtgctgttccccttctgcagagagcccagctacttcgagatccccaccaaggagttccagcagcccagccagatcaccgagagcaccatccacgagatccccaccaaggacacccccagcagccacatcaccggcgccggccacgccagcttcaccatcgagttcgacgacagcacccccggcaaggtgaccatcagagaccacgtgaccaagttcaccagcgaccagagacacaagagcaagaagagcagccccggcacccaggacctgctgggcatccagaccggcatgatggcccccgagaacaaggtggccgactggctggcccagaacaaccccccccagatgctgtgggagagaaccgaggaggacagcaagagcatcaagagcgacgtgcccgtgtacctgaagagactgaagggcaacaagcacgacgacggcacccagagcgacagcgagaacgccggcgcccacagaagatgcagcaagagagccaccctggaggagcacctgagaagacaccacagcgagcacaagaagctgcagaaggtgcaggccaccgagaagcaccaggaccaggccgtgaccagcagcgcccaccacagaggcggccacggcgtgccccacggcaagctgctgaagcagaagagcgaggagcccagcgtgagcatccccttcctgcagaccgccctgctgagaagcagcggcagcctgggccacagacccagccaggagatggacaagatgctgaagaaccaggccgactgcggcagcgtggccttctgcggcttcatgatcttcaagctgaacctgatgatcacccccttccccttcatcgacctgttcagcttcttctag

SEQ ID NO: 76269 - DNA, 402 bp, synthetic construct
  misc_feature 1..402: note = Description of Artificial Sequence: Synthetic coding sequence
  source 1..402: mol_type = other DNA
atgagcctgaccagctggttcctggtgagcagcggcggcaccagacacagactgcccagagagatgatcttcgtgggcagagacgactgcgagctgatgctgcagagcagaagcgtggacaagcagcacgccgtgatcaactacgacgccagcaccgacgagcacctggtgaaggacctgggcagcctgaacggcaccttcgtgaacgacgtgagaatccccgagcagacctacatcaccctgaagctggaggacaagctgagattcggctacgacaccaacctgttcaccgtggtgcagggcgagatgagagtgcccgaggaggccctgaagcacgagaagttcaccatccagctgcagctgagccagaagagcagcgagagcgagctgagcaagagctag

SEQ ID NO: 76270 - DNA, 267 bp, synthetic construct
  misc_feature 1..267: note = Description of Artificial Sequence: Synthetic coding sequence
  source 1..267: mol_type = other DNA
atgagcctgaccagctggttcctggtgagcagcggcggcaccagacacagactgcccagagagatgatcttcgtgggcagagacgactgcgagctgatgctgcagagcagaagcgtggacaagcagcacgccgtgatcaactacgacgccagcaccgacgagcacctggtgaaggacctgggcagcctgaacggcaccttcgtgaacgacgtgagaatccccgagcagacctacatcaccctgaagctggaggacaagctgagatag

SEQ ID NO: 76271 - DNA, 336 bp, synthetic construct
  misc_feature 1..336: note = Description of Artificial Sequence: Synthetic coding sequence
  source 1..336: mol_type = other DNA
atgagcctgaccagctggttcctggtgagcagcggcggcaccagacacagactgcccagagagatgatcttcgtgggcagagacgactgcgagctgatgctgcagagcagaagcgtggacaagcagcacgccgtgatcaactacgacgccagcaccgacgagcacctggtgaaggacctgggcagcctgaacggcaccttcgtgaacgacgtgagaatccccgagcagacctacatcaccctgaagctggaggacaagctgagattcggctacgacaccaacctgttcaccgtggtgcagggcgagatgagagtgcccgaggaggccctgaagtag

SEQ ID NO: 76272 - DNA, 1407 bp, synthetic construct
  misc_feature 1..1407: note = Description of Artificial Sequence: Synthetic coding sequence
  source 1..1407: mol_type = other DNA
atgagcagcgaccaggagacctacagctgcaagccccacggcagaacccccctgaccagcgccgacgagcacgtgcacagcaagctggagggcagcaaggtgaccaagagcaagaccagccccgtggtgagcggcagcagcagcaagagcaccaccctgcccagacccagacccaccagaaccagcctgctgagaagagccagactgggcgaggccagcgacagcgagctggccgacgccgacaaggccagcgtggccagcgaggtgagcaccaccagcagcaccagcaagccccccaccggcagaagaaacatcagcagaatcgacctgctggcccagcccagaagaaccagactgggcagcctgagcgccagaagcgacagcgaggccaccatcagcagaagcagcgccagcagcagaaccgccgaggccatcatcagaagcggcgccagactggtgcccagcgacaagttcagccccagaatcagagccaacagcatcagcagactgagcgacagcaaggtgaagagcatgaccagcgcccacggcagcgccagcgccctgaagaccaccagactgcagagcgccggcagcgccatgcccaccagcagcagcttcaagcacagaatcaaggagcaggaggactacatcagagactggaccgcccacagagaggagatcgccagaatcagccaggacctggccctgatcgccagagagatcaacgacgtggccggcgagatcgacagcgtgaccagcagcggcaccgcccccagcaccaccgtgagcaccgccgccaccacccccggcagcgccatcgacaccagagaggaggtgggcgacctgcacggcgagatgcacaagctggtggacagagtgttcgacgagagcctgaacttcagaaagatcccccccctggtgcacagcaagacccccgagggcaacaacggcagaagcggcgaccccagaccccaggccgccgagccccccgaccacctgaccatcaccagaagaagaacctggagcagagacgaggtgatgggcgacaacctgctgctgagcagcgtgttccagttcagcaagaagatcagacagagcatcgacaagaccgccggcaagatcagaatcctgttcaaggacaaggacagaaactgggacgacatcgagagcaagctgagagccgagagcgaggtgcccatcgtgaagaccagcagcatggagatcagcagcatcctgcaggagctgaagagagtggagaagcagctgcaggccatcaacgccatgatcgaccccgacggcaccctggaggccctgaacaacatgggcttccccagcgccatgctgcccagcccccccaagcagaagagcagccccgtgaacaaccaccacagccccgccatgctgtag

SEQ ID NO: 76273 - DNA, 7161 bp, synthetic construct
  misc_feature 1..7161: note = Description of Artificial Sequence: Synthetic coding sequence
  source 1..7161: mol_type = other DNA
atggagaccagaagccccggcctgaacaacatgaagccccagagcctgcagctggtgctggaggagcaggtgctggccctgcagcagcagatggccgagaaccaggccgccagctggagaaagctgaagaacagccaggaggcccagcagagacaggccaccctggtgagaaagctgcaggccaaggtgctgcagtacagaagctggtgccaggagctggagaagagactggaggccaccggcggccccatcccccagagatgggagaacgtggaggagcccaacctggacgagctgctggtgagactggaggaggagcagcagagatgcgagagcctggccgaggtgaacacccagctgagactgcacatggagaaggccgacgtggtgaacaaggccctgagagaggacgtggagaagctgaccgtggactggagcagagccagagacgagctgatgagaaaggagagccagtggcagatggagcaggagttcttcaagggctacctgaagggcgagcacggcagactgctgagcctgtggagagaggtggtgaccttcagaagacacttcctggagatgaagagcgccaccgacagagacctgatggagctgaaggccgagcacgtgagactgagcggcagcctgctgacctgctgcctgagactgaccgtgggcgcccagagcagagagcccaacggcagcggcagaatggacggcagagagcccgcccagctgctgctgctgctggccaagacccaggagctggagaaggaggcccacgagagaagccaggagctgatccagctgaagagccagggcgacctggagaaggccgagctgcaggacagagtgaccgagctgagcgccctgctgacccagagccagaagcagaacgaggactacgagaagatgatcaaggccctgagagagaccgtggagatcctggagaccaaccacaccgagctgatggagcacgaggccagcctgagcagaaacgcccaggaggagaagctgagcctgcagcaggtgatcaaggacatcacccaggtgatggtggaggagggcgacaacatcgcccagggcagcggccacgagaacagcctggagctggacagcagcatcttcagccagttcgactaccaggacgccgacaaggccctgaccctggtgagaagcgtgctgaccagaagaagacaggccgtgcaggacctgagacagcagctggccggctgccaggaggccgtgaacctgctgcagcagcagcacgaccagtgggaggaggagggcaaggccctgagacagagactgcagaagctgaccggcgagagagacaccctggccggccagaccgtggacctgcagggcgaggtggacagcctgagcaaggagagagagctgctgcagaaggccagagaggagctgagacagcagctggaggtgctggagcaggaggcctggagactgagaagagtgaacgtggagctgcagctgcagggcgacagcgcccagggccagaaggaggagcagcaggaggagctgcacctggccgtgagagagagagagagactgcaggagatgctgatgggcctggaggccaagcagagcgagagcctgagcgagctgatcaccctgagagaggccctggagagcagccacctggagggcgagctgctgagacaggagcagaccgaggtgaccgccgccctggccagagccgagcagagcatcgccgagctgagcagcagcgagaacaccctgaagaccgaggtggccgacctgagagccgccgccgtgaagctgagcgccctgaacgaggccctggccctggacaaggtgggcctgaaccagcagctgctgcagctggaggaggagaaccagagcgtgtgcagcagaatggaggccgccgagcaggccagaaacgccctgcaggtggacctggccgaggccgagaagagaagagaggccctgtgggagaagaacacccacctggaggcccagctgcagaaggccgaggaggccggcgccgagctgcaggccgacctgagagacatccaggaggagaaggaggagatccagaagaagctgagcgagagcagacaccagcaggaggccgccaccacccagctggagcagctgcaccaggaggccaagagacaggaggaggtgctggccagagccgtgcaggagaaggaggccctggtgagagagaaggccgccctggaggtgagactgcaggccgtggagagagacagacaggacctggccgagcagctgcagggcctgagcagcgccaaggagctgctggagagcagcctgttcgaggcccagcagcagaacagcgtgatcgaggtgaccaagggccagctggaggtgcagatccagaccgtgacccaggccaaggaggtgatccagggcgaggtgagatgcctgaagctggagctggacaccgagagaagccaggccgagcaggagagagacgccgccgccagacagctggcccaggccgagcaggagggcaagaccgccctggagcagcagaaggccgcccacgagaaggaggtgaaccagctgagagagaagtggatgcagctggagaccgagaaggagagagtgagcctgctggagaccctgctgcagacccagaaggagctggccgacgccagccagcagctggagagactgagacaggacatgaaggtgcagaagctgaaggagcaggagaccaccggcatcctgcagacccagctgcaggaggcccagagagagctgaaggaggccgccagacagcacagagacgacctggccgccctgcaggaggagagcagcagcctgctgcaggacaagatggacctgcagaagcaggtggaggacctgaagagccagctggtggcccaggacgacagccagagactggtggagcaggaggtgcaggagaagctgagagagacccaggagtacaacagaatccagaaggagctggagagagagaaggccagcctgaccctgagcctgatggagaaggagcagagactgctggtgctgcaggaggccgacagcatcagacagcaggagctgagcgccctgagacaggacatgcaggaggcccagggcgagcagaaggagctgagcgcccagatggagctgctgagacaggaggtgaaggagaaggaggccgacttcctggcccaggaggcccagctgctggaggagctggaggccagccacatcaccgagcagcagctgagagccagcctgtgggcccaggaggccaaggccgcccagctgcagctgagactgagaagcaccgagagccagctggaggccctggccgccgagcagcagcccggcaaccaggcccaggcccaggcccagctggccagcctgtacagcgccctgcagcaggccctgggcagcgtgtgcgagagcagacccgagctgagcggcggcggcgacagcgcccccagcgtgtggggcctggagcccgaccagaacggcgccagaagcctgttcaagagaggccccctgctgaccgccctgagcgccgaggccgtggccagcgccctgcacaagctgcaccaggacctgtggaagacccagcagaccagagacgtgctgagagaccaggtgcagaagctggaggagagactgaccgacaccgaggccgagaagagccaggtgcacaccgagctgcaggacctgcagagacagctgagccagaaccaggaggagaagagcaagtgggagggcaagcagaacagcctggagagcgagctgatggagctgcacgagaccatggccagcctgcagagcagactgagaagagccgagctgcagagaatggaggcccagggcgagagagagctgctgcaggccgccaaggagaacctgaccgcccaggtggagcacctgcaggccgccgtggtggaggccagagcccaggccagcgccgccggcatcctggaggaggacctgagaaccgccagaagcgccctgaagctgaagaacgaggaggtggagagcgagagagagagagcccaggccctgcaggagcagggcgagctgaaggtggcccagggcaaggccctgcaggagaacctggccctgctgacccagaccctggccgagagagaggaggaggtggagaccctgagaggccagatccaggagctggagaagcagagagagatgcagaaggccgccctggagctgctgagcctggacctgaagaagagaaaccaggaggtggacctgcagcaggagcagatccaggagctggagaagtgcagaagcgtgctggagcacctgcccatggccgtgcaggagagagagcagaagctgaccgtgcagagagagcagatcagagagctggagaaggacagagagacccagagaaacgtgctggagcaccagctgctggagctggagaagaaggaccagatgatcgagagccagagaggccaggtgcaggacctgaagaagcagctggtgaccctggagtgcctggccctggagctggaggagaaccaccacaagatggagtgccagcagaagctgatcaaggagctggagggccagagagagacccagagagtggccctgacccacctgaccctggacctggaggagagaagccaggagctgcaggcccagagcagccagatccacgacctggagagccacagcaccgtgctggccagagagctgcaggagagagaccaggaggtgaagagccagagagagcagatcgaggagctgcagagacagaaggagcacctgacccaggacctggagagaagagaccaggagctgatgctgcagaaggagagaatccaggtgctggaggaccagagaaccagacagaccaagatcctggaggaggacctggagcagatcaagctgagcctgagagagagaggcagagagctgaccacccagagacagctgatgcaggagagagccgaggagggcaagggccccagcaaggcccagagaggcagcctggagcacatgaagctgatcctgagagacaaggagaaggaggtggagtgccagcaggagcacatccacgagctgcaggagctgaaggaccagctggagcagcagctgcagggcctgcacagaaaggtgggcgagaccagcctgctgctgagccagagagagcaggagatcgtggtgctgcagcagcagctgcaggaggccagagagcagggcgagctgaaggagcagagcctgcagagccagctggacgaggcccagagagccctggcccagagagaccaggagctggaggccctgcagcaggagcagcagcaggcccagggccaggaggagagagtgaaggagaaggccgacgccctgcagggcgccctggagcaggcccacatgaccctgaaggagagacacggcgagctgcaggaccacaaggagcaggccagaagactggaggaggagctggccgtggagggcagaagagtgcaggccctggaggaggtgctgggcgacctgagagccgagagcagagagcaggagaaggccctgctggccctgcagcagcagtgcgccgagcaggcccaggagcacgaggtggagaccagagccctgcaggacagctggctgcaggcccaggccgtgctgaaggagagagaccaggagctggaggccctgagagccgagagccagagcagcagacaccaggaggaggccgccagagccagagccgaggccctgcaggaggccctgggcaaggcccacgccgccctgcagggcaaggagcagcacctgctggagcaggccgagctgagcagaagcctggaggccagcaccgccaccctgcaggccagcctggacgcctgccaggcccacagcagacagctggaggaggccctgagaatccaggagggcgagatccaggaccaggacctgagataccaggaggacgtgcagcagctgcagcaggccctggcccagagagacgaggagctgagacaccagcaggagagagagcagctgctggagaagagcctggcccagagagtgcaggagaacatgatccaggagaagcagaacctgggccaggagagagaggaggaggagatcagaggcctgcaccagagcgtgagagagctgcagctgaccctggcccagaaggagcaggagatcctggagctgagagagacccagcagagaaacaacctggaggccctgccccacagccacaagaccagccccatggaggagcagagcctgaagctggacagcctggagcccagactgcagagagagctggagagactgcaggccgccctgagacagaccgaggccagagagatcgagtggagagagaaggcccaggacctggccctgagcctggcccagaccaaggccagcgtgagcagcctgcaggaggtggccatgttcctgcaggccagcgtgctggagagagacagcgagcagcagagactgcaggacgagctggagctgaccagaagagccctggagaaggagagactgcacagccccggcgccaccagcaccgccgagctgggcagcagaggcgagcagggcgtgcagctgggcgaggtgagcggcgtggaggccgagcccagccccgacggcatggagaagcagagctggagacagagactggagcacctgcagcaggccgtggccagactggagatcgacagaagcagactgcagagacacaacgtgcagctgagaagcaccctggagcaggtggagagagagagaagaaagctgaagagagaggccatgagagccgcccaggccggcagcctggagatcagcaaggccaccgccagcagccccacccagcaggacggcagaggccagaagaacagcgacgccaagtgcgtggccgagctgcagaaggaggtggtgctgctgcaggcccagctgaccctggagagaaagcagaagcaggactacatcaccagaagcgcccagaccagcagagagctggccggcctgcaccacagcctgagccacagcctgctggccgtggcccaggcccccgaggccaccgtgctggaggccgagaccagaagactggacgagagcctgacccagagcctgaccagccccggccccgtgctgctgcaccccagccccagcaccacccaggccgccagcagatag

SEQ ID NO: 76274 - DNA, 1020 bp, synthetic construct
  misc_feature 1..1020: note = Description of Artificial Sequence: Synthetic coding sequence
  source 1..1020: mol_type = other DNA
atggagaccagaagccccggcctgaacaacatgaagccccagagcctgcagctggtgctggaggagcaggtgctggccctgcagcagcagatggccgagaaccaggccgccagctggagaaagctgaagaacagccaggaggcccagcagagacaggccaccctggtgagaaagctgcaggccaaggtgctgcagtacagaagctggtgccaggagctggagaagagactggaggccaccggcggccccatcccccagagatgggagaacgtggaggagcccaacctggacgagctgctggtgagactggaggaggagcagcagagatgcgagagcctggccgaggtgaacacccagctgagactgcacatggagaaggccgacgtggtgaacaaggccctgagagaggacgtggagaagctgaccgtggactggagcagagccagagacgagctgatgagaaaggagagccagtggcagatggagcaggagttcttcaagggctacctgaagggcgagcacggcagactgctgagcctgtggagagaggtggtgaccttcagaagacacttcctggagatgaagagcgccaccgacagagacctgatggagctgaaggccgagcacgtgagactgagcggcagcctgctgacctgctgcctgagactgaccgtgggcgcccagagcagagagcccaacggcagcggcagaatggacggcagagagcccgcccagctgctgctgctgctggccaagacccaggagctggagaaggaggcccacgagagaagccaggagctgatccagctgaagagccagggcgacctggagaaggccgagctgcaggacagagtgaccgagctgagcgccctgctgacccagagccagaagcagaacgaggactacgagaagatgatcaaggccctgagagagaccgtggagatcctggtgcacgaccccctgctgtggaagggcgtgggcagaggcctggtgggcagcctgtgcttcatggacagatag

SEQ ID NO: 76275 - DNA, 7329 bp, synthetic construct
  misc_feature 1..7329: note = Description of Artificial Sequence: Synthetic coding sequence
  source 1..7329: mol_type = other DNA
atggagaccagaagccccggcctgaacaacatgaagccccagagcctgcagctggtgctggaggagcaggtgctggccctgcagcagcagatggccgagaaccaggccgccagctggagaaagctgaagaacagccaggaggcccagcagagacaggccaccctggtgagaaagctgcaggccaaggtgctgcagtacagaagctggtgccaggagctggagaagagactggaggccaccggcggccccatcccccagagatgggagaacgtggaggagcccaacctggacgagctgctggtgagactggaggaggagcagcagagatgcgagagcctggccgaggtgaacacccagctgagactgcacatggagaaggccgacgtggtgaacaaggccctgagagaggacgtggagaagctgaccgtggactggagcagagccagagacgagctgatgagaaaggagagccagtggcagatggagcaggagttcttcaagggctacctgaagggcgagcacggcagactgctgagcctgtggagagaggtggtgaccttcagaagacacttcctggagatgaagagcgccaccgacagagacctgatggagctgaaggccgagcacgtgagactgagcggcagcctgctgacctgctgcctgagactgaccgtgggcgcccagagcagagagcccaacggcagcggcagaatggacggcagagagcccgcccagctgctgctgctgctggccaagacccaggagctggagaaggaggcccacgagagaagccaggagctgatccagctgaagagccagggcgacctggagaaggccgagctgcaggacagagtgaccgagctgagcgccctgctgacccagagccagaagcagaacgaggactacgagaagatgatcaaggccctgagagagaccgtggagatcctggagaccaaccacaccgagctgatggagcacgaggccagcctgagcagaaacgcccaggaggagaagctgagcctgcagcaggtgatcaaggacatcacccaggtgatggtggaggagggcgacaacatcgcccagggcagcggccacgagaacagcctggagctggacagcagcatcttcagccagttcgactaccaggacgccgacaaggccctgaccctggtgagaagcgtgctgaccagaagaagacaggccgtgcaggacctgagacagcagctggccggctgccaggaggccgtgaacctgctgcagcagcagcacgaccagtgggaggaggagggcaaggccctgagacagagactgcagaagctgaccggcgagagagacaccctggccggccagaccgtggacctgcagggcgaggtggacagcctgagcaaggagagagagctgctgcagaaggccagagaggagctgagacagcagctggaggtgctggagcaggaggcctggagactgagaagagtgaacgtggagctgcagctgcagggcgacagcgcccagggccagaaggaggagcagcaggaggagctgcacctggccgtgagagagagagagagactgcaggagatgctgatgggcctggaggccaagcagagcgagagcctgagcgagctgatcaccctgagagaggccctggagagcagccacctggagggcgagctgctgagacaggagcagaccgaggtgaccgccgccctggccagagccgagcagagcatcgccgagctgagcagcagcgagaacaccctgaagaccgaggtggccgacctgagagccgccgccgtgaagctgagcgccctgaacgaggccctggccctggacaaggtgggcctgaaccagcagctgctgcagctggaggaggagaaccagagcgtgtgcagcagaatggaggccgccgagcaggccagaaacgccctgcaggtggacctggccgaggccgagaagagaagagaggccctgtgggagaagaacacccacctggaggcccagctgcagaaggccgaggaggccggcgccgagctgcaggccgacctgagagacatccaggaggagaaggaggagatccagaagaagctgagcgagagcagacaccagcaggaggccgccaccacccagctggagcagctgcaccaggaggccaagagacaggaggaggtgctggccagagccgtgcaggagaaggaggccctggtgagagagaaggccgccctggaggtgagactgcaggccgtggagagagacagacaggacctggccgagcagctgcagggcctgagcagcgccaaggagctgctggagagcagcctgttcgaggcccagcagcagaacagcgtgatcgaggtgaccaagggccagctggaggtgcagatccagaccgtgacccaggccaaggaggtgatccagggcgaggtgagatgcctgaagctggagctggacaccgagagaagccaggccgagcaggagagagacgccgccgccagacagctggcccaggccgagcaggagggcaagaccgccctggagcagcagaaggccgcccacgagaaggaggtgaaccagctgagagagaagtgggagaaggagagaagctggcaccagcaggagctggccaaggccctggagagcctggagagagagaagatggagctggagatgagactgaaggagcagcagaccgagatggaggccatccaggcccagagagaggaggagagaacccaggccgagagcgccctgtgccagatgcagctggagaccgagaaggagagagtgagcctgctggagaccctgctgcagacccagaaggagctggccgacgccagccagcagctggagagactgagacaggacatgaaggtgcagaagctgaaggagcaggagaccaccggcatcctgcagacccagctgcaggaggcccagagagagctgaaggaggccgccagacagcacagagacgacctggccgccctgcaggaggagagcagcagcctgctgcaggacaagatggacctgcagaagcaggtggaggacctgaagagccagctggtggcccaggacgacagccagagactggtggagcaggaggtgcaggagaagctgagagagacccaggagtacaacagaatccagaaggagctggagagagagaaggccagcctgaccctgagcctgatggagaaggagcagagactgctggtgctgcaggaggccgacagcatcagacagcaggagctgagcgccctgagacaggacatgcaggaggcccagggcgagcagaaggagctgagcgcccagatggagctgctgagacaggaggtgaaggagaaggaggccgacttcctggcccaggaggcccagctgctggaggagctggaggccagccacatcaccgagcagcagctgagagccagcctgtgggcccaggaggccaaggccgcccagctgcagctgagactgagaagcaccgagagccagctggaggccctggccgccgagcagcagcccggcaaccaggcccaggcccaggcccagctggccagcctgtacagcgccctgcagcaggccctgggcagcgtgtgcgagagcagacccgagctgagcggcggcggcgacagcgcccccagcgtgtggggcctggagcccgaccagaacggcgccagaagcctgttcaagagaggccccctgctgaccgccctgagcgccgaggccgtggccagcgccctgcacaagctgcaccaggacctgtggaagacccagcagaccagagacgtgctgagagaccaggtgcagaagctggaggagagactgaccgacaccgaggccgagaagagccaggtgcacaccgagctgcaggacctgcagagacagctgagccagaaccaggaggagaagagcaagtgggagggcaagcagaacagcctggagagcgagctgatggagctgcacgagaccatggccagcctgcagagcagactgagaagagccgagctgcagagaatggaggcccagggcgagagagagctgctgcaggccgccaaggagaacctgaccgcccaggtggagcacctgcaggccgccgtggtggaggccagagcccaggccagcgccgccggcatcctggaggaggacctgagaaccgccagaagcgccctgaagctgaagaacgaggaggtggagagcgagagagagagagcccaggccctgcaggagcagggcgagctgaaggtggcccagggcaaggccctgcaggagaacctggccctgctgacccagaccctggccgagagagaggaggaggtggagaccctgagaggccagatccaggagctggagaagcagagagagatgcagaaggccgccctggagctgctgagcctggacctgaagaagagaaaccaggaggtggacctgcagcaggagcagatccaggagctggagaagtgcagaagcgtgctggagcacctgcccatggccgtgcaggagagagagcagaagctgaccgtgcagagagagcagatcagagagctggagaaggacagagagacccagagaaacgtgctggagcaccagctgctggagctggagaagaaggaccagatgatcgagagccagagaggccaggtgcaggacctgaagaagcagctggtgaccctggagtgcctggccctggagctggaggagaaccaccacaagatggagtgccagcagaagctgatcaaggagctggagggccagagagagacccagagagtggccctgacccacctgaccctggacctggaggagagaagccaggagctgcaggcccagagcagccagatccacgacctggagagccacagcaccgtgctggccagagagctgcaggagagagaccaggaggtgaagagccagagagagcagatcgaggagctgcagagacagaaggagcacctgacccaggacctggagagaagagaccaggagctgatgctgcagaaggagagaatccaggtgctggaggaccagagaaccagacagaccaagatcctggaggaggacctggagcagatcaagctgagcctgagagagagaggcagagagctgaccacccagagacagctgatgcaggagagagccgaggagggcaagggccccagcaaggcccagagaggcagcctggagcacatgaagctgatcctgagagacaaggagaaggaggtggagtgccagcaggagcacatccacgagctgcaggagctgaaggaccagctggagcagcagctgcagggcctgcacagaaaggtgggcgagaccagcctgctgctgagccagagagagcaggagatcgtggtgctgcagcagcagctgcaggaggccagagagcagggcgagctgaaggagcagagcctgcagagccagctggacgaggcccagagagccctggcccagagagaccaggagctggaggccctgcagcaggagcagcagcaggcccagggccaggaggagagagtgaaggagaaggccgacgccctgcagggcgccctggagcaggcccacatgaccctgaaggagagacacggcgagctgcaggaccacaaggagcaggccagaagactggaggaggagctggccgtggagggcagaagagtgcaggccctggaggaggtgctgggcgacctgagagccgagagcagagagcaggagaaggccctgctggccctgcagcagcagtgcgccgagcaggcccaggagcacgaggtggagaccagagccctgcaggacagctggctgcaggcccaggccgtgctgaaggagagagaccaggagctggaggccctgagagccgagagccagagcagcagacaccaggaggaggccgccagagccagagccgaggccctgcaggaggccctgggcaaggcccacgccgccctgcagggcaaggagcagcacctgctggagcaggccgagctgagcagaagcctggaggccagcaccgccaccctgcaggccagcctggacgcctgccaggcccacagcagacagctggaggaggccctgagaatccaggagggcgagatccaggaccaggacctgagataccaggaggacgtgcagcagctgcagcaggccctggcccagagagacgaggagctgagacaccagcaggagagagagcagctgctggagaagagcctggcccagagagtgcaggagaacatgatccaggagaagcagaacctgggccaggagagagaggaggaggagatcagaggcctgcaccagagcgtgagagagctgcagctgaccctggcccagaaggagcaggagatcctggagctgagagagacccagcagagaaacaacctggaggccctgccccacagccacaagaccagccccatggaggagcagagcctgaagctggacagcctggagcccagactgcagagagagctggagagactgcaggccgccctgagacagaccgaggccagagagatcgagtggagagagaaggcccaggacctggccctgagcctggcccagaccaaggccagcgtgagcagcctgcaggaggtggccatgttcctgcaggccagcgtgctggagagagacagcgagcagcagagactgcaggacgagctggagctgaccagaagagccctggagaaggagagactgcacagccccggcgccaccagcaccgccgagctgggcagcagaggcgagcagggcgtgcagctgggcgaggtgagcggcgtggaggccgagcccagccccgacggcatggagaagcagagctggagacagagactggagcacctgcagcaggccgtggccagactggagatcgacagaagcagactgcagagacacaacgtgcagctgagaagcaccctggagcaggtggagagagagagaagaaagctgaagagagaggccatgagagccgcccaggccggcagcctggagatcagcaaggccaccgccagcagccccacccagcaggacggcagaggccagaagaacagcgacgccaagtgcgtggccgagctgcagaaggaggtggtgctgctgcaggcccagctgaccctggagagaaagcagaagcaggactacatcaccagaagcgcccagaccagcagagagctggccggcctgcaccacagcctgagccacagcctgctggccgtggcccaggcccccgaggccaccgtgctggaggccgagaccagaagactggacgagagcctgacccagagcctgaccagccccggccccgtgctgctgcaccccagccccagcaccacccaggccgccagcagatag

SEQ ID NO: 76276 - DNA, 345 bp, synthetic construct
  misc_feature 1..345: note = Description of Artificial Sequence: Synthetic coding sequence
  source 1..345: mol_type = other DNA
atggagaccagaagccccggcctgaacaacatgaagccccagagcctgcagctggtgctggaggagcaggtgctggccctgcagcagcagatggccgagaaccaggccgccagctggagaaagctgaagaacagccaggaggcccagcagagacaggccaccctggtgagaaagctgcaggccaaggtgctgcagtacagaagctggtgccaggagctggagaagagactggaggccaccggcggccccatcccccagagatgggagaacgtggaggagcccaacctggacgagctgctggtgagactggaggaggagcagcagagatgcgagagcctggcctag

SEQ ID NO: 76277 - DNA, 2055 bp, synthetic construct
  misc_feature 1..2055: note = Description of Artificial Sequence: Synthetic coding sequence
  source 1..2055: mol_type = other DNA
atggagaccagaagccccggcctgaacaacatgaagccccagagcctgcagctggtgctggaggagcaggtgctggccctgcagcagcagatggccgagaaccaggccgccagctggagaaagctgaagaacagccaggaggcccagcagagacaggccaccctggtgagaaagctgcaggccaaggtgctgcagtacagaagctggtgccaggagctggagaagagactggaggccaccggcggccccatcccccagagatgggagaacgtggaggagcccaacctggacgagctgctggtgagactggaggaggagcagcagagatgcgagagcctggccgaggtgaacacccagctgagactgcacatggagaaggccgacgtggtgaacaaggccctgagagaggacgtggagaagctgaccgtggactggagcagagccagagacgagctgatgagaaaggagagccagtggcagatggagcaggagttcttcaagggctacctgaagggcgagcacggcagactgctgagcctgtggagagaggtggtgaccttcagaagacacttcctggagatgaagagcgccaccgacagagacctgatggagctgaaggccgagcacgtgagactgagcggcagcctgctgacctgctgcctgagactgaccgtgggcgcccagagcagagagcccaacggcagcggcagaatggacggcagagagcccgcccagctgctgctgctgctggccaagacccaggagctggagaaggaggcccacgagagaagccaggagctgatccagctgaagagccagggcgacctggagaaggccgagctgcaggacagagtgaccgagctgagcgccctgctgacccagagccagaagcagaacgaggactacgagaagatgatcaaggccctgagagagaccgtggagatcctgaccaaccacaccgagctgatggagcacgaggccagcctgagcagaaacgcccaggaggagaagctgagcctgcagcaggtgatcaaggacatcacccaggtgatggtggaggagggcgacaacatcgcccagggcagcggccacgagaacagcctggagctggacagcagcatcttcagccagttcgactaccaggacgccgacaaggccctgaccctggtgagaagcgtgctgaccagaagaagacaggccgtgcaggacctgagacagcagctggccggctgccaggaggccgtgaacctgctgcagcagcagcacgaccagtgggaggaggagggcaaggccctgagacagagactgcagaagctgaccggcgagagagacaccctggccggccagaccgtggacctgcagggcgaggtggacagcctgagcaaggagagagagctgctgcagaaggccagagaggagctgagacagcagctggaggtgctggagcaggaggcctggagactgagaagagtgaacgtggagctgcagctgcagggcgacagcgcccagggccagaaggaggagcagcaggaggagctgcacctggccgtgagagagagagagagactgcaggagatgctgatgggcctggaggccaagcagagcgagagcctgagcgagctgatcaccctgagagaggccctggagagcagccacctggagggcgagctgctgagacaggagcagaccgaggtgaccgccgccctggccagagccgagcagagcatcgccgagctgagcagcagcgagaacaccctgaagaccgaggtggccgacctgagagccgccgccgtgaagctgagcgccctgaacgaggccctggccctggacaaggtgggcctgaaccagcagctgctgcagctggaggaggagaaccagagcgtgtgcagcagaatggaggccgccgagcaggccagaaacgccctgcaggtggacctggccgaggccgagaagagaagagaggccctgtgggagaagaacacccacctggaggcccagctgcagaaggccgaggaggccggcgccgagctgcaggccgacctgagagacatctag

SEQ ID NO: 76278 - DNA, 495 bp, synthetic construct
  misc_feature 1..495: note = Description of Artificial Sequence: Synthetic coding sequence
  source 1..495: mol_type = other DNA
atggagaccagaagccccggcctgaacaacatgaagccccagagcctgcagctggtgctggaggagcaggtgctggccctgcagcagcagatggccgagaaccaggccgccagctggagaaagctgaagaacagccaggaggcccagcagagacaggccaccctggtgagaaagctgcaggccaaggtgctgcagtacagaagctggtgccaggagctggagaagagactggaggccaccggcggccccatcccccagagatgggagaacgtggaggagcccaacctggacgagctgctggtgagactggaggaggagcagcagagatgcgagagcctggccgaggtgaacacccagctgagactgcacatggagaaggccgacgtggtgaacaaggccctgagagaggacgtggagaagctgaccgtggactggagcagagccagagacgagctgatgagaaaggagagccagtggcagatggagcaggagtag

SEQ ID NO: 76279 - DNA, 1617 bp, synthetic construct
  misc_feature 1..1617: note = Description of Artificial Sequence: Synthetic coding sequence
  source 1..1617: mol_type = other DNA
atggagaccagaagccccggcctgaacaacatgaagccccagagcctgcagctggtgctggaggagcaggtgctggccctgcagcagcagatggccgagaaccaggccgccagctggagaaagctgaagaacagccaggaggcccagcagagacaggccaccctggtgagaaagctgcaggccaaggtgctgcagtacagaagctggtgccaggagctggagaagagactggaggccaccggcggccccatcccccagagatgggagaacgtggaggagcccaacctggacgagctgctggtgagactggaggaggagcagcagagatgcgagagcctggccgaggtgaacacccagctgagactgcacatggagaaggccgacgtggtgaacaaggccctgagagaggacgtggagaagctgaccgtggactggagcagagccagagacgagctgatgagaaaggagagccagtggcagatggagcaggagttcttcaagggctacctgaagggcgagcacggcagactgctgagcctgtggagagaggtggtgaccttcagaagacacttcctggagatgaagagcgccaccgacagagacctgatggagctgaaggccgagcacgtgagactgagcggcagcctgctgacctgctgcctgagactgaccgtgggcgcccagagcagagagcccaacggcagcggcagaatggacggcagagagcccgcccagctgctgctgctgctggccaagacccaggagctggagaaggaggcccacgagagaagccaggagctgatccagctgaagagccagggcgacctggagaaggccgagctgcaggacagagtgaccgagctgagcgccctgctgacccagagccagaagcagaacgaggactacgagaagatgatcaaggccctgagagagaccgtggagatcctggagaccaaccacaccgagctgatggagcacgaggccagcctgagcagaaacgcccaggaggagaagctgagcctgcagcaggtgatcaaggacatcacccaggtgatggtggaggagggcgacaacatcgcccagggcagcggccacgagaacagcctggagctggacagcagcatcttcagccagttcgactaccaggacgccgacaaggccctgaccctggtgagaagcgtgctgaccagaagaagacaggccgtgcaggacctgagacagcagctggccggctgccaggaggccgtgaacctgctgcagcagcagcacgaccagtgggaggaggagggcaaggccctgagacagagactgcagaagctgaccggcgagagagacaccctggccggccagaccgtggacctgcagggcgaggtggacagcctgagcaaggagagagagctgctgcagaaggccagagaggagctgagacagcagctggaggtgctggagcaggaggcctggagactgagaagagtgaacgtggagctgcagctgcagggcgacagcgcccagggccagaaggaggagcagcaggaggagctgcacctggccgtgagagagagagagagactgcagagcagccagctgcagagctgcagagtgctgaagaccccctag

SEQ ID NO: 76280 - DNA, 7446 bp, synthetic construct
  misc_feature 1..7446: note = Description of Artificial Sequence: Synthetic coding sequence
  source 1..7446: mol_type = other DNA
atgccccccaacatcaactggaaggagatcatgaaggtggaccccgacgacctgcccagacaggaggagctggccgacaacctgctgatcagcctgagcaaggtggaggtgaacgagctgaagagcgagaagcaggagaacgtgatccacctgttcagaatcacccagagcctgatgaagatgaaggcccaggaggtggagctggccctggaggaggtggagaaggccggcgaggagcaggccaagttcgagaaccagctgaagaccaaggtgatgaagctggagaacgagctggagatggcccagcagagcgccggcggcagagacaccagattcctgagaaacgagatctgccagctggagaagcagctggagcagaaggacagagagctggaggacatggagaaggagctggagaaggagaagaaggtgaacgagcagctggccctgagaaacgaggaggccgagaacgagaacagcaagctgagaagagagaacaagagactgaagaagaagaacgagcagctgtgccaggacatcatcgactaccagaagcagatcgacagccagaaggagaccctgctgagcagaagaggcgaggacagcgactacagaagccagctgagcaagaagaactacgagctgatccagtacctggacgagatccagaccctgaccgaggccaacgagaagatcgaggtgcagaaccaggagatgagaaagaacctggaggagagcgtgcaggagatggagaagatgaccgacgagtacaacagaatgaaggccatcgtgcaccagaccgacaacgtgatcgaccagctgaagaaggagaacgaccactaccagctgcaggtgcaggagctgaccgacctgctgaagagcaagaacgaggaggacgaccccatcatggtggccgtgaacgccaaggtggaggagtggaagctgatcctgagcagcaaggacgacgagatcatcgagtaccagcagatgctgcacaacctgagagagaagctgaagaacgcccagctggacgccgacaagagcaacgtgatggccctgcagcagggcatccaggagagagacagccagatcaagatgctgaccgagcaggtggagcagtacaccaaggagatggagaagaacacctgcatcatcgaggacctgaagaacgagctgcagagaaacaagggcgccagcaccctgagccagcagacccacatgaagatccagagcaccctggacatcctgaaggagaagaccaaggaggccgagagaaccgccgagctggccgaggccgacgccagagagaaggacaaggagctggtggaggccctgaagagactgaaggactacgagagcggcgtgtacggcctggaggacgccgtggtggagatcaagaactgcaagaaccagatcaagatcagagacagagagatcgagatcctgaccaaggagatcaacaagctggagctgaagatcagcgacttcctggacgagaacgaggccctgagagagagagtgggcctggagcccaagaccatgatcgacctgaccgagttcagaaacagcaagcacctgaagcagcagcagtacagagccgagaaccagatcctgctgaaggaggccagcatcgagagcctggaggaggagagactggacctgaagaagaagatcagacagatggcccaggagagaggcaagagaagcgccaccagcggcctgaccaccgaggacctgaacctgaccgagaacatcagccagggcgacagaatcagcgagagaaagctggacctgctgagcctgaagaacatgagcgaggcccagagcaagaacgagttcctgagcagagagctgatcgagaaggagagagacctggagagaagcagaaccgtgatcgccaagttccagaacaagctgaaggagctggtggaggagaacaagcagctggaggagggcatgaaggagatcctgcaggccatcaaggagatgcagaaggaccccgacgtgaagggcggcgagaccagcctgatcatccccagcctggagagactggtgaacgccatcgagagcaagaacgccgagggcatcttcgacgccagcctgcacctgaaggcccaggtggaccagctgaccggcagaaacgaggagctgagacaggagctgagagagagcagaaaggaggccatcaactacagccagcagctggccaaggccaacctgaagatcgaccacctggagaaggagaccagcctgctgagacagagcgagggcagcaacgtggtgttcaagggcatcgacctgcccgacggcatcgcccccagcagcgccagcatcatcaacagccagaacgagtacctgatccacctgctgcaggagctggagaacaaggagaagaagctgaagaacctggaggacagcctggaggactacaacagaaagttcgccgtgatcagacaccagcagagcctgctgtacaaggagtacctgagcgagaaggagacctggaagaccgagagcaagaccatcaaggaggagaagagaaagctggaggaccaggtgcagcaggacgccatcaaggtgaaggagtacaacaacctgctgaacgccctgcagatggacagcgacgagatgaagaagatcctggccgagaacagcagaaagatcaccgtgctgcaggtgaacgagaagagcctgatcagacagtacaccaccctggtggagctggagagacagctgagaaaggagaacgagaagcagaagaacgagctgctgagcatggaggccgaggtgtgcgagaagatcggctgcctgcagagattcaaggagatggccatcttcaagatcgccgccctgcagaaggtggtggacaacagcgtgagcctgagcgagctggagctggccaacaagcagtacaacgagctgaccgccaagtacagagacatcctgcagaaggacaacatgctggtgcagagaaccagcaacctggagcacctggagtgcgagaacatcagcctgaaggagcaggtggagagcatcaacaaggagctggagatcaccaaggagaagctgcacaccatcgagcaggcctgggagcaggagaccaagctgggcaacgagagcagcatggacaaggccaagaagagcatcaccaacagcgacatcgtgagcatcagcaagaagatcaccatgctggagatgaaggagctgaacgagagacagagagccgagcactgccagaagatgtacgagcacctgagaaccagcctgaagcagatggaggagagaaacttcgagctggagaccaagttcgccgagctgaccaagatcaacctggacgcccagaaggtggagcagatgctgagagacgagctggccgacagcgtgagcaaggccgtgagcgacgccgacagacagagaatcctggagctggagaagaacgagatggagctgaaggtggaggtgagcaagctgagagagatcagcgacatcgccagaagacaggtggagatcctgaacgcccagcagcagagcagagacaaggaggtggagagcctgagaatgcagctgctggactaccaggcccagagcgacgagaagagcctgatcgccaagctgcaccagcacaacgtgagcctgcagctgagcgaggccaccgccctgggcaagctggagagcatcaccagcaagctgcagaagatggaggcctacaacctgagactggagcagaagctggacgagaaggagcaggccctgtactacgccagactggagggcagaaacagagccaagcacctgagacagaccatccagagcctgagaagacagttcagcggcgccctgcccctggcccagcaggagaagttcagcaagaccatgatccagctgcagaacgacaagctgaagatcatgcaggagatgaagaacagccagcaggagcacagaaacatggagaacaagaccctggagatggagctgaagctgaagggcctggaggagctgatcagcaccctgaaggacaccaagggcgcccagaaggtgatcaactggcacatgaagatcgaggagctgagactgcaggagctgaagctgaacagagagctggtgaaggacaaggaggagatcaagtacctgaacaacatcatcagcgagtacgagagaaccatcagcagcctggaggaggagatcgtgcagcagaacaagttccacgaggagagacagatggcctgggaccagagagaggtggacctggagagacagctggacatcttcgacagacagcagaacgagatcctgaacgccgcccagaagttcgaggaggccaccggcagcatccccgaccccagcctgcccctgcccaaccagctggagatcgccctgagaaagatcaaggagaacatcagaatcatcctggagaccagagccacctgcaagagcctggaggagaagctgaaggagaaggagagcgccctgagactggccgagcagaacatcctgagcagagacaaggtgatcaacgagctgagactgagactgcccgccaccgccgagagagagaagctgatcgccgagctgggcagaaaggagatggagcccaagagccaccacaccctgaagatcgcccaccagaccatcgccaacatgcaggccagactgaaccagaaggaggaggtgctgaagaagtaccagagactgctggagaaggccagagaggagcagagagagatcgtgaagaagcacgaggaggacctgcacatcctgcaccacagactggagctgcaggccgacagcagcctgaacaagttcaagcagaccgcctgggacctgatgaagcagagccccacccccgtgcccaccaacaagcacttcatcagactggccgagatggagcagaccgtggccgagcaggacgacagcctgagcagcctgctggtgaagctgaagaaggtgagccaggacctggagagacagagagagatcaccgagctgaaggtgaaggagttcgagaacatcaagctgcagctgcaggagaaccacgaggacgaggtgaagaaggtgaaggccgaggtggaggacctgaagtacctgctggaccagagccagaaggagagccagtgcctgaagagcgagctgcaggcccagaaggaggccaacagcagagcccccaccaccaccatgagaaacctggtggagagactgaagagccagctggccctgaaggagaagcagcagaaggccctgagcagagccctgctggagctgagagccgagatgaccgccgccgccgaggagagaatcatcagcgccaccagccagaaggaggcccacctgaacgtgcagcagatcgtggacagacacaccagagagctgaagacccaggtggaggacctgaacgagaacctgctgaagctgaaggaggccctgaagaccagcaagaacagagagaacagcctgaccgacaacctgaacgacctgaacaacgagctgcagaagaagcagaaggcctacaacaagatcctgagagagaaggaggagatcgaccaggagaacgacgagctgaagagacagatcaagagactgaccagcggcctgcagggcaagcccctgaccgacaacaagcagagcctgatcgaggagctgcagagaaaggtgaagaagctggagaaccagctggagggcaaggtggaggaggtggacctgaagcccatgaaggagaagaacgccaaggaggagctgatcagatgggaggagggcaagaagtggcaggccaagatcgagggcatcagaaacaagctgaaggagaaggagggcgaggtgttcaccctgaccaagcagctgaacaccctgaaggacctgttcgccaaggccgacaaggagaagctgaccctgcagagaaagctgaagaccaccggcatgaccgtggaccaggtgctgggcatcagagccctggagagcgagaaggagctggaggagctgaagaagagaaacctggacctggagaacgacatcctgtacatgagagcccaccaggccctgcccagagacagcgtggtggaggacctgcacctgcagaacagatacctgcaggagaagctgcacgccctggagaagcagttcagcaaggacacctacagcaagcccagcatcagcggcatcgagagcgacgaccactgccagagagagcaggagctgcagaaggagaacctgaagctgagcagcgagaacatcgagctgaagttccagctggagcaggccaacaaggacctgcccagactgaagaaccaggtgagagacctgaaggagatgtgcgagttcctgaagaaggagaaggccgaggtgcagagaaagctgggccacgtgagaggcagcggcagaagcggcaagaccatccccgagctggagaagaccatcggcctgatgaagaaggtggtggagaaggtgcagagagagaacgagcagctgaagaaggccagcggcatcctgaccagcgagaagatggccaacatcgagcaggagaacgagaagctgaaggccgagctggagaagctgaaggcccacctgggccaccagctgagcatgcactacgagagcaagaccaagggcaccgagaagatcatcgccgagaacgagagactgagaaaggagctgaagaaggagaccgacgccgccgagaagctgagaatcgccaagaacaacctggagatcctgaacgagaagatgaccgtgcagctggaggagaccggcaagagactgcagttcgccgagagcagaggcccccagctggagggcgccgacagcaagagctggaagagcatcgtggtgaccagaatgtacgagaccaagctgaaggagctggagaccgacatcgccaagaagaaccagagcatcaccgacctgaagcagctggtgaaggaggccaccgagagagagcagaaggtgaacaagtacaacgaggacctggagcagcagatcaagatcctgaagcacgtgcccgagggcgccgagaccgagcagggcctgaagagagagctgcaggtgctgagactggccaaccaccagctggacaaggagaaggccgagctgatccaccagatcgaggccaacaaggaccagagcggcgccgagagcaccatccccgacgccgaccagctgaaggagaagatcaaggacctggagacccagctgaagatgagcgacctggagaagcagcacctgaaggaggagatcaagaagctgaagaaggagctggagaacttcgaccccagcttcttcgaggagatcgaggacctgaagtacaactacaaggaggaggtgaagaagaacatcctgctggaggagaaggtgaagaagctgagcgagcagctgggcgtggagctgaccagccccgtggccgccagcgaggagttcgaggacgaggaggagagccccgtgaacttccccatctactag

SEQ ID NO: 76281 - DNA, 4620 bp, synthetic construct
  misc_feature 1..4620: note = Description of Artificial Sequence: Synthetic coding sequence
  source 1..4620: mol_type = other DNA
atggccatcttcaagatcgccgccctgcagaaggtggtggacaacagcgtgagcctgagcgagctggagctggccaacaagcagtacaacgagctgaccgccaagtacagagacatcctgcagaaggacaacatgctggtgcagagaaccagcaacctggagcacctggagtgcgagaacatcagcctgaaggagcaggtggagagcatcaacaaggagctggagatcaccaaggagaagctgcacaccatcgagcaggcctgggagcaggagaccaagctgggcaacgagagcagcatggacaaggccaagaagagcatcaccaacagcgacatcgtgagcatcagcaagaagatcaccatgctggagatgaaggagctgaacgagagacagagagccgagcactgccagaagatgtacgagcacctgagaaccagcctgaagcagatggaggagagaaacttcgagctggagaccaagttcgccgagctgaccaagatcaacctggacgcccagaaggtggagcagatgctgagagacgagctggccgacagcgtgagcaaggccgtgagcgacgccgacagacagagaatcctggagctggagaagaacgagatggagctgaaggtggaggtgagcaagctgagagagatcagcgacatcgccagaagacaggtggagatcctgaacgcccagcagcagagcagagacaaggaggtggagagcctgagaatgcagctgctggactaccaggcccagagcgacgagaagagcctgatcgccaagctgcaccagcacaacgtgagcctgcagctgagcgaggccaccgccctgggcaagctggagagcatcaccagcaagctgcagaagatggaggcctacaacctgagactggagcagaagctggacgagaaggagcaggccctgtactacgccagactggagggcagaaacagagccaagcacctgagacagaccatccagagcctgagaagacagttcagcggcgccctgcccctggcccagcaggagaagttcagcaagaccatgatccagctgcagaacgacaagctgaagatcatgcaggagatgaagaacagccagcaggagcacagaaacatggagaacaagaccctggagatggagctgaagctgaagggcctggaggagctgatcagcaccctgaaggacaccaagggcgcccagaaggtgatcaactggcacatgaagatcgaggagctgagactgcaggagctgaagctgaacagagagctggtgaaggacaaggaggagatcaagtacctgaacaacatcatcagcgagtacgagagaaccatcagcagcctggaggaggagatcgtgcagcagaacaagttccacgaggagagacagatggcctgggaccagagagaggtggacctggagagacagctggacatcttcgacagacagcagaacgagatcctgaacgccgcccagaagttcgaggaggccaccggcagcatccccgaccccagcctgcccctgcccaaccagctggagatcgccctgagaaagatcaaggagaacatcagaatcatcctggagaccagagccacctgcaagagcctggaggagaagctgaaggagaaggagagcgccctgagactggccgagcagaacatcctgagcagagacaaggtgatcaacgagctgagactgagactgcccgccaccgccgagagagagaagctgatcgccgagctgggcagaaaggagatggagcccaagagccaccacaccctgaagatcgcccaccagaccatcgccaacatgcaggccagactgaaccagaaggaggaggtgctgaagaagtaccagagactgctggagaaggccagagaggagcagagagagatcgtgaagaagcacgaggaggacctgcacatcctgcaccacagactggagctgcaggccgacagcagcctgaacaagttcaagcagaccgcctgggacctgatgaagcagagccccacccccgtgcccaccaacaagcacttcatcagactggccgagatggagcagaccgtggccgagcaggacgacagcctgagcagcctgctggtgaagctgaagaaggtgagccaggacctggagagacagagagagatcaccgagctgaaggtgaaggagttcgagaacatcaagctgcagctgcaggagaaccacgaggacgaggtgaagaaggtgaaggccgaggtggaggacctgaagtacctgctggaccagagccagaaggagagccagtgcctgaagagcgagctgcaggcccagaaggaggccaacagcagagcccccaccaccaccatgagaaacctggtggagagactgaagagccagctggccctgaaggagaagcagcagaaggccctgagcagagccctgctggagctgagagccgagatgaccgccgccgccgaggagagaatcatcagcgccaccagccagaaggaggcccacctgaacgtgcagcagatcgtggacagacacaccagagagctgaagacccaggtggaggacctgaacgagaacctgctgaagctgaaggaggccctgaagaccagcaagaacagagagaacagcctgaccgacaacctgaacgacctgaacaacgagctgcagaagaagcagaaggcctacaacaagatcctgagagagaaggaggagatcgaccaggagaacgacgagctgaagagacagatcaagagactgaccagcggcctgcagggcaagcccctgaccgacaacaagcagagcctgatcgaggagctgcagagaaaggtgaagaagctggagaaccagctggagggcaaggtggaggaggtggacctgaagcccatgaaggagaagaacgccaaggaggagctgatcagatgggaggagggcaagaagtggcaggccaagatcgagggcatcagaaacaagctgaaggagaaggagggcgaggtgttcaccctgaccaagcagctgaacaccctgaaggacctgttcgccaaggccgacaaggagaagctgaccctgcagagaaagctgaagaccaccggcatgaccgtggaccaggtgctgggcatcagagccctggagagcgagaaggagctggaggagctgaagaagagaaacctggacctggagaacgacatcctgtacatgagagcccaccaggccctgcccagagacagcgtggtggaggacctgcacctgcagaacagatacctgcaggagaagctgcacgccctggagaagcagttcagcaaggacacctacagcaagcccagcatcagcggcatcgagagcgacgaccactgccagagagagcaggagctgcagaaggagaacctgaagctgagcagcgagaacatcgagctgaagttccagctggagcaggccaacaaggacctgcccagactgaagaaccaggtgagagacctgaaggagatgtgcgagttcctgaagaaggagaaggccgaggtgcagagaaagctgggccacgtgagaggcagcggcagaagcggcaagaccatccccgagctggagaagaccatcggcctgatgaagaaggtggtggagaaggtgcagagagagaacgagcagctgaagaaggccagcggcatcctgaccagcgagaagatggccaacatcgagcaggagaacgagaagctgaaggccgagctggagaagctgaaggcccacctgggccaccagctgagcatgcactacgagagcaagaccaagggcaccgagaagatcatcgccgagaacgagagactgagaaaggagctgaagaaggagaccgacgccgccgagaagctgagaatcgccaagaacaacctggagatcctgaacgagaagatgaccgtgcagctggaggagaccggcaagagactgcagttcgccgagagcagaggcccccagctggagggcgccgacagcaagagctggaagagcatcgtggtgaccagaatgtacgagaccaagctgaaggagctggagaccgacatcgccaagaagaaccagagcatcaccgacctgaagcagctggtgaaggaggccaccgagagagagcagaaggtgaacaagtacaacgaggacctggagcagcagatcaagatcctgaagcacgtgcccgagggcgccgagaccgagcagggcctgaagagagagctgcaggtgctgagactggccaaccaccagctggacaaggagaaggccgagctgatccaccagatcgaggccaacaaggaccagagcggcgccgagagcaccatccccgacgccgaccagctgaaggagaagatcaaggacctggagacccagctgaagatgagcgacctggagaagcagcacctgaaggaggagatcaagaagctgaagaaggagctggagaacttcgaccccagcttcttcgaggagatcgaggacctgaagtacaactacaaggaggaggtgaagaagaacatcctgctggaggagaaggtgaagaagctgagcgagcagctgggcgtggagctgaccagccccgtggccgccagcgaggagttcgaggacgaggaggagagccccgtgaacttccccatctactag

SEQ ID NO: 76282 - DNA, 2415 bp, synthetic construct
  misc_feature 1..2415: note = Description of Artificial Sequence: Synthetic coding sequence
  source 1..2415: mol_type = other DNA
atgccccccaacatcaactggaaggagatcatgaaggtggaccccgacgacctgcccagacaggaggagctggccgacaacctgctgatcagcctgagcaaggtggaggtgaacgagctgaagagcgagaagcaggagaacgtgatccacctgttcagaatcacccagagcctgatgaagatgaaggcccaggaggtggagctggccctggaggaggtggagaaggccggcgaggagcaggccaagttcgagaaccagctgaagaccaaggtgatgaagctggagaacgagctggagatggcccagcagagcgccggcggcagagacaccagattcctgagaaacgagatctgccagctggagaagcagctggagcagaaggacagagagctggaggacatggagaaggagctggagaaggagaagaaggtgaacgagcagctggccctgagaaacgaggaggccgagaacgagaacagcaagctgagaagagagaacaagagactgaagaagaagaacgagcagctgtgccaggacatcatcgactaccagaagcagatcgacagccagaaggagaccctgctgagcagaagaggcgaggacagcgactacagaagccagctgagcaagaagaactacgagctgatccagtacctggacgagatccagaccctgaccgaggccaacgagaagatcgaggtgcagaaccaggagatgagaaagaacctggaggagagcgtgcaggagatggagaagatgaccgacgagtacaacagaatgaaggccatcgtgcaccagaccgacaacgtgatcgaccagctgaagaaggagaacgaccactaccagctgcaggtgcaggagctgaccgacctgctgaagagcaagaacgaggaggacgaccccatcatggtggccgtgaacgccaaggtggaggagtggaagctgatcctgagcagcaaggacgacgagatcatcgagtaccagcagatgctgcacaacctgagagagaagctgaagaacgcccagctggacgccgacaagagcaacgtgatggccctgcagcagggcatccaggagagagacagccagatcaagatgctgaccgagcaggtggagcagtacaccaaggagatggagaagaacacctgcatcatcgaggacctgaagaacgagctgcagagaaacaagggcgccagcaccctgagccagcagacccacatgaagatccagagcaccctggacatcctgaaggagaagaccaaggaggccgagagaaccgccgagctggccgaggccgacgccagagagaaggacaaggagctggtggaggccctgaagagactgaaggactacgagagcggcgtgtacggcctggaggacgccgtggtggagatcaagaactgcaagaaccagatcaagatcagagacagagagatcgagatcctgaccaaggagatcaacaagctggagctgaagatcagcgacttcctggacgagaacgaggccctgagagagagagtgggcctggagcccaagaccatgatcgacctgaccgagttcagaaacagcaagcacctgaagcagcagcagtacagagccgagaaccagatcctgctgaaggagatcgagagcctggaggaggagagactggacctgaagaagaagatcagacagatggcccaggagagaggcaagagaagcgccaccagcggcctgaccaccgaggacctgaacctgaccgagaacatcagccagggcgacagaatcagcgagagaaagctggacctgctgagcctgaagaacatgagcgaggcccagagcaagaacgagttcctgagcagagagctgatcgagaaggagagagacctggagagaagcagaaccgtgatcgccaagttccagaacaagctgaaggagctggtggaggagaacaagcagctggaggagggcatgaaggagatcctgcaggccatcaaggagatgcagaaggaccccgacgtgaagggcggcgagaccagcctgatcatccccagcctggagagactggtgaacgccatcgagagcaagaacgccgagggcatcttcgacgccagcctgcacctgaaggcccaggtggaccagctgaccggcagaaacgaggagctgagacaggagctgagagagagcagaaaggaggccatcaactacagccagcagctggccaaggccaacctgaagatcgaccacctggagaaggagaccagcctgctgagacagagcgagggcagcaacgtggtgttcaagggcatcgacctgcccgacggcatcgcccccagcagcgccagcatcatcaacagccagaacgagtacctgatccacctgctgcaggagctggagaacaaggagaaggtgaaggagttcagaagattcagctag

SEQ ID NO: 76283 - DNA, 1650 bp, synthetic construct
  misc_feature 1..1650: note = Description of Artificial Sequence: Synthetic coding sequence
  source 1..1650: mol_type = other DNA
aagatggcccagcagagcgccggcggcagagacaccagattcctgagaaacgagatctgccagctggagaagcagctggagcagaaggacagagagctggaggacatggagaaggagctggagaaggagaagaaggtgaacgagcagctggccctgagaaacgaggaggccgagaacgagaacagcaagctgagaagagagaacaagagactgaagaagaagaacgagcagctgtgccaggacatcatcgactaccagaagcagatcgacagccagaaggagaccctgctgagcagaagaggcgaggacagcgactacagaagccagctgagcaagaagaactacgagctgatccagtacctggacgagatccagaccctgaccgaggccaacgagaagatcgaggtgcagaaccaggagatgagaaagaacctggaggagagcgtgcaggagatggagaagatgaccgacgagtacaacagaatgaaggccatcgtgcaccagaccgacaacgtgatcgaccagctgaagaaggagaacgaccactaccagctgcaggtgcaggagctgaccgacctgctgaagagcaagaacgaggaggacgaccccatcatggtggccgtgaacgccaaggtggaggagtggaagctgatcctgagcagcaaggacgacgagatcatcgagtaccagcagatgctgcacaacctgagagagaagctgaagaacgcccagctggacgccgacaagagcaacgtgatggccctgcagcagggcatccaggagagagacagccagatcaagatgctgaccgagcaggtggagcagtacaccaaggagatggagaagaacacctgcatcatcgaggacctgaagaacgagctgcagagaaacaagggcgccagcaccctgagccagcagacccacatgaagatccagagcaccctggacatcctgaaggagaagaccaaggaggccgagagaaccgccgagctggccgaggccgacgccagagagaaggacaaggagctggtggaggccctgaagagactgaaggactacgagagcggcgtgtacggcctggaggacgccgtggtggagatcaagaactgcaagaaccagatcaagatcagagacagagagatcgagatcctgaccaaggagatcaacaagctggagctgaagatcagcgacttcctggacgagaacgaggccctgagagagagagtgggcctggagcccaagaccatgatcgacctgaccgagttcagaaacagcaagcacctgaagcagcagcagtacagagccgagaaccagatcctgctgaaggagatcgagagcctggaggaggagagactggacctgaagaagaagatcagacagatggcccaggagagaggcaagagaagcgccaccagcggcctgaccaccgaggacctgaacctgaccgagaacatcagccagggcgacagaatcagcgagagaaagctggacctgctgagcctgaagaacatgagcgaggcccagagcaagaacgagttcctgagcagagagctgatcgagaaggagagagacctggagagaagcagaaccgtgatcgccaagttccagaacaagtgctacagaatcaaggagtgcagaagaaacctgtag

SEQ ID NO: 76284 - DNA, 4620 bp, synthetic construct; identical to SEQ ID NO: 76281
  misc_feature 1..4620: note = Description of Artificial Sequence: Synthetic coding sequence
  source 1..4620: mol_type = other DNA

SEQ ID NO: 76285 - DNA, 7440 bp, synthetic construct
  misc_feature 1..7440: note = Description of Artificial Sequence: Synthetic coding sequence
  source 1..7440: mol_type = other DNA
atgccccccaacatcaactggaaggagatcatgaaggtggaccccgacgacctgcccagacaggaggagctggccgacaacctgctgatcagcctgagcaaggtggaggtgaacgagctgaagagcgagaagcaggagaacgtgatccacctgttcagaatcacccagagcctgatgaagatgaaggcccaggaggtggagctggccctggaggaggtggagaaggccggcgaggagcaggccaagttcgagaaccagctgaagaccaaggtgatgaagctggagaacgagctggagatggcccagcagagcgccggcggcagagacaccagattcctgagaaacgagatctgccagctggagaagcagctggagcagaaggacagagagctggaggacatggagaaggagctggagaaggagaagaaggtgaacgagcagctggccctgagaaacgaggaggccgagaacgagaacagcaagctgagaagagagaacaagagactgaagaagaagaacgagcagctgtgccaggacatcatcgactaccagaagcagatcgacagccagaaggagaccctgctgagcagaagaggcgaggacagcgactacagaagccagctgagcaagaagaactacgagctgatccagtacctggacgagatccagaccctgaccgaggccaacgagaagatcgaggtgcagaaccaggagatgagaaagaacctggaggagagcgtgcaggagatggagaagatgaccgacgagtacaacagaatgaaggccatcgtgcaccagaccgacaacgtgatcgaccagctgaagaaggagaacgaccactaccagctgcaggtgcaggagctgaccgacctgctgaagagcaagaacgaggaggacgaccccatcatggtggccgtgaacgccaaggtggaggagtggaagctgatcctgagcagcaaggacgacgagatcatcgagtaccagcagatgctgcacaacctgagagagaagctgaagaacgcccagctggacgccgacaagagcaacgtgatggccctgcagcagggcatccaggagagagacagccagatcaagatgctgaccgagcaggtggagcagtacaccaaggagatggagaagaacacctgcatcatcgaggacctgaagaacgagctgcagagaaacaagggcgccagcaccctgagccagcagacccacatgaagatccagagcaccctggacatcctgaaggagaagaccaaggaggccgagagaaccgccgagctggccgaggccgacgccagagagaaggacaaggagctggtggaggccctgaagagactgaaggactacgagagcggcgtgtacggcctggaggacgccgtggtggagatcaagaactgcaagaaccagatcaagatcagagacagagagatcgagatcctgaccaaggagatcaacaagctggagctgaagatcagcgacttcctggacgagaacgaggccctgagagagagagtgggcctggagcccaagaccatgatcgacctgaccgagttcagaaacagcaagcacctgaagcagcagcagtacagagccgagaaccagatcctgctgaaggagatcgagagcctggaggaggagagactggacctgaagaagaagatcagacagatggcccaggagagaggcaagagaagcgccaccagcggcctgaccaccgaggacctgaacctgaccgagaacatcagccagggcgacagaatcagcgagagaaagctggacctgctgagcctgaagaacatgagcgaggcccagagcaagaacgagttcctgagcagagagctgatcgagaaggagagagacctggagagaagcagaaccgtgatcgccaagttccagaacaagctgaaggagctggtggaggagaacaagcagctggaggagggcatgaaggagatcctgcaggccatcaaggagatgcagaaggaccccgacgtgaagggcggcgagaccagcctgatcatccccagcctggagagactggtgaacgccatcgagagcaagaacgccgagggcatcttcgacgccagcctgcacctgaaggcccaggtggaccagctgaccggcagaaacgaggagctgagacaggagctgagagagagcagaaaggaggccatcaactacagccagcagctggccaaggccaacctgaagatcgaccacctggagaaggagaccagcctgctgagacagagcgagggcagcaacgtggtgttcaagggcatcgacctgcccgacggcatcgcccccagcagcgccagcatcatcaacagccagaacgagtacctgatccacctgctgcaggagctggagaacaaggagaagaagctgaagaacctggaggacagcctggaggactacaacagaaagttcgccgtgatcagacaccagcagagcctgctgtacaaggagtacctgagcgagaaggagacctggaagaccgagagcaagaccatcaaggaggagaagagaaagctggaggaccaggtgcagcaggacgccatcaaggtgaaggagtacaacaacctgctgaacgccctgcagatggacagcgacgagatgaagaagatcctggccgagaacagcagaaagatcaccgtgctgcaggtgaacgagaagagcctgatcagacagtacaccaccctggtggagctggagagacagctgagaaaggagaacgagaagcagaagaacgagctgctgagcatggaggccgaggtgtgcgagaagatcggctgcctgcagagattcaaggagatggccatcttcaagatcgccgccctgcagaaggtggtggacaacagcgtgagcctgagcgagctggagctggccaacaagcagtacaacgagctgaccgccaagtacagagacatcctgcagaaggacaacatgctggtgcagagaaccagcaacctggagcacctggagtgcgagaacatcagcctgaaggagcaggtggagagcatcaacaaggagctggagatcaccaaggagaagctgcacaccatcgagcaggcctgggagcaggagaccaagctgggcaacgagagcagcatggacaaggccaagaagagcatcaccaacagcgacatcgtgagcatcagcaagaagatcaccatgctggagatgaaggagctgaacgagagacagagagccgagcactgccagaagatgtacgagcacctgagaaccagcctgaagcagatggaggagagaaacttcgagctggagaccaagttcgccgagctgaccaagatcaacctggacgcccagaaggtggagcagatgctgagagacgagctggccgacagcgtgagcaaggccgtgagcgacgccgacagacagagaatcctggagctggagaagaacgagatggagctgaaggtggaggtgagcaagctgagagagatcagcgacatcgccagaagacaggtggagatcctgaacgcccagcagcagagcagagacaaggaggtggagagcctgagaatgcagctgctggactaccaggcccagagcgacgagaagagcctgatcgccaagctgcaccagcacaacgtgagcctgcagctgagcgaggccaccgccctgggcaagctggagagcatcaccagcaagctgcagaagatggaggcctacaacctgagactggagcagaagctggacgagaaggagcaggccctgtactacgccagactggagggcagaaacagagccaagcacctgagacagaccatccagagcctgagaagacagttcagcggcgccctgcccctggcccagcaggagaagttcagcaagaccatgatccagctgcagaacgacaagctgaagatcatgcaggagatgaagaacagccagcaggagcacagaaacatggagaacaagaccctggagatggagctgaagctgaagggcctggaggagctgatcagcaccctgaaggacaccaagggcgcccagaaggtgatcaactggcacatgaagatcgaggagctgagactgcaggagctgaagctgaacagagagctggtgaaggacaaggaggagatcaagtacctgaacaacatcatcagcgagtacgagagaaccatcagcagcctggaggaggagatcgtgcagcagaacaagttccacgaggagagacagatggcctgggaccagagagaggtggacctggagagacagctggacatcttcgacagacagcagaacgagatcctgaacgccgcccagaagttcgaggaggccaccggcagcatccccgaccccagcctgcccctgcccaaccagctggagatcgccctgagaaagatcaaggagaacatcagaatcatcctggagaccagagccacctgcaagagcctggaggagaagctgaaggagaaggagagcgccctgagactggccgagcagaacatcctgagcagagacaaggtgatcaacgagctgagactgagactgcccgccaccgccgagagagagaagctgatcgccgagctgggcagaaaggagatggagcccaagagccaccacaccctgaagatcgcccaccagaccatcgccaacatgcaggccagactgaaccagaaggaggaggtgctgaagaagtaccagagactgctggagaaggccagagaggagcagagagagatcgtgaagaagcacgaggaggacctgcacatcctgcaccacagactggagctgcaggccgacagcagcctgaacaagttcaagcagaccgcctgggacctgatgaagcagagccccacccccgtgcccaccaacaagcacttcatcagactggccgagatggagcagaccgtggccgagcaggacgacagcctgagcagcctgctggtgaagctgaagaaggtgagccaggacctggagagacagagagagatcaccgagctgaaggtgaaggagttcgagaacatcaagctgcagctgcaggagaaccacgaggacgaggtgaagaaggtgaaggccgaggtggaggacctgaagtacctgctggaccagagccagaaggagagccagtgcctgaagagcgagctgcaggcccagaaggaggccaacagcagagcccccaccaccaccatgagaaacctggtggagagactgaagagccagctggccctgaaggagaagcagcagaaggccctgagcagagccctgctggagctgagagccgagatgaccgccgccgccgaggagagaatcatcagcgccaccagccagaaggaggcccacctgaacgtgcagcagatcgtggacagacacaccagagagctgaagacccaggtggaggacctgaacgagaacctgctgaagctgaaggaggccctgaagaccagcaagaacagagagaacagcctgaccgacaacctgaacgacctgaacaacgagctgcagaagaagcagaaggcctacaacaagatcctgagagagaaggaggagatcgaccaggagaacgacgagctgaagagacagatcaagagactgaccagcggcctgcagggcaagcccctgaccgacaacaagcagagcctgatcgaggagctgcagagaaaggtgaagaagctggagaaccagctggagggcaaggtggaggaggtggacctgaagcccatgaaggagaagaacgccaaggaggagctgatcagatgggaggagggcaagaagtggcaggccaagatcgagggcatcagaaacaagctgaaggagaaggagggcgaggtgttcaccctgaccaagcagctgaacaccctgaaggacctgttcgccaaggccgacaaggagaagctgaccctgcagagaaagctgaagaccaccggcatgaccgtggaccaggtgctgggcatcagagccctggagagcgagaaggagctggaggagctgaagaagagaaacctggacctggagaacgacatcctgtacatgagagcccaccaggccctgcccagagacagcgtggtggaggacctgcacctgcagaacagatacctgcaggagaagctgcacgccctggagaagcagttcagcaaggacacctacagcaagcccagcatcagcggcatcgagagcgacgaccactgccagagagagcaggagctgcagaaggagaacctgaagctgagcagcgagaacatcgagctgaagttccagctggagcaggccaacaaggacctgcccagactgaagaaccaggtgagagacctgaaggagatgtgcgagttcctgaagaaggagaaggccgaggtgcagagaaagctgggccacgtgagaggcagcggcagaagcggcaagaccatccccgagctggagaagaccatcggcctgatgaagaaggtggtggagaaggtgcagagagagaacgagcagctgaagaaggccagcggcatcctgaccagcgagaagatggccaacatcgagcaggagaacgagaagctgaaggccgagctggagaagctgaaggcccacctgggccaccagctgagcatgcactacgagagcaagaccaagggcaccgagaagatcatcgccgagaacgagagactgagaaaggagctgaagaaggagaccgacgccgccgagaagctgagaatcgccaagaacaacctggagatcctgaacgagaagatgaccgtgcagctggaggagaccggcaagagactgcagttcgccgagagcagaggcccccagctggagggcgccgacagcaagagctggaagagcatcgtggtgaccagaatgtacgagaccaagctgaaggagctggagaccgacatcgccaagaagaaccagagcatcaccgacctgaagcagctggtgaaggaggccaccgagagagagcagaaggtgaacaagtacaacgaggacctggagcagcagatcaagatcctgaagcacgtgcccgagggcgccgagaccgagcagggcctgaagagagagctgcaggtgctgagactggccaaccaccagctggacaaggagaaggccgagctgatccaccagatcgaggccaacaaggaccagagcggcgccgagagcaccatccccgacgccgaccagctgaaggagaagatcaaggacctggagacccagctgaagatgagcgacctggagaagcagcacctgaaggaggagatcaagaagctgaagaaggagctggagaacttcgaccccagcttcttcgaggagatcgaggacctgaagtacaactacaaggaggaggtgaagaagaacatcctgctggaggagaaggtgaagaagctgagcgagcagctgggcgtggagctgaccagccccgtggccgccagcgaggagttcgaggacgaggaggagagccccgtgaacttccccatctactag

SEQ ID NO: 76286 - DNA, 1512 bp, synthetic construct
  misc_feature 1..1512: note = Description of Artificial Sequence: Synthetic coding sequence
  source 1..1512: mol_type = other DNA
atggaggagcacggcgtgacccagaccgagcacatggccaccatcgaggcccacgccgtggcccagcaggtgcagcaggtgcacgtggccacctacaccgagcacagcatgctgagcgccgacgaggacagccccagcagccccgaggacaccagctacgacgacagcgacatcctgaacagcaccgccgccgacgaggtgaccgcccacctggccgccgccggccccgtgggcatggccgccgccgccgccgtggccaccggcaagaagagaaagagaccccacgtgttcgagagcaaccccagcatcagaaagagacagcagaccagactgctgagaaagctgagagccaccctggacgagtacaccaccagagtgggccagcaggccatcgtgctgtgcatcagccccagcaagcccaaccccgtgttcaaggtgttcggcgccgcccccctggagaacgtggtgagaaagtacaagagcatgatcctggaggacctggagagcgccctggccgagcacgcccccgccccccaggaggtgaacagcgagctgccccccctgaccatcgacggcatccccgtgagcgtggacaagatgacccaggcccagctgagagccttcatccccgagatgctgaagtacagcaccggcagaggcaagcccggctggggcaaggagagctgcaagcccatctggtggcccgaggacatcccctgggccaacgtgagaagcgacgtgagaaccgaggagcagaagcagagagtgagctggacccaggccctgagaaccatcgtgaagaactgctacaagcagcacggcagagaggacctgctgtacgccttcgaggaccagcagacccagacccaggccaccgccacccacagcatcgcccacctggtgcccagccagaccgtggtgcagaccttcagcaaccccgacggcaccgtgagcctgatccaggtgggcaccggcgccaccgtggccaccctggccgacgccagcgagctgcccaccaccgtgaccgtggcccaggtgaactacagcgccgtggccgacggcgaggtggagcagaactgggccaccctgcagggcggcgagatgaccatccagaccacccaggccagcgaggccacccaggccgtggccagcctggccgaggccgccgtggccgccagccaggagatgcagcagggcgccaccgtgaccatggccctgaacagcgaggccgccgcccacgccgtggccaccctggccgaggccaccctgcagggcggcggccagatcgtgctgagcggcgagaccgccgccgccgtgggcgccctgaccggcgtgcaggacgccaacggcctggtgcagatccccgtgagcatgtaccagaccgtggtgaccagcctggcccagggcaacggccccgtgcaggtggccatggcccccgtgaccaccagaatcagcgacagcgccgtgaccatggacggccaggccgtggaggtggtgaccctggagcagtag

SEQ ID NO: 76287 - DNA, 906 bp, synthetic construct
  misc_feature 1..906: note = Description of Artificial Sequence: Synthetic coding sequence
  source 1..906: mol_type = other DNA
atgagcctgagaagacacatcggcaaccccgagtacctgatgaagagaatcccccagaaccccagataccagcacatcaagagcagactggacaccggcaacagcatgaccaagtacaccgagaagctggaggagatcaagaagaactacagatacaagaaggacgagctgttcaagagactgaaggtgaccaccttcgcccagctgatcatccaggtggccagcctgagcgaccagaccctggaggtgaccgccgaggagatccagagactggaggacaacgacagcgccgccagcgaccccgacgccgagaccaccgccagaaccaacggcaagggcaaccccggcgagcagagccccagccccgagcagttcatcaacaacgccggcgccggcgacagcagcagaagcaccctgcagagcgtgatcagcggcgtgggcgagctggacctggacaagggccccgtgaagaaggccgagccccacaccaaggacaagccctaccccgactgccccttcctgctgctggacgtgagagacagagacagctaccagcagtgccacatcgtgggcgcctacagctaccccatcgccaccctgagcagaaccatgaacccctacagcaacgacatcctggagtacaagaacgcccacggcaagatcatcatcctgtacgacgacgacgagagactggccagccaggccgccaccaccatgtgcgagagaggcttcgagaacctgttcatgctgagcggcggcagactgaaccaggccaacagcagcggcagagagagcaaggtgcccggcgccagaagcgcccagaacctgcccggcggcggccccgccagccacagcaaccccagaagcctgagcagcggccacctgcagggcaagccctggaagtag

SEQ ID NO: 76288 - DNA, 165 bp, synthetic construct
  misc_feature 1..165: note = Description of Artificial Sequence: Synthetic coding sequence
  source 1..165: mol_type = other DNA
atgagcctgagaagacacatcggcaaccccgagtacctgatgaagagaatcccccagaaccccagataccagcacatcaagagcagactggacaccggcgcctgcgtgtacctgaccagcagccccgccctgcccgactgcgccatgaacggcctgtgcttctag

SEQ ID NO: 76289 - DNA, 858 bp, synthetic construct
  misc_feature 1..858: note = Description of Artificial Sequence: Synthetic coding sequence
  source 1..858: mol_type = other DNA
atgagcctgagaagacacatcggcaaccccgagtacctgatgaagagaatcccccagaaccccagataccagcacatcaagagcagactggacaccgactacagatacaagaaggacgagctgttcaagagactgaaggtgaccaccttcgcccagctgatcatccaggtggccagcctgagcgaccagaccctggaggtgaccgccgaggagatccagagactggaggacaacgacagcgccgccagcgaccccgacgccgagaccaccgccagaaccaacggcaagggcaaccccggcgagcagagccccagccccgagcagttcatcaacaacgccggcgccggcgacagcagcagaagcaccctgcagagcgtgatcagcggcgtgggcgagctggacctggacaagggccccgtgaagaaggccgagccccacaccaaggacaagccctaccccgactgccccttcctgctgctggacgtgagagacagagacagctaccagcagtgccacatcgtgggcgcctacagctaccccatcgccaccctgagcagaaccatgaacccctacagcaacgacatcctggagtacaagaacgcccacggcaagatcatcatcctgtacgacgacgacgagagactggccagccaggccgccaccaccatgtgcgagagaggcttcgagaacctgttcatgctgagcggcggcagactgaaccaggccaacagcagcggcagagagagcaaggtgcccggcgccagaagcgcccagaacctgcccggcggcggccccgccagccacagcaaccccagaagcctgagcagcggccacctgcagggcaagccctggaagtag

SEQ ID NO: 76290 - DNA, 1200 bp, synthetic construct
  misc_feature 1..1200: note = Description of Artificial Sequence: Synthetic coding sequence
  source 1..1200: mol_type = other DNA
atgagcagcagaagcaccaaggacctgatcaagagcaagtggggcagcaagcccagcaacagcaagagcgagaccaccctggagaagctgaagggcgagatcgcccacctgaagaccagcgtggacgagatcaccagcggcaagggcaagctgaccgacaaggagagacacagactgctggagaagatcagagtgctggaggccgagaaggagaagaacgcctaccagctgaccgagaaggacaaggagatccagagactgagagaccagctgaaggccagatacagcaccaccaccctgctggagcagctggaggagaccaccagagagggcgagagaagagagcaggtgctgaaggccctgagcgaggagaaggacgtgctgaagcagcagctgagcgccgccaccagcagaatcgccgagctggagagcaagaccaacaccctgagactgagccagaccgtggcccccaactgcttcaacagcagcatcaacaacatccacgagatggagatccagctgaaggacgccctggagaagaaccagcagtggctggtgtacgaccagcagagagaggtgtacgtgaagggcctgctggccaagatcttcgagctggagaagaagaccgagaccgccgcccacagcctgccccagcagaccaagaagcccgagagcgagggctacctgcaggaggagaagcagaagtgctacaacgacctgctggccagcgccaagaaggacctggaggtggagagacagaccatcacccagctgagcttcgagctgagcgagttcagaagaaagtacgaggagacccagaaggaggtgcacaacctgaaccagctgctgtacagccagagaagagccgacgtgcagcacctggaggacgacagacacaagaccgagaagatccagaagctgagagaggagaacgacatcgccagaggcaagctggaggaggagaagaagagaagcgaggagctgctgagccaggtgcagttcctgtacaccagcctgctgaagcagcaggaggagcagaccagagtggccctgctggagcagcagatgcaggcctgcaccctggacttcgagaacgagaagctggacagacagcacgtgcagcaccagctgcacgtgatcctgaaggagctgagaaaggccagaaacaacaccgtgggcatcctggacaccaagagctag

SEQ ID NO: 76291 - DNA, 1395 bp, synthetic construct
  misc_feature 1..1395: note = Description of Artificial Sequence: Synthetic coding sequence
  source 1..1395: mol_type = other DNA
atgagcagcagaagcaccaaggacctgatcaagagcaagtggggcagcaagcccagcaacagcaagagcgagaccaccctggagaagctgaagggcgagatcgcccacctgaagaccagcgtggacgagatcaccagcggcaagggcaagctgaccgacaaggagagacacagactgctggagaagatcagagtgctggaggccgagaaggagaagaacgcctaccagctgaccgagaaggacaaggagatccagagactgagagaccagctgaaggccagatacagcaccaccaccctgctggagcagctggaggagaccaccagagagggcgagagaagagagcaggtgctgaaggccctgagcgaggagaaggacgtgctgaagcagcagctgagcgccgccaccagcagaatcgccgagctggagagcaagaccaacaccctgagactgagccagaccgtggcccccaactgcttcaacagcagcatcaacaacatccacgagatggagatccagctgaaggacgccctggagaagaaccagcagtggctggtgtacgaccagcagagagaggtgtacgtgaagggcctgctggccaagatcttcgagctggagaagaagaccgagaccgccgcccacagcctgccccagcagaccaagaagcccgagagcgagggctacctgcaggaggagaagcagaagtgctacaacgacctgctggccagcgccaagaaggacctggaggtggagagacagaccatcacccagctgagcttcgagctgagcgagttcagaagaaagtacgaggagacccagaaggaggtgcacaacctgaaccagctgctgtacagccagagaagagccgacgtgcagcacctggaggacgacagacacaagaccgagaagatccagaagctgagagaggagaacgacatcgccagaggcaagctggaggaggagaagaagagaagcgaggagctgctgagccaggtgcagttcctgtacaccagcctgctgaagcagcaggaggagcagaccagagtggccctgctggagcagcagatgcaggcctgcaccctggacttcgagaacgagaagctggacagacagcacgtgcagcaccagctgcacgtgatcctgaaggagctgagaaaggccagaaaccagatcacccagctggagagcctgaagcagctgcacgagttcgccatcaccgagcccctggtgaccttccagggcgagaccgagaacagagagaaggtggccgccagccccaagagccccaccgccgccctgaacgagagcctggtggagtgccccaagtgcaacatccagtaccccgccaccgagcacagagacctgctggtgcacgtggagtactgcagcaagtag

SEQ ID NO: 76292 - DNA, 627 bp, synthetic construct
  misc_feature 1..627: note = Description of Artificial Sequence: Synthetic coding sequence
  source 1..627: mol_type = other DNA
tgaagcagcatcaacaacatccacgagatggagatccagctgaaggacgccctggagaagaaccagcagtggctggtgtacgaccagcagagagaggtgtacgtgaagggcctgctggccaagatcttcgagctggagaagaagaccgagaccgccgcccacagcctgccccagcagaccaagaagcccgagagcgagggctacctgcaggaggagaagcagaagtgctacaacgacctgctggccagcgccaagaaggacctggaggtggagagacagaccatcacccagctgagcttcgagctgagcgagttcagaagaaagtacgaggagacccagaaggaggtgcacaacctgaaccagctgctgtacagccagagaagagccgacgtgcagcacctggaggacgacagacacaagaccgagaagatccagaagctgagagaggagaacgacatcgccagaggcaagctggaggaggagaagaagagaagcgaggagctgctgagccaggtgcagttcctgtacaccagcctgctgaagcagcaggaggagcagaccagagtggccctgctggagcagcaggtgctgatcagagtggccagcaagttcaacagcgcctgctag

SEQ ID NO: 76293 - DNA, 1425 bp, synthetic construct
  misc_feature 1..1425: note = Description of Artificial Sequence: Synthetic coding sequence
  source 1..1425: mol_type = other DNA
atggccgccgccagcgtgagcgccgccagcggcagccacctgagcaacagcttcgccgagcccagcagaagcaacggcagcatggtgagacacagcagcagcccctacgtggtgtaccccagcgacaagcccttcctgaacagcgacctgagaagaagccccagcaagcccaccctggcctaccccgagagcaacagcagagccatcttcagcgccctgaagaacctgcaggacaagatcagaagactggagctggagagaatccaggccgaggagagcgtgaagaccctgagcagagagaccatcgagtacaagaaggtgctggacgagcagatccaggagagagagaacagcaagaacgaggagagcaagcacaaccaggagctgaccagccagctgctggccgccgagaacaagtgcaacctgctggagaagcagctggagtacatgagaaacatgatcaagcacgccgagatggagagaaccagcgtgctggagaagcaggtgagcctggagagagagagacagcacgaccagacccacgtgcagagccagctggagaagctggacctgctggagcaggagtacaacaagctgaccaccatgcaggccctggccgagaagaagatgcaggagctggaggccaagctgcacgaggaggagcaggagagaaagagaatgcaggccaaggccgccgagctgcagaccggcctggagaccaacagactgatcttcgaggacaaggccaccccctgcgtgcccaacgccagaagaatcaagaagaagaagagcaagccccccgagaagagcaccagccccagccacgccgtggtggccaacgtgcagctggtgctgcacctgatgaagcagcacagcaaggccctgtgcaacgacagagtgatcaacagcatccccctggccaagcaggtgagcagcagaggcggcaagagcaagaagctgagcgtgaccccccccagcagcaacggcatcaacgaggagctgagcgaggtgctgcagaccctgcaggacgagttcggccagatgagcttcgaccaccagcagctggccaagctgatccaggagagccccaccgtggagctgaaggacaagctggagtgcgagctggaggccctggtgggcagaatggaggccaaggccaaccagatcaccaaggtgagaaagtaccaggcccagctggagaagcagaagctggagaagcagaagaaggagctgaaggccaccaagaagaccctggacgaggagagaaacagcagcagcagaagcggcatcaccggcaccaccaacaagaaggacttcatgaagctgagacccggcgagaagagaagaaagaacctgcagctgctgaaggacatgcagagcatccagaacagcctgcagagcagcagcctgtgctgggactactag

SEQ ID NO: 76294 - DNA, 1503 bp, synthetic construct
  misc_feature 1..1503: note = Description of Artificial Sequence: Synthetic coding sequence
  source 1..1503: mol_type = other DNA
atggccgccgccagcgtgagcgccgccagcggcagccacctgagcaacagcttcgccgagcccagcagaagcaacggcagcatggtgagacacagcagcagcccctacgtggtgtaccccagcgacaagcccttcctgaacagcgacctgagaagaagccccagcaagcccaccctggcctaccccgagagcaacagcagagccatcttcagcgccctgaagaacctgcaggacaagatcagaagactggagctggagagaatccaggccgaggagagcgtgaagaccctgagcagagagaccatcgagtacaagaaggtgctggacgagcagatccaggagagagagaacagcaagaacgaggagagcaagcacaaccaggagctgaccagccagctgctggccgccgagaacaagtgcaacctgctggagaagcagctggagtacatgagaaacatgatcaagcacgccgagatggagagaaccagcgtgctggagaagcaggtgagcctggagagagagagacagcacgaccagacccacgtgcagagccagctggagaagctggacctgctggagcaggagtacaacaagctgaccaccatgcaggccctggccgagaagaagatgcaggagctggaggccaagctgcacgaggaggagcaggagagaaagagaatgcaggccaaggccgccgagctgcagaccggcctggagaccaacagactgatcttcgaggacaaggccaccccctgcgtgcccaacgccagaagaatcaagaagaagaagagcaagccccccgagaagaagagcagcagaaactacttcggcgcccagccccactacagactgtgcctgggcgacatgcccttcgtggccggcaagagcaccagccccagccacgccgtggtggccaacgtgcagctggtgctgcacctgatgaagcagcacagcaaggccctgtgcaacgacagagtgatcaacagcatccccctggccaagcaggtgagcagcagaggcggcaagagcaagaagctgagcgtgaccccccccagcagcaacggcatcaacgaggagctgagcgaggtgctgcagaccctgcaggacgagttcggccagatgagcttcgaccaccagcagctggccaagctgatccaggagagccccaccgtggagctgaaggacaagctggagtgcgagctggaggccctggtgggcagaatggaggccaaggccaaccagatcaccaaggtgagaaagtaccaggcccagctggagaagcagaagctggagaagcagaagaaggagctgaaggccaccaagaagaccctggacgaggagagaaacagcagcagcagaagcggcatcaccggcaccaccaacaagaaggacttcatgaagctgagacccggcgagaagagaagaaagaacctgcagctgctgaaggacatgcagagcatccagaacagcctgcagagcagcagcctgtgctgggactactag

SEQ ID NO: 76295 - DNA, 813 bp, synthetic construct
  misc_feature 1..813: note = Description of Artificial Sequence: Synthetic coding sequence
  source 1..813: mol_type = other DNA
atggccgccgccagcgtgagcgccgccagcggcagccacctgagcaacagcttcgccgagcccagcagaagcaacggcagcatggtgagacacagcagcagcccctacgtggtgtaccccagcgacaagcccttcctgaacagcgacctgagaagaagccccagcaagcccaccctggcctaccccgagagcaacagcagagccatcttcagcgccctgaagaacctgcaggacaagatcagaagactggagctggagagaatccaggccgaggagagcgtgaagaccctgagcagagagaccatcgagtacaagaaggtgctggacgagcagatccaggagagagagaacagcaagaacgaggagagcaagcacaaccaggagctgaccagccagctgctggccgccgagaacaagtgcaacctgctggagaagcagctggagtacatgagaaacatgatcaagcacgccgagatggagagaaccagcgtgctggagaagcaggtgagcctggagagagagagacagcacgaccagacccacgtgcagagccagctggagaagctggacctgctggagcaggagtacaacaagctgaccaccatgcaggccctggccgagaagaagatgcaggagctggaggccaagctgcacgaggaggagcaggagagaaagagaatgcaggccaaggccgccgagctgcagaccggcctggagaccaacagactgatcttcgaggacaaggccaccccctgcgtgcccaacgccagaagaatcaagaagaagaagagcaagccccccgagaaggtgtag

SEQ ID NO: 76296 - DNA, 1476 bp, synthetic construct
  misc_feature 1..1476: note = Description of Artificial Sequence: Synthetic coding sequence
  source 1..1476: mol_type = other DNA
atgctgaccagaatcgacaacagcttcgccgagcccagcagaagcaacggcagcatggtgagacacagcagcagcccctacgtggtgtaccccagcgacaagcccttcctgaacagcgacctgagaagaagccccagcaagcccaccctggcctaccccgagagcaacagcagagccatcttcagcgccctgaagaacctgcaggacaagatcagaagactggagctggagagaatccaggccgaggagagcgtgaagaccctgagcagagagaccatcgagtacaagaaggtgctggacgagcagatccaggagagagagaacagcaagaacgaggagagcaagcacaaccaggagctgaccagccagctgctggccgccgagaacaagtgcaacctgctggagaagcagctggagtacatgagaaacatgatcaagcacgccgagatggagagaaccagcgtgctggagaagcaggtgagcctggagagagagagacagcacgaccagacccacgtgcagagccagctggagaagctggacctgctggagcaggagtacaacaagctgaccaccatgcaggccctggccgagaagaagatgcaggagctggaggccaagctgcacgaggaggagcaggagagaaagagaatgcaggccaaggccgccgagctgcagaccggcctggagaccaacagactgatcttcgaggacaaggccaccccctgcgtgcccaacgccagaagaatcaagaagaagaagagcaagccccccgagaagaagagcagcagaaactacttcggcgcccagccccactacagactgtgcctgggcgacatgcccttcgtggccggcaagagcaccagccccagccacgccgtggtggccaacgtgcagctggtgctgcacctgatgaagcagcacagcaaggccctgtgcaacgacagagtgatcaacagcatccccctggccaagcaggtgagcagcagaggcggcaagagcaagaagctgagcgtgaccccccccagcagcaacggcatcaacgaggagctgagcgaggtgctgcagaccctgcaggacgagttcggccagatgagcttcgaccaccagcagctggccaagctgatccaggagagccccaccgtggagctgaaggacaagctggagtgcgagctggaggccctggtgggcagaatggaggccaaggccaaccagatcaccaaggtgagaaagtaccaggcccagctggagaagcagaagctggagaagcagaagaaggagctgaaggccaccaagaagaccctggacgaggagagaaacagcagcagcagaagcggcatcaccggcaccaccaacaagaaggacttcatgaagctgagacccggcgagaagagaagaaagaacctgcagctgctgaaggacatgcagagcatccagaacagcctgcagagcagcagcctgtgctgggactactag

SEQ ID NO: 76297 - DNA, 1794 bp, synthetic construct
  misc_feature 1..1794: note = Description of Artificial Sequence: Synthetic coding sequence
  source 1..1794: mol_type = other DNA
atgttccccgtggcccccaagccccaggacagcagccagcccagcgacagactgatgaccgagaagcagcaggaggaggccgagtgggagagcatcaacgtgctgctgatgatgcacggcctgaagcccctgagcctggtgaagagaaccgacctgaaggacctgatcatcttcgacaagcagagcagccagagaatgagacagaacctgaagctgctggtggaggagaccagctgccagcagaacatgatccaggagctgatcgagaccaaccagcagctgagaaacgagctgcagctggagcagagcagagccgccaaccaggagcagagagccaacgacctggagcagatcatggagagcgtgaagagcaagatcggcgagctggaggacgagagcctgagcagagcctgccaccagcagaacaagatcaaggacctgcagaaggagcagaagaccctgcaggtgaagtgccagcactacaagaagaagagaaccgagcaggaggagaccatcgccagcctgcagatggaggtgtgcagactgaagaaggaggaggaggacagaatcgtgacccagaacagagtgttcgcctacctgtgcaagagagtgccccacaccgtgctggacagacagctgctgtgcctgatcgactactacgagagcaagatcagaaagatccacacccagagacagtacaaggaggacgagagccagagcgaggaggagaacgactacagaaacctggacgccagccccacctacaagggcctgctgatgagcctgcagaaccagctgaaggagagcaagagcaagatcgacgccctgagcagcgagaagctgaacctgcagaaggacctggagaccagacccacccagcacgagctgagactgtacaagcagcaggtgaagaagctggagaaggccctgaagaagaacgtgaagctgcaggagctgatcaaccacaagaaggccgaggacaccgagaagaaggacgagcccagcaagtacaaccagcagcaggccctgatcgaccagagatacttccaggtgctgtgcagcatcaacagcatcatccacaaccccagagcccccgtgatcatctacaagcagaccaagggcggcgtgcagaacttcaacaaggacctggtgcaggactgcggcttcgagcacctggtgcccgtgatcgagatgtgggccgaccagctgaccagcctgaaggacctgtacaagagcctgaagaccctgagcgccgagctggtgccctggctgaacctgaagaagcaggacgagaacgagggcatcaaggtggaggacctgctgttcatcgtggacaccatgctggaggaggtggagaacaaggagaaggacagcaacatgccccacttccagaccctgcaggccatcgtgagccacttccagaagctgttcgacgtgcccagcctgaacggcgtgtaccccagaatgaacgaggtgtacaccagactgggcgagatgaacaacgccgtgagaaacctgcaggagctgctggagctggacagcagcagcagcctgtgcgtgctggtgagcaccgtgggcaagctgtgcagactgatcaacgaggacgtgaacgagcaggtgatgcaggtgctgggccccgaggacctgcagagcatcatctacaagctggaggagcacgaggagttcttccccgccttccaggccttcaccaacgacctgctggagatcctggagatcgacgacctggacgccatcgtgcccgccgtgaagaagctgaaggtgctgagctactag

SEQ ID NO: 76298 - DNA, 639 bp, synthetic construct
  misc_feature 1..639: note = Description of Artificial Sequence: Synthetic coding sequence
  source 1..639: mol_type = other DNA
atgttccccgtggcccccaagccccaggacagcagccagcccagcgacagactgatgaccgagaagcagcaggaggaggccgagtgggagagcatcaacgtgctgctgatgatgcacggcctgaagcccctgagcctggtgaagagaaccgacctgaaggacctgatcatcttcgacaagcagagcagccagagaatgagacagaacctgaagctgctggtggaggagaccagctgccagcagaacatgatccaggagctgatcgagaccaaccagcagctgagaaacgagctgcagctggagcagagcagagccgccaaccaggagcagagagccaacgacctggagcagatcatggagagcgtgaagagcaagatcggcgagctggaggacgagagcctgagcagagcctgccaccagcagaacaagatcaaggacctgcagaaggagcagaagaccctgcaggtgaagtgccagcactacaagaagaagagaaccgagcaggaggagaccatcgccagcctgcagatggaggtgtgcagactgaagaaggaggaggaggacagaatcgtgacccagaacagagtgttcgcctacctgtgcaagagagtgccccacaccgtgctggacagacagtag

SEQ ID NO: 76299 - DNA, 351 bp, synthetic construct
  misc_feature 1..351: note = Description of Artificial Sequence: Synthetic coding sequence
  source 1..351: mol_type = other DNA
atgttccccgtggcccccaagccccaggacagcagccagcccagcgacagactgatgaccgagaagcagcaggaggaggccgagtgggagagcatcaacgtgctgctgatgatgcacggcctgaagcccctgagcctggtgaagagaaccgacctgaaggacctgatcatcttcgacaagcagagcagccagagaatgagacagaacctgaagctgctggtggaggagaccagctgccagcagaacatgatccaggagctgatcgagaccaaccagcagctgagaaacgagctgcagctggagcagagcagagccgccaaccaggagcagagagccaacgacctggagtag

SEQ ID NO: 76300 - DNA, 1665 bp, synthetic construct
  misc_feature 1..1665: note = Description of Artificial Sequence: Synthetic coding sequence
  source 1..1665: mol_type = other DNA
atgttccccgtggcccccaagccccaggacagcagccagcccagcgacagactgatgaccgagaagcagcaggaggaggccgagtgggagagcatcaacgtgctgctgatgatgcacggcctgaagcccctgagcctggtgaagagaaccgacctgaaggacctgatcatcttcgacaagcagagcagccagagaatgagacagaacctgaagctgctggtggaggagaccagctgccagcagaacatgatccaggagctgatcgagaccaaccagcagctgagaaacgagctgcagctggagcagagcagagccgccaaccaggagcagagagccaacgacctggagcagatcatggagagcgtgaagagcaagatcggcgagctggaggacgagagcctgagcagagcctgccaccagcagaacaagatcaaggacctgcagaaggagcagaagaccctgcaggtgaagtgccagcactacaagaagaagagaaccgagcaggaggagaccatcgccagcctgcagatggaggtgtgcagactgaagaaggaggaggaggacagaatcgtgacccagaacagagtgttcgcctacctgtgcaagagagtgccccacaccgtgctggacagacagctgctgtgcctgatcgactactacgagagcaagatcagaaagatccacacccagagacagtacaaggaggacgagagccagagcgaggaggagaacgactacagaaacctggacgccagccccacctacaagggcctgctgatgagcctgcagaaccagctgaaggagagcaagagcaagatcgacgccctgagcagcgagaagctgaacctgcagaaggacctggagaccagacccacccagcacgagctgagactgtacaagcagcaggtgaagaagctggagaaggccctgaagaagaacgtgaagctgcaggagctgatcaaccacaagaaggccgaggacaccgagaagaaggacgagcccagcaagtacaaccagcagcaggccctgatcgaccagagatacttccaggtgctgtgcagcatcaacagcatcatccacaaccccagagcccccgtgatcatctacaagcagaccaagggcggcgtgcagaacttcaacaaggacctggtgcaggactgcggcttcgagcacctggtgcccgtgatcgagatgtgggccgaccagctgaccagcctgaaggacctgtacaagagcctgaagaccctgagcgccgagctggtgccctggctgaacctgaagaagcaggacgagaacgagggcatcaaggtggaggacctgctgttcatcgtggacaccatgctggaggaggtggagaacaaggagaaggacagcaacatgccccacttccagaccctgcaggccatcgtgagccacttccagaagctgttcgacgtgcccagcctgaacggcgtgtaccccagaatgaacgaggtgtacaccagactgggcgagatgaacaacgccgtgagaaacctgcaggagctgctggagctggacagcagcagcagcctgtgcgtgctggtgagcaccgtgggcaagctgtgcagactgatcaacgaggacgtgaacgagcaggtgatgcaggtgctgggccccgaggacctgcagagatacctgttctag

SEQ ID NO: 76301 - DNA, 1794 bp, synthetic construct; identical to SEQ ID NO: 76297
  misc_feature 1..1794: note = Description of Artificial Sequence: Synthetic coding sequence
  source 1..1794: mol_type = other DNA

SEQ ID NO: 76302 - DNA, 72 bp, synthetic construct
  misc_feature 1..72: note = Description of Artificial Sequence: Synthetic coding sequence
  source 1..72: mol_type = other DNA
atgttccccgtggcccccaagccccaggacagcagccagcccagcgacagactgatgaccgagaagcagtag

SEQ ID NO: 76303 - DNA, 1734 bp, synthetic construct
  misc_feature 1..1734: note = Description of Artificial Sequence: Synthetic coding sequence
  source 1..1734: mol_type = other DNA
atgaccgagcaggaggaggccgagtgggagagcatcaacgtgctgctgatgatgcacggcctgaagcccctgagcctggtgaagagaaccgacctgaaggacctgatcatcttcgacaagcagagcagccagagaatgagacagaacctgaagctgctggtggaggagaccagctgccagcagaacatgatccaggagctgatcgagaccaaccagcagctgagaaacgagctgcagctggagcagagcagagccgccaaccaggagcagagagccaacgacctggagcagatcatggagagcgtgaagagcaagatcggcgagctggaggacgagagcctgagcagagcctgccaccagcagaacaagatcaaggacctgcagaaggagcagaagaccctgcaggtgaagtgccagcactacaagaagaagagaaccgagcaggaggagaccatcgccagcctgcagatggaggtgtgcagactgaagaaggaggaggaggacagaatcgtgacccagaacagagtgttcgcctacctgtgcaagagagtgccccacaccgtgctggacagacagctgctgtgcctgatcgactactacgagagcaagatcagaaagatccacacccagagacagtacaaggaggacgagagccagagcgaggaggagaacgactacagaaacctggacgccagccccacctacaagggcctgctgatgagcctgcagaaccagctgaaggagagcaagagcaagatcgacgccctgagcagcgagaagctgaacctgcagaaggacctggagaccagacccacccagcacgagctgagactgtacaagcagcaggtgaagaagctggagaaggccctgaagaagaacgtgaagctgcaggagctgatcaaccacaagaaggccgaggacaccgagaagaaggacgagcccagcaagtacaaccagcagcaggccctgatcgaccagagatacttccaggtgctgtgcagcatcaacagcatcatccacaaccccagagcccccgtgatcatctacaagcagaccaagggcggcgtgcagaacttcaacaaggacctggtgcaggactgcggcttcgagcacctggtgcccgtgatcgagatgtgggccgaccagctgaccagcctgaaggacctgtacaagagcctgaagaccctgagcgccgagctggtgccctggctgaacctgaagaagcaggacgagaacgagggcatcaaggtggaggacctgctgttcatcgtggacaccatgctggaggaggtggagaacaaggagaaggacagcaacatgccccacttccagaccctgcaggccatcgtgagccacttccagaagctgttcgacgtgcccagcctgaacggcgtgtaccccagaatgaacgaggtgtacaccagactgggcgagatgaacaacgccgtgagaaacctgcaggagctgctggagctggacagcagcagcagcctgtgcgtgctggtgagcaccgtgggcaagctgtgcagactgatcaacgaggacgtgaacgagcaggtgatgcaggtgctgggccccgaggacctgcagagcatcatctacaagctggaggagcacgaggagttcttccccgccttccaggccttcaccaacgacctgctggagatcctggagatcgacgacctggacgccatcgtgcccgccgtgaagaagctgaaggtgctgagctactag

SEQ ID NO: 76304 - DNA, 3666 bp, synthetic construct
  misc_feature 1..3666: note = Description of Artificial Sequence: Synthetic coding sequence
  source 1..3666: mol_type = other DNA
atgctgttccccctgcaggtggccgccgtgaccagcagcgtgagagacgaccccctggagcactgcgtgagccccagaaccagagccagaagccccgagatctgcaagatggccgacaacctggacgagttcatcgaggagcagaaggccagactggccgaggacaaggccgagctggagagcgaccccccctacatggagatgaagggcaagctgagcgccaagctgagcgagaacagcaagatcctgatcagcatggccaaggagaacatcccccccaacagccagcagaccagaggcagcctgggcatcgactacggcctgagcctgcccctgggcgaggactacgagagaaagaagcacaagctgaaggaggagctgagacaggactacagaagatacctgacccaggagagactgaagctggagagaaacaaggagtacaaccagttcctgagaggcaaggaggagagcagcgagaagttcagacaggtggagaagagcaccgagcccaagagccagagaaacaagaagcccatcggccaggtgaagcccgacctgaccagccagatccagaccagctgcgagaacagcgagggccccagaaaggacgtgctgacccccagcgaggcctacgaggagctgctgaaccagagaagactggaggaggacagatacagacagctggacgacgagatcgagctgagaaacagaagaatcatcaagaaggccaacgaggaggtgggcatcagcaacctgaagcaccagagattcgccagcaaggccggcatccccgacagaagattccacagattcaacgaggacagagtgttcgacagaagataccacagacccgaccaggaccccgaggtgagcgaggagatggacgagagattcagatacgagagcgacttcgacagaagactgagcagagtgtacaccaacgacagaatgcacagaaacaagagaggcaacatgccccccatggagcacgacggcgacgtgatcgagcagagcaacatcagaatcagcagcgccgagaacaagagcgcccccgacaacgagaccagcaagagcgccaaccaggacacctgcagccccttcgccggcatgctgttcggcggcgaggacagagagctgatccagagaagaaaggagaagtacagactggagctgctggagcagatggccgagcagcagagaaacaagagaagagagaaggacctggagctgagagtggccgccagcggcgcccaggaccccgagaagagccccgacagactgaagcagttcagcgtggcccccagacacttcgaggagatgatcccccccgagagacccagaatcgccttccagacccccctgccccccctgagcgcccccagcgtgccccccatccccagcgtgcaccccgtgcccagccagaacgaggacctgagaagcggcctgagcagcgccctgggcgagatggtgagccccagaatcgcccccctgccccccccccccctgctgccccccctggccaccaactacagaaccccctacgacgacgcctactacttctacggcagcagaaacaccttcgaccccagcctggcctactacggcagcggcatgatgggcgtgcagcccgccgcctacgtgagcgcccccgtgacccaccagctggcccagcccgtggtgaacaccgtgggccagaacgagctgaagatcaccagcgaccaggtgatcaacagcggcctgatcttcgaggacaagcccaagcccagcaagcagagcctgcagagctaccaggaggccctgcagcagcagatcagagagagagaggagagaagaaagaaggagagagaggagaaggaggagtacgaggccaagctggaggccgagatgagaacctacaacccctggggcaagggcggcggcggcgcccccctgagagacgccaagggcaacctgatcaccgacctgaacagaatgcacagacagaacatcgacgcctaccacaaccccgacgccagaacctacgaggacaagagagccgtggtgagcctggaccccaacctggccaccagcaacgccgagaacctggaggacgccgccaacaagagcagcggccacatgcagacccagagcagccccttcgccagaggcaacgtgttcggcgagccccccaccgagctgcagatcaagcagcaggagctgtacaagaacttcctgagattccagatcgaggagaagaagcagagagaggaggccgagagagagagactgagaatcgccgaggagaaggaggagagaagactggccgagcagagagccagaatccagcaggagtacgaggaggagcaggagaagaagagagagaaggaggaggagcagagactgaagaacgaggagcacatcagactggccgaggagagacagaaggaggccgagagaaagaagaaggaggaggaggagaagtacaacctgcagctgcagcactactgcgagagagacaacctgatcggcgaggagaccaagcacatgagacagcccagccccatcgtgcccgccctgcagaacaagatcgccagcaagctgcagagaccccccagcgtggacagcatcatcagaagcttcatccacgagagcagcatgagcagagcccagagcccccccgtgcccgccagaaagaaccagctgagagccgaggaggagaagaagaacgtgatcatggagctgagcgagatgagaaagcagctgagaagcgaggagagaagactgcaggagagactgctgcacatggacagcgacgacgagatccccatcagaaagaaggagagaaaccccatggacatcttcgacatggccagacacagactgcaggcccccgtgagaagacagagccccaagggcctggacgccgccaccttccagaacgtgcacgacttcaacgagctgaaggacagagacagcgagaccagagtggacctgaagttcatgtacctggacccccccagagaccaccacaccctggagatccagcagcaggccctgctgagagagcagcagaagagactgaacagaatcaagatgcaggagggcgccaaggtggacctggacgccatccccagcgccaaggtgagagagcagagaatgcccagagacgacaccagcgacttcctgaagaacagcctgctggagagcgacagcgccttcatcggcgcctacggcgagacctaccccgccatcgaggacgacgtgctgcccccccccagccagctgcccagcgccagagagagaagaagaaacaagtggaagggcctggacatcgacagcagcagacccaacgtggcccccgacggcctgagcctgaagagcatcagcagcgtgaacgtggacgagctgagagtgagaaacgaggagagaatgagaagactgaacgagttccacaacaagcccatcaacaccgacgacgagagcagcctggtggaccccgacgacatcatgaagcacatcggcgacgacggcagcaacagcgtggccaccgagccctggctgagacccggcaccagcgagaccctgaagagattcatggccgagcagctgaaccaggagcagcagcagatccccggcaagcccggcaccttcacctggcagggcctgagcaccgcccacggctag

SEQ ID NO: 76305 - DNA, 3771 bp, synthetic construct
  misc_feature 1..3771: note = Description of Artificial Sequence: Synthetic coding sequence
  source 1..3771: mol_type = other DNA
atgctgttccccctgcaggtggccgccgtgaccagcagcgtgagagacgaccccctggagcactgcgtgagccccagaaccagagccagaagccccgagatctgcaagatggccgacaacctggacgagttcatcgaggagcagaaggccagactggccgaggacaaggccgagctggagagcgaccccccctacatggagatgaagggcaagctgagcgccaagctgagcgagaacagcaagatcctgatcagcatggccaaggagaacatcccccccaacagccagcagaccagaggcagcctgggcatcgactacggcctgagcctgcccctgggcgaggactacgagagaaagaagcacaagctgaaggaggagctgagacaggactacagaagatacctgacccagaaggtgttcagcggcaccagcaagaagaacttcctgagcaccagcgagaccgaccccagcaccctgggcgtgagcctgcccatcggcgagagactgagcgccaaggagagactgaagctggagagaaacaaggagtacaaccagttcctgagaggcaaggaggagagcagcgagaagttcagacaggtggagaagagcaccgagcccaagagccagagaaacaagaagcccatcggccaggtgaagcccgacctgaccagccagatccagaccagctgcgagaacagcgagggccccagaaaggacgtgctgacccccagcgaggcctacgaggagctgctgaaccagagaagactggaggaggacagatacagacagctggacgacgagatcgagctgagaaacagaagaatcatcaagaaggccaacgaggaggtgggcatcagcaacctgaagcaccagagattcgccagcaaggccggcatccccgacagaagattccacagattcaacgaggacagagtgttcgacagaagataccacagacccgaccaggaccccgaggtgagcgaggagatggacgagagattcagatacgagagcgacttcgacagaagactgagcagagtgtacaccaacgacagaatgcacagaaacaagagaggcaacatgccccccatggagcacgacggcgacgtgatcgagcagagcaacatcagaatcagcagcgccgagaacaagagcgcccccgacaacgagaccagcaagagcgccaaccaggacacctgcagccccttcgccggcatgctgttcggcggcgaggacagagagctgatccagagaagaaaggagaagtacagactggagctgctggagcagatggccgagcagcagagaaacaagagaagagagaaggacctggagctgagagtggccgccagcggcgcccaggaccccgagaagagccccgacagactgaagcagttcagcgtggcccccagacacttcgaggagatgatcccccccgagagacccagaatcgccttccagacccccctgccccccctgagcgcccccagcgtgccccccatccccagcgtgcaccccgtgcccagccagaacgaggacctgagaagcggcctgagcagcgccctgggcgagatggtgagccccagaatcgcccccctgccccccccccccctgctgccccccctggccaccaactacagaaccccctacgacgacgcctactacttctacggcagcagaaacaccttcgaccccagcctggcctactacggcagcggcatgatgggcgtgcagcccgccgcctacgtgagcgcccccgtgacccaccagctggcccagcccgtggtgaacaccgtgggccagaacgagctgaagatcaccagcgaccaggtgatcaacagcggcctgatcttcgaggacaagcccaagcccagcaagcagagcctgcagagctaccaggaggccctgcagcagcagatcagagagagagaggagagaagaaagaaggagagagaggagaaggaggagtacgaggccaagctggaggccgagatgagaacctacaacccctggggcaagggcggcggcggcgcccccctgagagacgccaagggcaacctgatcaccgacctgaacagaatgcacagacagaacatcgacgcctaccacaaccccgacgccagaacctacgaggacaagagagccgtggtgagcctggaccccaacctggccaccagcaacgccgagaacctggaggacgccgccaacaagagcagcggccacatgcagacccagagcagccccttcgccagaggcaacgtgttcggcgagccccccaccgagctgcagatcaagcagcaggagctgtacaagaacttcctgagattccagatcgaggagaagaagcagagagaggaggccgagagagagagactgagaatcgccgaggagaaggaggagagaagactggccgagcagagagccagaatccagcaggagtacgaggaggagcaggagaagaagagagagaaggaggaggagcagagactgaagaacgaggagcacatcagactggccgaggagagacagaaggaggccgagagaaagaagaaggaggaggaggagaagtacaacctgcagctgcagcactactgcgagagagacaacctgatcggcgaggagaccaagcacatgagacagcccagccccatcgtgcccgccctgcagaacaagatcgccagcaagctgcagagaccccccagcgtggacagcatcatcagaagcttcatccacgagagcagcatgagcagagcccagagcccccccgtgcccgccagaaagaaccagctgagagccgaggaggagaagaagaacgtgatcatggagctgagcgagatgagaaagcagctgagaagcgaggagagaagactgcaggagagactgctgcacatggacagcgacgacgagatccccatcagaaagaaggagagaaaccccatggacatcttcgacatggccagacacagactgcaggcccccgtgagaagacagagccccaagggcctggacgccgccaccttccagaacgtgcacgacttcaacgagctgaaggacagagacagcgagaccagagtggacctgaagttcatgtacctggacccccccagagaccaccacaccctggagatccagcagcaggccctgctgagagagcagcagaagagactgaacagaatcaagatgcaggagggcgccaaggtggacctggacgccatccccagcgccaaggtgagagagcagagaatgcccagagacgacaccagcgacttcctgaagaacagcctgctggagagcgacagcgccttcatcggcgcctacggcgagacctaccccgccatcgaggacgacgtgctgcccccccccagccagctgcccagcgccagagagagaagaagaaacaagtggaagggcctggacatcgacagcagcagacccaacgtggcccccgacggcctgagcctgaagagcatcagcagcgtgaacgtggacgagctgagagtgagaaacgaggagagaatgagaagactgaacgagttccacaacaagcccatcaacaccgacgacgagagcagcctggtggaccccgacgacatcatgaagcacatcggcgacgacggcagcaacagcgtggccaccgagccctggctgagacccggcaccagcgagaccctgaagagattcatggccgagcagctgaaccaggagcagcagcagatccccggcaagcccggcaccttcacctggcagggcctgagcaccgcccacggctag

SEQ ID NO: 76306 - DNA, 2631 bp, synthetic construct
  misc_feature 1..2631: note = Description of Artificial Sequence: Synthetic coding sequence
  source 1..2631: mol_type = other DNA
atggacgagagattcagatacgagagcgacttcgacagaagactgagcagagtgtacaccaacgacagaatgcacagaaacaagagaggcaacatgccccccatggagcacgacggcgacgtgatcgagcagagcaacatcagaatcagcagcgccgagaacaagagcgcccccgacaacgagaccagcaagagcgccaaccaggacacctgcagccccttcgccggcatgctgttcggcggcgaggacagagagctgatccagagaagaaaggagaagtacagactggagctgctggagcagatggccgagcagcagagaaacaagagaagagagaaggacctggagctgagagtggccgccagcggcgcccaggaccccgagaagagccccgacagactgaagcagttcagcgtggcccccagacacttcgaggagatgatcccccccgagagacccagaatcgccttccagacccccctgccccccctgagcgcccccagcgtgccccccatccccagcgtgcaccccgtgcccagccagaacgaggacctgagaagcggcctgagcagcgccctgggcgagatggtgagccccagaatcgcccccctgccccccccccccctgctgccccccctggccaccaactacagaaccccctacgacgacgcctactacttctacggcagcagaaacaccttcgaccccagcctggcctactacggcagcggcatgatgggcgtgcagcccgccgcctacgtgagcgcccccgtgacccaccagctggcccagcccgtggtgaacaccgtgggccagaacgagctgaagatcaccagcgaccaggtgatcaacagcggcctgatcttcgaggacaagcccaagcccagcaagcagagcctgcagagctaccaggaggccctgcagcagcagatcagagagagagaggagagaagaaagaaggagagagaggagaaggaggagtacgaggccaagctggaggccgagatgagaacctacaacccctggggcaagggcggcggcggcgcccccctgagagacgccaagggcaacctgatcagccacatgcagacccagagcagccccttcgccagaggcaacgtgttcggcgagccccccaccgagctgcagatcaagcagcaggagctgtacaagaacttcctgagattccagatcgaggagaagaagcagagagaggaggccgagagagagagactgagaatcgccgaggagaaggaggagagaagactggccgagcagagagccagaatccagcaggagtacgaggaggagcaggagaagaagagagagaaggaggaggagcagagactgaagaacgaggagcacatcagactggccgaggagagacagaaggaggccgagagaaagaagaaggaggaggaggagaagtacaacctgcagctgcagcactactgcgagagagacaacctgatcggcgaggagaccaagcacatgagacagcccagccccatcgtgcccgccctgcagaacaagatcgccagcaagctgcagagaccccccagcgtggacagcatcatcagaagcttcatccacgagagcagcatgagcagagcccagagcccccccgtgcccgccagaaagaaccagctgagagccgaggaggagaagaagaacgtgatcatggagctgagcgagatgagaaagcagctgagaagcgaggagagaagactgcaggagagactgctgcacatggacagcgacgacgagatccccatcagaaagaaggagagaaaccccatggacatcttcgacatggccagacacagactgcaggcccccgtgagaagacagagccccaagggcctggacgccgccaccttccagaacgtgcacgacttcaacgagctgaaggacagagacagcgagaccagagtggacctgaagttcatgtacctggacccccccagagaccaccacaccctggagatccagcagcaggccctgctgagagagcagcagaagagactgaacagaatcaagatgcaggagggcgccaaggtggacctggacgccatccccagcgccaaggtgagagagcagagaatgcccagagacgacaccagcgacttcctgaagaacagcctgctggagagcgacagcgccttcatcggcgcctacggcgagacctaccccgccatcgaggacgacgtgctgcccccccccagccagctgcccagcgccagagagagaagaagaaacaagtggaagggcctggacatcgacagcagcagacccaacgtggcccccgacggcctgagcctgaagagcatcagcagcgtgaacgtggacgagctgagagtgagaaacgaggagagaatgagaagactgaacgagttccacaacaagcccatcaacaccgacgacgagagcagcctggtggaccccgacgacatcatgaagcacatcggcgacgacggcagcaacagcgtggccaccgagccctggctgagacccggcaccagcgagaccctgaagagattcatggccgagcagctgaaccaggagcagcagcagatccccggcaagcccggcaccttcacctggcagggcctgagcaccgcccacggctag

SEQ ID NO: 76307 - DNA, 2631 bp, synthetic construct; identical to SEQ ID NO: 76306
  misc_feature 1..2631: note = Description of Artificial Sequence: Synthetic coding sequence
  source 1..2631: mol_type = other DNA

SEQ ID NO: 76308 - DNA, 1677 bp, synthetic construct
  misc_feature 1..1677: note = Description of Artificial Sequence: Synthetic coding sequence
  source 1..1677: mol_type = other DNA
atgccctggagaagaagaagaaacagagtgagcgccctggagggcggcagagaggaggaggccccccccgaggccgccgccgtgccccccgccctgctgaccagcccccagcagaccgaggccgccgccgagagaatcctgctgagaggcatcttcgagatcggcagagacagctgcgacgtggtgctgagcgagagagccctgagatggagacccatccagcccgagagacccgccggcgacagcaagtacgacctgctgtgcaaggaggagttcatcgagctgaaggacatcttcagcgtgaagctgaagagaagatgcagcgtgaagcagcagagaagcggcaccctgctgggcatcaccctgttcatctgcctgaagaaggagcagaacaagctgaagaacagcaccctggacctgatcaacctgagcgaggaccactgcgacatctggttcagacagttcaagaagatcctggccggcttccccaacagacccaagagcctgaagatcctgctgaacccccagagccacaagaaggaggccacccaggtgtactacgagaaggtggagcccctgctgaagctggccggcatcaagaccgacgtgaccatcatggagtacgagggccacgccctgagcctgctgaaggagtgcgagctgcagggcttcgacggcggccacagaaagcccctgttcgccatccactggagcgtgcagagactgttcaccggcatgcagaccctggagcccagcgtggtgtgcgtgggcggcgacggcagcgccagcgaggtggcccacgccctgctgctgagagcccagaagaacgccggcatggagaccgacagaatcctgacccccgtgagagcccagctgcccctgggcctgatccccgccggcagcaccaacgtgctggcccacagcctgcacggcgtgccccacgtgatcaccgccaccctgcacatcatcatgggccacgtgcagctggtggacgtgtgcaccttcagcaccgccggcaagctgctgagattcggcttcagcgccatgttcggcttcggcggcagaaccctggccctggccgagaagtacagatggatgagccccaaccagagaagagacttcgccgtggtgaaggccctggccaagctgaaggccgaggactgcgagatcagcttcctgcccttcaacagcagcgacgacgtgcaggagagaagagcccagggcagccccaagagcgactgcaacgaccagtggcagatgatccagggccagttcctgaacgtgagcatcatggccatcccctgcctgtgcagcgtggcccccagaggcctggcccccaacaccagactgaacaacggcagcatggccctgatcatcgccagaaacaccagcagacccgagttcatcaagcacctgaagagatacgccagcgtgaagaaccagttcaacttccccttcgtggagacctacaccgtggaggaggtgaaggtgcaccccagaaacaacaccggcggctacaaccccgaggaggaggaggacgagaccgccagcgagaactgcttcccctggaacgtggacggcgacctgatggaggtggccagcgaggtgcacatcagactgcaccccagactgatcagcctgtacggcggcagcatggaggagatgatccccaagtag

SEQ ID NO: 76309 - DNA, 1260 bp, synthetic construct
  misc_feature 1..1260: note = Description of Artificial Sequence: Synthetic coding sequence
  source 1..1260: mol_type = other DNA
atgccctggagaagaagaagaaacagagtgagcgccctggagggcggcagagaggaggaggccccccccgaggccgccgccgtgccccccgccctgctgaccagcccccagcagaccgaggccgccgccgagagaatcctgctgagaggcatcttcgagatcggcagagacagctgcgacgtggtgctgagcgagagagccctgagatggagacccatccagcccgagagacccgccggcgacagcaagtacgacctgctgtgcaaggaggagttcatcgagctgaaggacatcttcagcgtgaagctgaagagaagatgcagcgtgaagcagcagagaagcggcaccctgctgggcatcaccctgttcatctgcctgaagaaggagcagaacaagctgaagaacagcaccctggacctgatcaacctgagcgaggaccactgcgacatctggttcagacagttcaagaagatcctggccggcagcaccaacgtgctggcccacagcctgcacggcgtgccccacgtgatcaccgccaccctgcacatcatcatgggccacgtgcagctggtggacgtgtgcaccttcagcaccgccggcaagctgctgagattcggcttcagcgccatgttcggcttcggcggcagaaccctggccctggccgagaagtacagatggatgagccccaaccagagaagagacttcgccgtggtgaaggccctggccaagctgaaggccgaggactgcgagatcagcttcctgcccttcaacagcagcgacgacgtgcaggagagaagagcccagggcagccccaagagcgactgcaacgaccagtggcagatgatccagggccagttcctgaacgtgagcatcatggccatcccctgcctgtgcagcgtggcccccagaggcctggcccccaacaccagactgaacaacggcagcatggccctgatcatcgccagaaacaccagcagacccgagttcatcaagcacctgaagagatacgccagcgtgaagaaccagttcaacttccccttcgtggagacctacaccgtggaggaggtgaaggtgcaccccagaaacaacaccggcggctacaaccccgaggaggaggaggacgagaccgccagcgagaactgcttcccctggaacgtggacggcgacctgatggaggtggccagcgaggtgcacatcagactgcaccccagactgatcagcctgtacggcggcagcatggaggagatgatccccaagtag

SEQ ID NO: 76310 - DNA, 1392 bp, synthetic construct
  misc_feature 1..1392: note = Description of Artificial Sequence: Synthetic coding sequence
  source 1..1392: mol_type = other DNA
atgccctggagaagaagaagaaacagagtgagcgccctggagggcggcagagaggaggaggccccccccgaggccgccgccgtgccccccgccctgctgaccagcccccagcagaccgaggccgccgccgagagaatcctgctgagaggcatcttcgagatcggcagagacagctgcgacgtggtgctgagcgagagagccctgagatggagacccatccagcccgagagacccgccggcgacagcaagtacgacctgctgtgcaaggaggagttcatcgagctgaaggacatcttcagcgtgaagctgaagagaagatgcagcgtgaagcagcagagaagcggcaccctgctgggcatcaccctgttcatctgcctgaagaaggagcagaacaagctgaagaacagcaccctggacctgatcaacctgagcgaggaccactgcgacatctggttcagacagttcaagaagatcctggccggcttccccaacagacccaagagcctgaagatcctgctgaacccccagagccacaagaaggaggccacccaggtgtactacgagaaggtggagcccctgctgaagctggccggcatcaagaccgacgtgaccagaagcaccaacgtgctggcccacagcctgcacggcgtgccccacgtgatcaccgccaccctgcacatcatcatgggccacgtgcagctggtggacgtgtgcaccttcagcaccgccggcaagctgctgagattcggcttcagcgccatgttcggcttcggcggcagaaccctggccctggccgagaagtacagatggatgagccccaaccagagaagagacttcgccgtggtgaaggccctggccaagctgaaggccgaggactgcgagatcagcttcctgcccttcaacagcagcgacgacgtgcaggagagaagagcccagggcagccccaagagcgactgcaacgaccagtggcagatgatccagggccagttcctgaacgtgagcatcatggccatcccctgcctgtgcagcgtggcccccagaggcctggcccccaacaccagactgaacaacggcagcatggccctgatcatcgccagaaacaccagcagacccgagttcatcaagcacctgaagagatacgccagcgtgaagaaccagttcaacttccccttcgtggagacctacaccgtggaggaggtgaaggtgcaccccagaaacaacaccggcggctacaaccccgaggaggaggaggacgagaccgccagcgagaactgcttcccctggaacgtggacggcgacctgatggaggtggccagcgaggtgcacatcagactgcaccccagactgatcagcctgtacggcggcagcatggaggagatgatccccaagtag

SEQ ID NO: 76311 - DNA, 1599 bp, synthetic construct
  misc_feature 1..1599: note = Description of Artificial Sequence: Synthetic coding sequence
  source 1..1599: mol_type = other DNA
atgccctggagaagaagaagaaacagagtgagcgccctggagggcggcagagaggaggaggccccccccgaggccgccgccgtgccccccgccctgctgaccagcccccagcagaccgaggccgccgccgagagaatcctgctgagaggcatcttcgagatcggcagagacagctgcgacgtggtgctgagcgagagagccctgagatggagacccatccagcccgagagacccgccggcgacagcaagtacgacctgctgtgcaaggaggagttcatcgagctgaaggacatcttcagcgtgaagctgaagagaagatgcagcgtgaagcagcagagaagcggcaccctgctgggcatcaccctgttcatctgcctgaagaaggagcagaacaagctgaagaacagcaccctggacctgatcaacctgagcgaggaccactgcgacatctggttcagacagttcaagaagatcctggccggcttccccaacagacccaagagcctgaagatcctgctgaacccccagagccacaagaaggaggccacccaggtgtactacgagaaggtggagcccctgctgaagctggccggcatcaagaccgacgtgaccatcatggagtacgagggccacgccctgagcctgctgaaggagtgcgagctgcagggcttcgacggcgtggtgtgcgtgggcggcgacggcagcgccagcgaggtggcccacgccctgctgctgagagcccagaagaacgccggcatggagaccgacagaatcctgacccccgtgagagcccagctgcccctgggcctgatccccgccggcagcaccaacgtgctggcccacagcctgcacggcgtgccccacgtgatcaccgccaccctgcacatcatcatgggccacgtgcagctggtggacgtgtgcaccttcagcaccgccggcaagctgctgagattcggcttcagcgccatgttcggcttcggcggcagaaccctggccctggccgagaagtacagatggatgagccccaaccagagaagagacttcgccgtggtgaaggccctggccaagctgaaggccgaggactgcgagatcagcttcctgcccttcaacagcagcgacgacgtgcaggagagaagagcccagggcagccccaagagcgactgcaacgaccagtggcagatgatccagggccagttcctgaacgtgagcatcatggccatcccctgcctgtgcagcgtggcccccagaggcctggcccccaacaccagactgaacaacggcagcatggccctgatcatcgccagaaacaccagcagacccgagttcatcaagcacctgaagagatacgccagcgtgaagaaccagttcaacttccccttcgtggagacctacaccgtggaggaggtgaaggtgcaccccagaaacaacaccggcggctacaaccccgaggaggaggaggacgagaccgccagcgagaactgcttcccctggaacgtggacggcgacctgatggaggtggccagcgaggtgcacatcagactgcaccccagactgatcagcctgtacggcggcagcatggaggagatgatccccaagtag

SEQ ID NO: 76312 - DNA, 1545 bp, synthetic construct
  misc_feature 1..1545: note = Description of Artificial Sequence: Synthetic coding sequence
  source 1..1545: mol_type = other DNA
atgccctggagaagaagaagaaacagagtgagcgccctggagggcggcagagaggaggaggccccccccgaggccgccgccgtgccccccgccctgctgaccagcccccagcagaccgaggccgccgccgagagaatcctgctgagaggcatcttcgagatcggcagagacagctgcgacgtggtgctgagcgagagagccctgagatggagacccatccagcccgagagacccgccggcgacagcaagtacgacctgctgtgcaaggaggagttcatcgagctgaaggacatcttcagcgtgaagctgaagagaagatgcagcgtgaagcagcagagaagcggcaccctgctgggcatcaccctgttcatctgcctgaagaaggagcagaacaagctgaagaacagcaccctggacctgatcaacctgagcgaggaccactgcgacatctggttcagacagttcaagaagatcctggccgtgatggagtacgagggccacgccctgagcctgctgaaggagtgcgagctgcagggcttcgacggcggccacagaaagcccctgttcgccatccactggagcgtgcagagactgttcaccggcatgcagaccctggagcccagcgtggtgtgcgtgggcggcgacggcagcgccagcgaggtggcccacgccctgctgctgagagcccagaagaacgccggcatggagaccgacagaatcctgacccccgtgagagcccagctgcccctgggcctgatccccgccggcagcaccaacgtgctggcccacagcctgcacggcgtgccccacgtgatcaccgccaccctgcacatcatcatgggccacgtgcagctggtggacgtgtgcaccttcagcaccgccggcaagctgctgagattcggcttcagcgccatgttcggcttcggcggcagaaccctggccctggccgagaagtacagatggatgagccccaaccagagaagagacttcgccgtggtgaaggccctggccaagctgaaggccgaggactgcgagatcagcttcctgcccttcaacagcagcgacgacgtgcaggagagaagagcccagggcagccccaagagcgactgcaacgaccagtggcagatgatccagggccagttcctgaacgtgagcatcatggccatcccctgcctgtgcagcgtggcccccagaggcctggcccccaacaccagactgaacaacggcagcatggccctgatcatcgccagaaacaccagcagacccgagttcatcaagcacctgaagagatacgccagcgtgaagaaccagttcaacttccccttcgtggagacctacaccgtggaggaggtgaaggtgcaccccagaaacaacaccggcggctacaaccccgaggaggaggaggacgagaccgccagcgagaactgcttcccctggaacgtggacggcgacctgatggaggtggccagcgaggtgcacatcagactgcaccccagactgatcagcctgtacggcggcagcatggaggagatgatccccaagtag

SEQ ID NO: 76313 - DNA, 804 bp, synthetic construct
  misc_feature 1..804: note = Description of Artificial Sequence: Synthetic coding sequence
  source 1..804: mol_type = other DNA
atgcacctgctgctgttccagctgctggtgctgctgcccctgggcaagaccaccagacaccaggacggcagacagaaccagagcagcctgagccccgtgctgctgcccagaaaccagagagagctgcccaccggcaaccacgaggaggccgaggagaagcccgacctgttcgtggccgtgccccacctggtggccaccagccccgccggcgagggccagagacagagagagaagatgctgagcagattcggcagattctggaagaagcccgagagagagatgcaccccagcagagacagcgacagcgagcccttcccccccggcacccagagcctgatccagcccatcgacggcatgaagatggagaagagccccctgagagaggaggccaagaagttctggcaccacttcatgttcagaaagacccccgccagccagggcgtgatcctgcccatcaagagccacgaggtgcactgggagacctgcagaaccgtgcccttcagccagaccatcacccacgagggctgcgagaaggtggtggtgcagaacaacctgtgcttcggcaagtgcggcagcgtgcacttccccggcgccgcccagcacagccacaccagctgcagccactgcctgcccgccaagttcaccaccatgcacctgcccctgaactgcaccgagctgagcagcgtgatcaaggtggtgatgctggtggaggagtgccagtgcaaggtgaagaccgagcacgaggacggccacatcctgcacgccggcagccaggacagcttcatccccggcgtgagcgcctag

SEQ ID NO: 76314 - DNA, 789 bp, synthetic construct
  misc_feature 1..789: note = Description of Artificial Sequence: Synthetic coding sequence
  source 1..789: mol_type = other DNA
atggcctggctggaggacgtggacttcctggaggacgtgcccctgctggaggacatccccctgctggaggacgtgcccctgctggaggacgtgcccctgctggaggacaccagcagactggaggacatcaacctgatggaggacatggccctgctggaggacgtggacctgctggaggacaccgacttcctggaggacctggacttcagcgaggccatggacctgagagaggacaaggacttcctggaggacatggacagcctggaggacatggccctgctggaggacgtggacctgctggaggacaccgacttcctggaggaccccgacttcctggaggccatcgacctgagagaggacaaggacttcctggaggacatggacagcctggaggacctggaggccatcggcagatgcggcttcagcggcagacacggcttcttcggcagaagaagattcagcggcagacccaagctgagcggcagactgggcctgctgggcagaagaggcttcagcggcagactgggcggctactggaagacctggatcttctggaagacctggatcttctggaagacctggatcttcagaaagacctacatcggctggaagacctggatcttcagcggcagatgcggcctgaccggcagacccggcttcggcggcagaagaagattcttctggaagaccctgaccgactggaagacctggatcagcttctggaagaccctgatcgactggaagacctggatcagcttctggaagaccctgatcgactggaagatctag

SEQ ID NO: 76315 - DNA, 1365 bp, synthetic construct
  misc_feature 1..1365: note = Description of Artificial Sequence: Synthetic coding sequence
  source 1..1365: mol_type = other DNA
atgctggccgagaacctggtggaggagttcgagatgaaggaggacgagccctggtacgaccaccaggacctgcagcaggacctgcagctggccgccgagctgggcaagaccctgctggacagaaacaccgagctggaggacagcgtgcagcagatgtacaccaccaaccaggagcagctgcaggagatcgagtacctgaccaagcaggtggagctgctgagacagatgaacgagcagcacgccaaggtgtacgagcagctggacgtgaccgccagagagctggaggagaccaaccagaagctggtggccgacagcaaggccagccagcagaagatcctgagcctgaccgagaccatcgagtgcctgcagaccaacatcgaccacctgcagagccaggtggaggagctgaagagcagcggccagggcagaagaagccccggcaagtgcgaccaggagaagcccgcccccagcttcgcctgcctgaaggagctgtacgacctgagacagcacttcgtgtacgaccacgtgttcgccgagaagatcaccagcctgcagggccagcccagccccgacgaggaggagaacgagcacctgaagaagaccgtgaccatgctgcaggcccagctgagcctggagagacagaagagagtgaccatggaggaggagtacggcctggtgctgaaggagaacagcgagctggagcagcagctgggcgccaccggcgcctacagagccagagccctggagctggaggccgaggtggccgagatgagacagatgctgcagagcgagcaccccttcgtgaacggcgtggagaagctggtgcccgacagcctgtacgtgcccttcaaggagcccagccagagcctgctggaggagatgttcctgaccgtgcccgagagccacagaaagcccctgaagagaagcagcagcgagaccatcctgagcagcctggccggcagcgacatcgtgaagggccacgaggagacctgcatcagaagagccaaggccgtgaagcagagaggcatcagcctgctgcacgaggtggacacccagtacagcgccctgaaggtgaagtacgaggagctgctgaagaagtgccaggaggagcaggacagcctgagccacaaggccgtgcagaccagcagagccgccgccaaggacctgaccggcgtgaacgcccagagcgagcccgtggccagcggctgggagctggccagcgtgaaccccgagcccgtgagcagccccaccaccccccccgagtacaaggccctgttcaaggagatcttcagctgcatcaagaagaccaagcaggagatcgacgagcagagaaccaagtacagaagcctgagcagccacagctag

SEQ ID NO: 76316 - DNA, 618 bp, synthetic construct
  misc_feature 1..618: note = Description of Artificial Sequence: Synthetic coding sequence
  source 1..618: mol_type = other DNA
atgctgggcgccaagccccactggctgcccggccccctgcacagccccggcctgcccctggtgctggtgctgctggccctgggcgccggctgggcccaggagggcagcgagcccgtgctgctggagggcgagtgcctggtggtgtgcgagcccggcagagccgccgccggcggccccggcggcgccgccctgggcgaggccccccccggcagagtggccttcgccgccgtgagaagccaccaccacgagcccgccggcgagaccggcaacggcaccagcggcgccatctacttcgaccaggtgctggtgaacgagggcggcggcttcgacagagccagcggcagcttcgtggcccccgtgagaggcgtgtacagcttcagattccacgtggtgaaggtgtacaacagacagaccgtgcaggtgagcctgatgctgaacacctggcccgtgatcagcgccttcgccaacgaccccgacgtgaccagagaggccgccaccagcagcgtgctgctgcccctggaccccggcgacagagtgagcctgagactgagaagaggcaacctgctgggcggctggaagtacagcagcttcagcggcttcctgatcttccccctgtag

SEQ ID NO: 76317 - DNA, 990 bp, synthetic construct
  misc_feature 1..990: note = Description of Artificial Sequence: Synthetic coding sequence
  source 1..990: mol_type = other DNA
atgatcctgatgaagatgggcttcagcggcatcgtggtgcaccaggagagcgtgtgcgccacctacggcagcggcctgagcagcacctgcatcgtggacgtgggcgaccagaagaccagcgtgtgctgcgtggaggacggcgtgagccacagaaacaccagaatcttcagctggaaccaggacatcagcggcctgcaggaccacgagttccagatcagacaccccgacagccccgccctgctgtaccagttcagactgggcgacgagaagctgcaggcccccatggccctgttctaccccgccaccttcggcatcgtgggccagaagatgaccaccctgcagcacagaagccagggcgaccccgaggacccccacgacgagcactacctgctggccacccagagcaagcaggagcagagcgccaaggccaccgccgacagaaagagcgccagcaagcccatcggcttcgagggcgacctgagaggccagagcagcgacctgcccgagagactgcacagccaggaggtggacctgggcagcgcccagggcgacggcctgatggccggcaacgacagcgaggaggccctgaccgccctgatgagcagaaagaccgccatcagcctgttcgagggcaaggccctgggcctggacaaggccatcctgcacagcatcgactgctgcagcagcgacgacaccaagaagaagatgtacagcagcatcctggtggtgggcggcggcctgatgttccacaaggcccaggagttcctgcagcacagaatcctgaacaagatgccccccagcttcagaagaatcatcgagaacgtggacgtgatcaccagacccaaggacatggaccccagactgatcgcctggaagggcggcgccgtgctggcctgcctggacaccacccaggagctgtggatctaccagagagagtggcagagattcggcgtgagaatgctgagagagagagccgccttcgtgtggtag

SEQ ID NO: 76318 - DNA, 1131 bp, synthetic construct
  misc_feature 1..1131: note = Description of Artificial Sequence: Synthetic coding sequence
  source 1..1131: mol_type = other DNA
atggaggagttccacggcagaaccctgcacgacgacgacagctgccaggtgatccccgtgctgccccaggtgatgatgatcctgatccccggccagaccctgcccctgcagctgttccacccccaggaggtgagcatggtgagaaacctgatccagaaggacagaaccttcgccgtgctggcctacagcaacgtgcaggagagagaggcccagttcggcaccaccgccgagatctacgcctacagagaggagcaggacttcggcatcgagatcgtgaaggtgaaggccatcggcagacagagattcaaggtgctggagctgagaacccagagcgacggcatccagcaggccaaggtgcagatcctgcccgagtgcgtgctgcccagcaccatgagcgccgtgcagctggagagcctgaacaagtgccagatcttccccagcaagcccgtgagcagagaggaccagtgcagctacaagtggtggcagaagtaccagaagagaaagttccactgcgccaacctgaccagctggcccagatggctgtacagcctgtacgacgccgagaccctgatggacagaatcaagaagcagctgagagagtgggacgagaacctgaaggacgacagcctgcccagcaacttcagctacagagtggccgcctgcctgcccatcgacgacgtgctgagaatccagctgctgaagatcggcagcgccatccagagactgagatgcgagctggacatcatgaacaagtgcaccagcctgtgctgcaagcagtgccaggagaccgagatcaccaccaagaacgagatcttcagcctgagcctgtgcggccccatggccgcctacgtgaacccccacggctacgtgcacgagaccctgaccgtgtacaaggcctgcaacctgaacctgatcggcagacccagcaccgagcacagctggttccccggctacgcctggaccgtggcccagtgcaagatctgcgccagccacatcggctggaagttcaccgccaccaagaaggacatgagcccccagaagttctggggcctgaccagaagcgccctgctgcccaccatccccgacaccgaggacgagatcagccccgacaaggtgatcctgtgcctgtag

SEQ ID NO: 76319 - DNA, 1326 bp, synthetic construct
  misc_feature 1..1326: note = Description of Artificial Sequence: Synthetic coding sequence
  source 1..1326: mol_type = other DNA
atggccggcgagggcgaccagcaggacgccgcccacaacatgggcaaccacctgcccctgctgcccgagagcgaggaggaggacgagatggaggtggaggaccaggacagcaaggaggccaagaagcccaacatcatcaacttcgacaccagcctgcccaccagccacacctacctgggcgccgacatggaggagttccacggcagaaccctgcacgacgacgacagctgccaggtgatccccgtgctgccccaggtgatgatgatcctgatccccggccagaccctgcccctgcagctgttccacccccaggaggtgagcatggtgagaaacctgatccagaaggacagaaccttcgccgtgctggcctacagcaacgtgcaggagagagaggcccagttcggcaccaccgccgagatctacgcctacagagaggagcaggacttcggcatcgagatcgtgaaggtgaaggccatcggcagacagagattcaaggtgctggagctgagaacccagagcgacggcatccagcaggccaaggtgcagatcctgcccgagtgcgtgctgcccagcaccatgagcgccgtgcagctggagagcctgaacaagtgccagatcttccccagcaagcccgtgagcagagaggaccagtgcagctacaagtggtggcagaagtaccagaagagaaagttccactgcgccaacctgaccagctggcccagatggctgtacagcctgtacgacgccgagaccctgatggacagaatcaagaagcagctgagagagtgggacgagaacctgaaggacgacagcctgcccagcaaccccatcgacttcagctacagagtggccgcctgcctgcccatcgacgacgtgctgagaatccagctgctgaagatcggcagcgccatccagagactgagatgcgagctggacatcatgaacaagtgcaccagcctgtgctgcaagcagtgccaggagaccgagatcaccaccaagaacgagatcttcagcctgagcctgtgcggccccatggccgcctacgtgaacccccacggctacgtgcacgagaccctgaccgtgtacaaggcctgcaacctgaacctgatcggcagacccagcaccgagcacagctggttccccggctacgcctggaccgtggcccagtgcaagatctgcgccagccacatcggctggaagttcaccgccaccaagaaggacatgagcccccagaagttctggggcctgaccagaagcgccctgctgcccaccatccccgacaccgaggacgagatcagccccgacaaggtgatcctgtgcctgtag

SEQ ID NO: 76320 - DNA, 1335 bp, synthetic construct
  misc_feature 1..1335: note = Description of Artificial Sequence: Synthetic coding sequence
  source 1..1335: mol_type = other DNA
atggaggaggagggcaagaagggcaagaagcccggcatcgtgagccccttcaagagagtgttcctgaagggcgagaagagcagagacaagaaggcccacgagaaggtgaccgagagaagacccctgcacaccgtggtgctgagcctgcccgagagagtggagcccgacagactgctgagcgactacatcgagaaggaggtgaagtacctgggccagctgaccagcatccccggctacctgaaccccagcagcagaaccgagatcctgcacttcatcgacaacgccaagagagcccaccagctgcccggccacctgacccaggagcacgacgccgtgctgagcctgagcgcctacaacgtgaagctggcctggagagacggcgaggacatcatcctgagagtgcccatccacgacatcgccgccgtgagctacgtgagagacgacgccgcccacctggtggtgctgaagaccgcccaggaccccggcatcagccccagccagagcctgtgcgccgagagcagcagaggcctgagcgccggcagcctgagcgagagcgccgtgggccccgtggaggcctgctgcctggtgatcctggccgccgagagcaaggtggccgccgaggagctgtgctgcctgctgggccaggtgttccaggtggtgtacaccgagagcaccatcgacttcctggacagagccatcttcgacggcgccagcacccccacccaccacctgagcctgcacagcgacgacagcagcaccaaggtggacatcaaggagacctacgaggtggaggccagcaccttctgcttccccgagagcgtggacgtgggcggcgccagcccccacagcaagaccatcagcgagagcgagctgagcgccagcgccaccgagctgctgcaggactacatgctgaccctgagaaccaagctgagcagccaggagatccagcagttcgccgccctgctgcacgagtacagaaacggcgccagcatccacgagttctgcatcaacctgagacagctgtacggcgacagcagaaagttcctgctgctgggcctgagacccttcatccccgagaaggacagccagcacttcgagaacttcctggagaccatcggcgtgaaggacggcagaggcatcatcaccgacagcttcggcagacacagaagagccctgagcaccaccagcagcagcaccaccaacggcaacagagccaccggcagcagcgacgacagaagcgcccccagcgagggcgacgagtgggacagaatgatcagcgacatcagcagcgacatcgaggccctgggctgcagcatggaccaggacagcgcctag

SEQ ID NO: 76321 - DNA, 1398 bp, synthetic construct
  misc_feature 1..1398: note = Description of Artificial Sequence: Synthetic coding sequence
  source 1..1398: mol_type = other DNA
atgcacagcagctgcagacagagaagaaaccagaacctgagcaaggagatcccccagaccgagttccacaccggctacagcatggagaacgagcccggcatcgtgagccccttcaagagagtgttcctgaagggcgagaagagcagagacaagaaggcccacgagaaggtgaccgagagaagacccctgcacaccgtggtgctgagcctgcccgagagagtggagcccgacagactgctgagcgactacatcgagaaggaggtgaagtacctgggccagctgaccagcatccccggctacctgaaccccagcagcagaaccgagatcctgcacttcatcgacaacgccaagagagcccaccagctgcccggccacctgacccaggagcacgacgccgtgctgagcctgagcgcctacaacgtgaagctggcctggagagacggcgaggacatcatcctgagagtgcccatccacgacatcgccgccgtgagctacgtgagagacgacgccgcccacctggtggtgctgaagaccgcccaggaccccggcatcagccccagccagagcctgtgcgccgagagcagcagaggcctgagcgccggcagcctgagcgagagcgccgtgggccccgtggaggcctgctgcctggtgatcctggccgccgagagcaaggtggccgccgaggagctgtgctgcctgctgggccaggtgttccaggtggtgtacaccgagagcaccatcgacttcctggacagagccatcttcgacggcgccagcacccccacccaccacctgagcctgcacagcgacgacagcagcaccaaggtggacatcaaggagacctacgaggtggaggccagcaccttctgcttccccgagagcgtggacgtgggcggcgccagcccccacagcaagaccatcagcgagagcgagctgagcgccagcgccaccgagctgctgcaggactacatgctgaccctgagaaccaagctgagcagccaggagatccagcagttcgccgccctgctgcacgagtacagaaacggcgccagcatccacgagttctgcatcaacctgagacagctgtacggcgacagcagaaagttcctgctgctgggcctgagacccttcatccccgagaaggacagccagcacttcgagaacttcctggagaccatcggcgtgaaggacggcagaggcatcatcaccgacagcttcggcagacacagaagagccctgagcaccaccagcagcagcaccaccaacggcaacagagccaccggcagcagcgacgacagaagcgcccccagcgagggcgacgagtgggacagaatgatcagcgacatcagcagcgacatcgaggccctgggctgcagcatggaccaggacagcgcctag

SEQ ID NO: 76322 - DNA, 1317 bp, synthetic construct
  misc_feature 1..1317: note = Description of Artificial Sequence: Synthetic coding sequence
  source 1..1317: mol_type = other DNA
atggagaacgagcccggcatcgtgagccccttcaagagagtgttcctgaagggcgagaagagcagagacaagaaggcccacgagaaggtgaccgagagaagacccctgcacaccgtggtgctgagcctgcccgagagagtggagcccgacagactgctgagcgactacatcgagaaggaggtgaagtacctgggccagctgaccagcatccccggctacctgaaccccagcagcagaaccgagatcctgcacttcatcgacaacgccaagagagcccaccagctgcccggccacctgacccaggagcacgacgccgtgctgagcctgagcgcctacaacgtgaagctggcctggagagacggcgaggacatcatcctgagagtgcccatccacgacatcgccgccgtgagctacgtgagagacgacgccgcccacctggtggtgctgaagaccgcccaggaccccggcatcagccccagccagagcctgtgcgccgagagcagcagaggcctgagcgccggcagcctgagcgagagcgccgtgggccccgtggaggcctgctgcctggtgatcctggccgccgagagcaaggtggccgccgaggagctgtgctgcctgctgggccaggtgttccaggtggtgtacaccgagagcaccatcgacttcctggacagagccatcttcgacggcgccagcacccccacccaccacctgagcctgcacagcgacgacagcagcaccaaggtggacatcaaggagacctacgaggtggaggccagcaccttctgcttccccgagagcgtggacgtgggcggcgccagcccccacagcaagaccatcagcgagagcgagctgagcgccagcgccaccgagctgctgcaggactacatgctgaccctgagaaccaagctgagcagccaggagatccagcagttcgccgccctgctgcacgagtacagaaacggcgccagcatccacgagttctgcatcaacctgagacagctgtacggcgacagcagaaagttcctgctgctgggcctgagacccttcatccccgagaaggacagccagcacttcgagaacttcctggagaccatcggcgtgaaggacggcagaggcatcatcaccgacagcttcggcagacacagaagagccctgagcaccaccagcagcagcaccaccaacggcaacagagccaccggcagcagcgacgacagaagcgcccccagcgagggcgacgagtgggacagaatgatcagcgacatcagcagcgacatcgaggccctgggctgcagcatggaccaggacagcgcctag

SEQ ID NO: 76323 - DNA, 1161 bp, synthetic construct
  misc_feature 1..1161: note = Description of Artificial Sequence: Synthetic coding sequence
  source 1..1161: mol_type = other DNA
atggaggaggagggcaagaagggcaagaagtacctgggccagctgaccagcatccccggctacctgaaccccagcagcagaaccgagatcctgcacttcatcgacaacgccaagagagcccaccagctgcccggccacctgacccaggagcacgacgccgtgctgagcctgagcgcctacaacgtgaagctggcctggagagacggcgaggacatcatcctgagagtgcccatccacgacatcgccgccgtgagctacgtgagagacgacgccgcccacctggtggtgctgaagaccgcccaggaccccggcatcagccccagccagagcctgtgcgccgagagcagcagaggcctgagcgccggcagcctgagcgagagcgccgtgggccccgtggaggcctgctgcctggtgatcctggccgccgagagcaaggtggccgccgaggagctgtgctgcctgctgggccaggtgttccaggtggtgtacaccgagagcaccatcgacttcctggacagagccatcttcgacggcgccagcacccccacccaccacctgagcctgcacagcgacgacagcagcaccaaggtggacatcaaggagacctacgaggtggaggccagcaccttctgcttccccgagagcgtggacgtgggcggcgccagcccccacagcaagaccatcagcgagagcgagctgagcgccagcgccaccgagctgctgcaggactacatgctgaccctgagaaccaagctgagcagccaggagatccagcagttcgccgccctgctgcacgagtacagaaacggcgccagcatccacgagttctgcatcaacctgagacagctgtacggcgacagcagaaagttcctgctgctgggcctgagacccttcatccccgagaaggacagccagcacttcgagaacttcctggagaccatcggcgtgaaggacggcagaggcatcatcaccgacagcttcggcagacacagaagagccctgagcaccaccagcagcagcaccaccaacggcaacagagccaccggcagcagcgacgacagaagcgcccccagcgagggcgacgagtgggacagaatgatcagcgacatcagcagcgacatcgaggccctgggctgcagcatggaccaggacagcgcctag

SEQ ID NO: 76324 - DNA, 216 bp, synthetic construct
  misc_feature 1..216: note = Description of Artificial Sequence: Synthetic coding sequence
  source 1..216: mol_type = other DNA
atggaggaggagggcaagaagggcaagaagcccggcatcgtgagccccttcaagagagtgttcctgaagggcgagaagagcagagacaagaaggcccacgagaaggtgaccgagagaagacccctgcacaccgtggtgctgagcctgcccgagagagtggagcccgacagactgctgagcgactacatcgagaaggaggtgaagggcagccactag

SEQ ID NO: 76325 - DNA, 1062 bp, synthetic construct
  misc_feature 1..1062: note = Description of Artificial Sequence: Synthetic coding sequence
  source 1..1062: mol_type = other DNA
atggaggaggagggcaagaagggcaagaagcccggcatcgtgagccccttcaagagagtgttcctgaagggcgagaagagcagagacaagaaggcccacgagaaggtgaccgagagaagacccctgcacaccgtggtgctgagcctgcccgagagagtggagcccgacagactgctgagcgactacatcgagaaggaggtgaagtacctgggccagctgaccagcatccccggctacctgaaccccagcagcagaaccgagatcctgcacttcatcgacaacgccaagagagcccaccagctgcccggccacctgacccaggagcacgacgccgtgctgagcctgagcgcctacaacgtgaagctggcctggagagacggcgaggacatcatcctgagagtgcccatccacgacatcgccgccgtgagctacgtgagagacgacgccgcccacctggtggtgctgaagaccgacgacagcagcaccaaggtggacatcaaggagacctacgaggtggaggccagcaccttctgcttccccgagagcgtggacgtgggcggcgccagcccccacagcaagaccatcagcgagagcgagctgagcgccagcgccaccgagctgctgcaggactacatgctgaccctgagaaccaagctgagcagccaggagatccagcagttcgccgccctgctgcacgagtacagaaacggcgccagcatccacgagttctgcatcaacctgagacagctgtacggcgacagcagaaagttcctgctgctgggcctgagacccttcatccccgagaaggacagccagcacttcgagaacttcctggagaccatcggcgtgaaggacggcagaggcatcatcaccgacagcttcggcagacacagaagagccctgagcaccaccagcagcagcaccaccaacggcaacagagccaccggcagcagcgacgacagaagcgcccccagcgagggcgacgagtgggacagaatgatcagcgacatcagcagcgacatcgaggccctgggctgcagcatggaccaggacagcgcctag

SEQ ID NO: 76326 - DNA, 1224 bp, synthetic construct
  misc_feature 1..1224: note = Description of Artificial Sequence: Synthetic coding sequence
  source 1..1224: mol_type = other DNA
atgagaagaaacctgagactgggccccagcagcggcgccgacgcccagggccagggcgcccccagacccggcctggccgcccccagaatgctgctgccccccgccagccaggccagcagaggcagcggcagcaccggctgcagcctgatggcccaggaggtggacaccgcccagggcgccgagatgagaagaggcgccggcgccgccagaggcagagccagctggtgctgggccctggccctgctgtggctggccgtggtgcccggctggagcagagtgagcggcatccccagcagaagacactggcccgtgccctacaagagattcgacttcagacccaagcccgacccctactgccaggccaagtacaccttctgccccaccggcagccccatccccgtgatggagggcgacgacgacatcgaggtgttcagactgcaggcccccgtgtgggagttcaagtacggcgacctgctgggccacctgaagatcatgcacgacgccatcggcttcagaagcaccctgaccggcaagaactacaccatggagtggtacgagctgttccagctgggcaactgcaccttcccccacctgagacccgagatggacgcccccttctggtgcaaccagggcgccgcctgcttcttcgagggcatcgacgacgtgcactggaaggagaacggcaccctggtgcaggtggccaccatcagcggcaacatgttcaaccagatggccaagtgggtgaagcaggacaacgagaccggcatctactacgagacctggaacgtgaaggccagccccgagaagggcgccgagacctggttcgacagctacgactgcagcaagttcgtgctgagaaccttcaacaagctggccgagttcggcgccgagttcaagaacatcgagaccaactacaccagaatcttcctgtacagcggcgagcccacctacctgggcaacgagaccagcgtgttcggccccaccggcaacaagaccctgggcctggccatcaagagattctactaccccttcaagccccacctgcccaccaaggagttcctgctgagcctgctgcagatcttcgacgccgtgatcgtgcacaagcagttctacctgttctacaacttcgagtactggttcctgcccatgaagttccccttcatcaagatcacctacgaggagatccccctgcccatcagaaacaagaccctgagcggcctgtag

SEQ ID NO: 76327 - DNA, 822 bp, synthetic construct
  misc_feature 1..822: note = Description of Artificial Sequence: Synthetic coding sequence
  source 1..822: mol_type = other DNA
atggagggcgacgacgacatcgaggtgttcagactgcaggcccccgtgtgggagttcaagtacggcgacctgctgggccacctgaagatcatgcacgacgccatcggcttcagaagcaccctgaccggcaagaactacaccatggagtggtacgagctgttccagctgggcaactgcaccttcccccacctgagacccgagatggacgcccccttctggtgcaaccagggcgccgcctgcttcttcgagggcatcgacgacgtgcactggaaggagaacggcaccctggtgcaggtggccaccatcagcggcaacatgttcaaccagatggccaagtgggtgaagcaggacaacgagaccggcatctactacgagacctggaacgtgaaggccagccccgagaagggcgccgagacctggttcgacagctacgactgcagcaagttcgtgctgagaaccttcaacaagctggccgagttcggcgccgagttcaagaacatcgagaccaactacaccagaatcttcctgtacagcggcgagcccacctacctgggcaacgagaccagcgtgttcggccccaccggcaacaagaccctgggcctggccatcaagagattctactaccccttcaagccccacctgcccaccaaggagttcctgctgagcctgctgcagatcttcgacgccgtgatcgtgcacaagcagttctacctgttctacaacttcgagtactggttcctgcccatgaagttccccttcatcaagatcacctacgaggagatccccctgcccatcagaaacaagaccctgagcggcctgtag

SEQ ID NO: 76328 - DNA, 1077 bp, synthetic construct
  misc_feature 1..1077: note = Description of Artificial Sequence: Synthetic coding sequence
  source 1..1077: mol_type = other DNA
atggcccaggaggtggacaccgcccagggcgccgagatgagaagaggcgccggcgccgccagaggcagagccagctggtgctgggccctggccctgctgtggctggccgtggtgcccggctggagcagagtgagcggcatccccagcagaagacactggcccgtgccctacaagagattcgacttcagacccaagcccgacccctactgccaggccaagtacaccttctgccccaccggcagccccatccccgtgatggagggcgacgacgacatcgaggtgttcagactgcaggcccccgtgtgggagttcaagtacggcgacctgctgggccacctgaagatcatgcacgacgccatcggcttcagaagcaccctgaccggcaagaactacaccatggagtggtacgagctgttccagctgggcaactgcaccttcccccacctgagacccgagatggacgcccccttctggtgcaaccagggcgccgcctgcttcttcgagggcatcgacgacgtgcactggaaggagaacggcaccctggtgcaggtggccaccatcagcggcaacatgttcaaccagatggccaagtgggtgaagcaggacaacgagaccggcatctactacgagacctggaacgtgaaggccagccccgagaagggcgccgagacctggttcgacagctacgactgcagcaagttcgtgctgagaaccttcaacaagctggccgagttcggcgccgagttcaagaacatcgagaccaactacaccagaatcttcctgtacagcggcgagcccacctacctgggcaacgagaccagcgtgttcggccccaccggcaacaagaccctgggcctggccatcaagagattctactaccccttcaagccccacctgcccaccaaggagttcctgctgagcctgctgcagatcttcgacgccgtgatcgtgcacaagcagttctacctgttctacaacttcgagtactggttcctgcccatgaagttccccttcatcaagatcacctacgaggagatccccctgcccatcagaaacaagaccctgagcggcctgtag

SEQ ID NO: 76329 - DNA, 936 bp, synthetic construct
  misc_feature 1..936: note = Description of Artificial Sequence: Synthetic coding sequence
  source 1..936: mol_type = other DNA
atggaggccaccagaagaagacagcacctgggcgccaccggcggccccggcgcccagctgggcgccagcttcctgcaggccagacacggcagcgtgagcgccgacgaggccgccagaaccgcccccttccacctggacctgtggttctacttcaccctgcagaactgggtgctggacttcggcagacccatcgccatgctggtgttccccctggagtggttccccctgaacaagcccagcgtgggcgactacttccacatggcctacaacgtgatcacccccttcctgctgctgaagctgatcgagagaagccccagaaccctgcccagaagcatcacctacgtgagcatcatcatcttcatcatgggcgccagcatccacctggtgggcgacagcgtgaaccacagactgctgttcagcggctaccagcaccacctgagcgtgagagagaaccccatcatcaagaacctgaagcccgagaccctgatcgacagcttcgagctgctgtactactacgacgagtacctgggccactgcatgtggtacatccccttcttcctgatcctgttcatgtacttcagcggctgcttcaccgccagcaaggccgagagcctgatccccggccccgccctgctgctggtggcccccagcggcctgtactactggtacctggtgaccgagggccagatcttcatcctgttcatcttcaccttcttcgccatgctggccctggtgctgcaccagaagagaaagagactgttcctggacagcaacggcctgttcctgttcagcagcttcgccctgaccctgctgctggtggccctgtgggtggcctggctgtggaacgaccccgtgctgagaaagaagtaccccggcgtgatctacgtgcccgagccctgggccttctacaccctgcacgtgagcagcagacactag

SEQ ID NO: 76330 - DNA, 549 bp, synthetic construct
  misc_feature 1..549: note = Description of Artificial Sequence: Synthetic coding sequence
  source 1..549: mol_type = other DNA
atgagactgcccgccagactgcccagcaccagcaccagcggcagcaccagccactgcagaaccggcttctggaccctgggcgtgcccctgccctgctggtacagcctgagcagcggcttccacagcaccagccccgtgctgggcaccaccagcacctggcccaccaccagcagcagacccttcagctgcagcagcggctgcttcaccgccagcaaggccgagagcctgatccccggccccgccctgctgctggtggcccccagcggcctgtactactggtacctggtgaccgagggccagatcttcatcctgttcatcttcaccttcttcgccatgctggccctggtgctgcaccagaagagaaagagactgttcctggacagcaacggcctgttcctgttcagcagcttcgccctgaccctgctgctggtggccctgtgggtggcctggctgtggaacgaccccgtgctgagaaagaagtaccccggcgtgatctacgtgcccgagccctgggccttctacaccctgcacgtgagcagcagacactag

SEQ ID NO: 76331 - DNA, 1032 bp, synthetic construct
  misc_feature 1..1032: note = Description of Artificial Sequence: Synthetic coding sequence
  source 1..1032: mol_type = other DNA
atggccgccgtggccggcaaggagagaagagccagaggcagacccagacccgagaccctgggcgccatccccagaagagagggcggcgaggccggcctgagcagagccttcaagcccctggcccaggcccccctgagctgcgagaccagcctgagaaagctgaagttcaagggcaagaagcacggcagcgtgagcgccgacgaggccgccagaaccgcccccttccacctggacctgtggttctacttcaccctgcagaactgggtgctggacttcggcagacccatcgccatgctggtgttccccctggagtggttccccctgaacaagcccagcgtgggcgactacttccacatggcctacaacgtgatcacccccttcctgctgctgaagctgatcgagagaagccccagaaccctgcccagaagcatcacctacgtgagcatcatcatcttcatcatgggcgccagcatccacctggtgggcgacagcgtgaaccacagactgctgttcagcggctaccagcaccacctgagcgtgagagagaaccccatcatcaagaacctgaagcccgagaccctgatcgacagcttcgagctgctgtactactacgacgagtacctgggccactgcatgtggtacatccccttcttcctgatcctgttcatgtacttcagcggctgcttcaccgccagcaaggccgagagcctgatccccggccccgccctgctgctggtggcccccagcggcctgtactactggtacctggtgaccgagggccagatcttcatcctgttcatcttcaccttcttcgccatgctggccctggtgctgcaccagaagagaaagagactgttcctggacagcaacggcctgttcctgttcagcagcttcgccctgaccctgctgctggtggccctgtgggtggcctggctgtggaacgaccccgtgctgagaaagaagtaccccggcgtgatctacgtgcccgagccctgggccttctacaccctgcacgtgagcagcagacactag

SEQ ID NO: 76332 - DNA, 861 bp, synthetic construct
  misc_feature 1..861: note = Description of Artificial Sequence: Synthetic coding sequence
  source 1..861: mol_type = other DNA
atgaaccccgccagcgacggcggcaccagcgagagcatcttcgacctggactacgccagctggggcatcagaagcaccctgatggtggccggcttcgtgttctacctgggcgtgttcgtggtgtgccaccagctgagcagcagcctgaacgccacctacagaagcctggtggccagagagaaggtgttctgggacctggccgccaccagagccgtgttcggcgtgcagagcaccgccgccggcctgtgggccctgctgggcgaccccgtgctgcacgccgacaaggccagaggccagcagaactggtgctggttccacatcaccaccgccaccggcttcttctgcttcgagaacgtggccgtgcacctgagcaacctgatcttcagaaccttcgacctgttcctggtgatccaccacctgttcgccttcctgggcttcctgggctgcctggtgaacctgcaggccggccactacctggccatgaccaccctgctgctggagatgagcacccccttcacctgcgtgagctggatgctgctgaaggccggctggagcgagagcctgttctggaagctgaaccagtggctgatgatccacatgttccactgcagaatggtgctgacctaccacatgtggtgggtgtgcttctggcactgggacggcctggtgagcagcctgtacctgccccacctgaccctgttcctggtgggcctggccctgctgaccctgatcatcaacccctactggacccacaagaagacccagcagctgctgaaccccgtggactggaacttcgcccagcccgaggccaagagcagacccgagggcaacggccagctgctgagaaagaagagaccctag

SEQ ID NO: 76333 - DNA, 1065 bp, synthetic construct
  misc_feature 1..1065: note = Description of Artificial Sequence: Synthetic coding sequence
  source 1..1065: mol_type = other DNA
atgtacagagagtgggtggtggtgaacgtgttcatgatgctgtacgtgcagctggtgcagggcagcagcaacgagcacggccccgtgaagagaagcagccagagcaccctggagagaagcgagcagcagatcagagccgccagcagcctggaggagctgctgagaatcacccacagcgaggactggaagctgtggagatgcagactgagactgaagagcttcaccagcatggacagcagaagcgccagccacagaagcaccagattcgccgccaccttctacgacatcgagaccctgaaggtgatcgacgaggagtggcagagaacccagtgcagccccagagagacctgcgtggaggtggccagcgagctgggcaagagcaccaacaccttcttcaagcccccctgcgtgaacgtgttcagatgcggcggctgctgcaacgaggagagcctgatctgcatgaacaccagcaccagctacatcagcaagcagctgttcgagatcagcgtgcccctgaccagcgtgcccgagctggtgcccgtgaaggtggccaaccacaccggctgcaagtgcctgcccaccgcccccagacacccctacagcatcatcagaagaagcatccagatccccgaggaggacagatgcagccacagcaagaagctgtgccccatcgacatgctgtgggacagcaacaagtgcaagtgcgtgctgcaggaggagaaccccctggccggcaccgaggaccacagccacctgcaggagcccgccctgtgcggcccccacatgatgttcgacgaggacagatgcgagtgcgtgtgcaagaccccctgccccaaggacctgatccagcaccccaagaactgcagctgcttcgagtgcaaggagagcctggagacctgctgccagaagcacaagctgttccaccccgacacctgcagctgcgaggacagatgccccttccacaccagaccctgcgccagcggcaagaccgcctgcgccaagcactgcagattccccaaggagaagagagccgcccagggcccccacagcagaaagaacccctag

SEQ ID NO: 76334 - DNA, 504 bp, synthetic construct
  misc_feature 1..504: note = Description of Artificial Sequence: Synthetic coding sequence
  source 1..504: mol_type = other DNA
atggagagattcgtggtgaccgccccccccgccagaaacagaagcaagaccgccctgtacgtgacccccctggacagagtgaccgagttcggcggcgagctgcacgaggacggcggcaagctgttctgcaccagctgcaacgtggtgctgaaccacgtgagaaagagcgccatcagcgaccacctgaagagcaagacccacaccaagagaaaggccgagttcgaggagcagaacgtgagaaagaagcagagacccctgaccgccagcctgcagtgcaacagcaccgcccagaccgagaaggtgagcgtgatccaggacttcgtgaagatgtgcctggaggccaacatccccctggagaaggccgaccaccccgccgtgagagccttcctgagcagacacgtgaagaacggcggcagcatccccaagagcgaccagctgagaagagcctacctgcccgacggctacgagaacgagaaccagctgctgaacagccaggactgctag

SEQ ID NO: 76335 - DNA, 504 bp, synthetic construct; identical to SEQ ID NO: 76334
  misc_feature 1..504: note = Description of Artificial Sequence: Synthetic coding sequence
  source 1..504: mol_type = other DNA

SEQ ID NO: 76336 - DNA, 504 bp, synthetic construct; identical to SEQ ID NO: 76334
  misc_feature 1..504: note = Description of Artificial Sequence: Synthetic coding sequence
  source 1..504: mol_type = other DNA

SEQ ID NO: 76337 - DNA, 321 bp, synthetic construct
  misc_feature 1..321: note = Description of Artificial Sequence: Synthetic coding sequence
  source 1..321: mol_type = other DNA
atggagagattcgtggtgaccgccccccccgccagaaacagaagcaagaccgccctgtacgtgacccccctggacagagtgaccgagttcggcggcgagctgcacgaggacggcggcaagctgttctgcaccagctgcaacgtggtgctgaaccacgtgagaaagagcgccatcagcgaccacctgaagagcaagacccacaccaagagaaaggccgagttcgaggagcagaacgtgagaaagaagcagagacccctgaccgccagcctgcagtgcaacagcaccgcccagaccgagaaggtgagcgtgatccaggactag

SEQ ID NO: 76338 - DNA, 504 bp, synthetic construct; identical to SEQ ID NO: 76334
  misc_feature 1..504: note = Description of Artificial Sequence: Synthetic coding sequence
  source 1..504: mol_type = other DNA

SEQ ID NO: 76339 - DNA, 1608 bp, synthetic construct
  misc_feature 1..1608: note = Description of Artificial Sequence: Synthetic coding sequence
  source 1..1608: mol_type = other DNA
atggccagcctgagcctggcccccgtgaacatcttcaaggccggcgccgacgaggagagagccgagaccgccagactgaccagcttcatcggcgccatcgccatcggcgacctggtgaagagcaccctgggccccaagggcatggacaagatcctgctgagcagcggcagagacgccagcctgatggtgaccaacgacggcgccaccatcctgaagaacatcggcgtggacaaccccgccgccaaggtgctggtggacatgagcagagtgcaggacgacgaggtgggcgacggcaccaccagcgtgaccgtgctggccgccgagctgctgagagaggccgagagcctgatcgccaagaagatccacccccagaccatcatcgccggctggagagaggccaccaaggccgccagagaggccctgctgagcagcgccgtggaccacggcagcgacgaggtgaagttcagacaggacctgatgaacatcgccggcaccaccctgagcagcaagctgctgacccaccacaaggaccacttcaccaagctggccgtggaggccgtgctgagactgaagggcagcggcaacctggaggccatccacatcatcaagaagctgggcggcagcctggccgacagctacctggacgagggcttcctgctggacaagaagatcggcgtgaaccagcccaagagaatcgagaacgccaagatcctgatcgccaacaccggcatggacaccgacaagatcaagatcttcggcagcagagtgagagtggacagcaccgccaaggtggccgagatcgagcacgccgagaaggagaagatgaaggagaaggtggagagaatcctgaagcacggcatcaactgcttcatcaacagacagctgatctacaactaccccgagcagctgttcggcgccgccggcgtgatggccatcgagcacgccgacttcgccggcgtggagagactggccctggtgaccggcggcgagatcgccagcaccttcgaccaccccgagctggtgaagctgggcagctgcaagctgatcgaggaggtgatgatcggcgaggacaagctgatccacttcagcggcgtggccctgggcgaggcctgcaccatcgtgctgagaggcgccacccagcagatcctggacgaggccgagagaagcctgcacgacgccctgtgcgtgctggcccagaccgtgaaggacagcagaaccgtgtacggcggcggctgcagcgagatgctgatggcccacgccgtgacccagctggccaacagaacccccggcaaggaggccgtggccatggagagctacgccaaggccctgagaatgctgcccaccatcatcgccgacaacgccggctacgacagcgccgacctggtggcccagctgagagccgcccacagcgagggcaacaccaccgccggcctggacatgagagagggcaccatcggcgacatggccatcctgggcatcaccgagagcttccaggtgaagagacaggtgctgctgagcgccgccgaggccgccgaggtgatcctgagagtggacaacatcatcaaggccgcccccagaaagagagtgcccgaccaccacccctgctag

SEQ ID NO: 76340 - DNA, 1467 bp, synthetic construct
  misc_feature 1..1467: note = Description of Artificial Sequence: Synthetic coding sequence
  source 1..1467: mol_type = other DNA
atggacaagatcctgctgagcagcggcagagacgccagcctgatggtgaccaacgacggcgccaccatcctgaagaacatcggcgtggacaaccccgccgccaaggtgctggtggacatgagcagagtgcaggacgacgaggtgggcgacggcaccaccagcgtgaccgtgctggccgccgagctgctgagagaggccgagagcctgatcgccaagaagatccacccccagaccatcatcgccggctggagagaggccaccaaggccgccagagaggccctgctgagcagcgccgtggaccacggcagcgacgaggtgaagttcagacaggacctgatgaacatcgccggcaccaccctgagcagcaagctgctgacccaccacaaggaccacttcaccaagctggccgtggaggccgtgctgagactgaagggcagcggcaacctggaggccatccacatcatcaagaagctgggcggcagcctggccgacagctacctggacgagggcttcctgctggacaagaagatcggcgtgaaccagcccaagagaatcgagaacgccaagatcctgatcgccaacaccggcatggacaccgacaagatcaagatcttcggcagcagagtgagagtggacagcaccgccaaggtggccgagatcgagcacgccgagaaggagaagatgaaggagaaggtggagagaatcctgaagcacggcatcaactgcttcatcaacagacagctgatctacaactaccccgagcagctgttcggcgccgccggcgtgatggccatcgagcacgccgacttcgccggcgtggagagactggccctggtgaccggcggcgagatcgccagcaccttcgaccaccccgagctggtgaagctgggcagctgcaagctgatcgaggaggtgatgatcggcgaggacaagctgatccacttcagcggcgtggccctgggcgaggcctgcaccatcgtgctgagaggcgccacccagcagatcctggacgaggccgagagaagcctgcacgacgccctgtgcgtgctggcccagaccgtgaaggacagcagaaccgtgtacggcggcggctgcagcgagatgctgatggcccacgccgtgacccagctggccaacagaacccccggcaaggaggccgtggccatggagagctacgccaaggccctgagaatgctgcccaccatcatcgccgacaacgccggctacgacagcgccgacctggtggcccagctgagagccgcccacagcgagggcaacaccaccgccggcctggacatgagagagggcaccatcggcgacatggccatcctgggcatcaccgagagcttccaggtgaagagacaggtgctgctgagcgccgccgaggccgccgaggtgatcctgagagtggacaacatcatcaaggccgcccccagaaagagagtgcccgaccaccacccctgctag

SEQ ID NO: 76341 - DNA, 1638 bp, synthetic construct
  misc_feature 1..1638: note = Description of Artificial Sequence: Synthetic coding sequence
  source 1..1638: mol_type = other DNA
atgatgggccacagacccgtgctggtgctgagccagaacaccaagagagagagcggcagaaaggtgcagagcggcaacatcaacgccgccaagaccatcgccgacatcatcagaacctgcctgggccccaagagcatgatgaagatgctgctggaccccatgggcggcatcgtgatgaccaacgacggcaacgccatcctgagagagatccaggtgcagcaccccgccgccaagagcatgatcgagatcagcagaacccaggacgaggaggtgggcgacggcaccaccagcgtgatcatcctggccggcgagatgctgagcgtggccgagcacttcctggagcagcagatgcaccccaccgtggtgatcagcgcctacagaaaggccctggacgacatgatcagcaccctgaagaagatcagcatccccgtggacatcagcgacagcgacatgatgctgaacatcatcaacagcagcatcaccaccaaggccatcagcagatggagcagcctggcctgcaacatcgccctggacgccgtgaagatggtgcagttcgaggagaacggcagaaaggagatcgacatcaagaagtacgccagagtggagaagatccccggcggcatcatcgaggacagctgcgtgctgagaggcgtgatgatcaacaaggacgtgacccaccccagaatgagaagatacatcaagaaccccagaatcgtgctgctggacagcagcctggagtacaagaagggcgagagccagaccgacatcgagatcaccagagaggaggacttcaccagaatcctgcagatggaggaggagtacatccagcagctgtgcgaggacatcatccagctgaagcccgacgtggtgatcaccgagaagggcatcagcgacctggcccagcactacctgatgagagccaacatcaccgccatcagaagagtgagaaagaccgacaacaacagaatcgccagagcctgcggcgccagaatcgtgagcagacccgaggagctgagagaggacgacgtgggcaccggcgccggcctgctggagatcaagaagatcggcgacgagtacttcaccttcatcaccgactgcaaggaccccaaggcctgcaccatcctgctgagaggcgccagcaaggagatcctgagcgaggtggagagaaacctgcaggacgccatgcaggtgtgcagaaacgtgctgctggacccccagctggtgcccggcggcggcgccagcgagatggccgtggcccacgccctgaccgagaagagcaaggccatgaccggcgtggagcagtggccctacagagccgtggcccaggccctggaggtgatccccagaaccctgatccagaactgcggcgccagcaccatcagactgctgaccagcctgagagccaagcacacccaggagaactgcgagacctggggcgtgaacggcgagaccggcaccctggtggacatgaaggagctgggcatctgggagcccctggccgtgaagctgcagacctacaagaccgccgtggagaccgccgtgctgctgctgagaatcgacgacatcgtgagcggccacaagaagaagggcgacgaccagagcagacagggcggcgcccccgacgccggccaggagtag

SEQ ID NO: 76342 - DNA, 1524 bp, synthetic construct
  misc_feature 1..1524: note = Description of Artificial Sequence: Synthetic coding sequence
  source 1..1524: mol_type = other DNA
atgatgggccacagacccgtgctggtgctgagccagaacaccaagagagagagcggcagaaaggtgcagagcggcaacatcaacgccgccaagatccaggtgcagcaccccgccgccaagagcatgatcgagatcagcagaacccaggacgaggaggtgggcgacggcaccaccagcgtgatcatcctggccggcgagatgctgagcgtggccgagcacttcctggagcagcagatgcaccccaccgtggtgatcagcgcctacagaaaggccctggacgacatgatcagcaccctgaagaagatcagcatccccgtggacatcagcgacagcgacatgatgctgaacatcatcaacagcagcatcaccaccaaggccatcagcagatggagcagcctggcctgcaacatcgccctggacgccgtgaagatggtgcagttcgaggagaacggcagaaaggagatcgacatcaagaagtacgccagagtggagaagatccccggcggcatcatcgaggacagctgcgtgctgagaggcgtgatgatcaacaaggacgtgacccaccccagaatgagaagatacatcaagaaccccagaatcgtgctgctggacagcagcctggagtacaagaagggcgagagccagaccgacatcgagatcaccagagaggaggacttcaccagaatcctgcagatggaggaggagtacatccagcagctgtgcgaggacatcatccagctgaagcccgacgtggtgatcaccgagaagggcatcagcgacctggcccagcactacctgatgagagccaacatcaccgccatcagaagagtgagaaagaccgacaacaacagaatcgccagagcctgcggcgccagaatcgtgagcagacccgaggagctgagagaggacgacgtgggcaccggcgccggcctgctggagatcaagaagatcggcgacgagtacttcaccttcatcaccgactgcaaggaccccaaggcctgcaccatcctgctgagaggcgccagcaaggagatcctgagcgaggtggagagaaacctgcaggacgccatgcaggtgtgcagaaacgtgctgctggacccccagctggtgcccggcggcggcgccagcgagatggccgtggcccacgccctgaccgagaagagcaaggccatgaccggcgtggagcagtggccctacagagccgtggcccaggccctggaggtgatccccagaaccctgatccagaactgcggcgccagcaccatcagactgctgaccagcctgagagccaagcacacccaggagaactgcgagacctggggcgtgaacggcgagaccggcaccctggtggacatgaaggagctgggcatctgggagcccctggccgtgaagctgcagacctacaagaccgccgtggagaccgccgtgctgctgctgagaatcgacgacatcgtgagcggccacaagaagaagggcgacgaccagagcagacagggcggcgcccccgacgccggccaggagtag

SEQ ID NO: 76343 - DNA, 1503 bp, synthetic construct
  misc_feature 1..1503: note = Description of Artificial Sequence: Synthetic coding sequence
  source 1..1503: mol_type = other DNA
atgatgaagatgctgctggaccccatgggcggcatcgtgatgaccaacgacggcaacgccatcctgagagagatccaggtgcagcaccccgccgccaagagcatgatcgagatcagcagaacccaggacgaggaggtgggcgacggcaccaccagcgtgatcatcctggccggcgagatgctgagcgtggccgagcacttcctggagcagcagatgcaccccaccgtggtgatcagcgcctacagaaaggccctggacgacatgatcagcaccctgaagaagatcagcatccccgtggacatcagcgacagcgacatgatgctgaacatcatcaacagcagcatcaccaccaaggccatcagcagatggagcagcctggcctgcaacatcgccctggacgccgtgaagatggtgcagttcgaggagaacggcagaaaggagatcgacatcaagaagtacgccagagtggagaagatccccggcggcatcatcgaggacagctgcgtgctgagaggcgtgatgatcaacaaggacgtgacccaccccagaatgagaagatacatcaagaaccccagaatcgtgctgctggacagcagcctggagtacaagaagggcgagagccagaccgacatcgagatcaccagagaggaggacttcaccagaatcctgcagatggaggaggagtacatccagcagctgtgcgaggacatcatccagctgaagcccgacgtggtgatcaccgagaagggcatcagcgacctggcccagcactacctgatgagagccaacatcaccgccatcagaagagtgagaaagaccgacaacaacagaatcgccagagcctgcggcgccagaatcgtgagcagacccgaggagctgagagaggacgacgtgggcaccggcgccggcctgctggagatcaagaagatcggcgacgagtacttcaccttcatcaccgactgcaaggaccccaaggcctgcaccatcctgctgagaggcgccagcaaggagatcctgagcgaggtggagagaaacctgcaggacgccatgcaggtgtgcagaaacgtgctgctggacccccagctggtgcccggcggcggcgccagcgagatggccgtggcccacgccctgaccgagaagagcaaggccatgaccggcgtggagcagtggccctacagagccgtggcccaggccctggaggtgatccccagaaccctgatccagaactgcggcgccagcaccatcagactgctgaccagcctgagagccaagcacacccaggagaactgcgagacctggggcgtgaacggcgagaccggcaccctggtggacatgaaggagctgggcatctgggagcccctggccgtgaagctgcagacctacaagaccgccgtggagaccgccgtgctgctgctgagaatcgacgacatcgtgagcggccacaagaagaagggcgacgaccagagcagacagggcggcgcccccgacgccggccaggagtag

SEQ ID NO: 76344 - DNA, 831 bp, synthetic construct
  misc_feature 1..831: note = Description of Artificial Sequence: Synthetic coding sequence
  source 1..831: mol_type = other DNA
atgtacgagggcgacctggagggccagagcatgaactggaccagcgaggagggcagaggcgacatcatcagaagcggcaccaacatcgacagagcctggcagtgccagaacaccaagagagagagcggcagaaaggtgcagagcggcaacatcaacgccgccaagaccatcgccgacatcatcagaacctgcctgggccccaagagcatgatgaagatgctgctggaccccatgggcggcatcgtgatgaccaacgacggcaacgccatcctgagagagatccaggtgcagcaccccgccgccaagagcatgatcgagatcagcagaacccaggacgaggaggtgggcgacggcaccaccagcgtgatcatcctggccggcgagatgctgagcgtggccgagcacttcctggagcagcagatgcaccccaccgtggtgatcagcgcctacagaaaggccctggacgacatgatcagcaccctgaagaagatcagcatccccgtggacatcagcgacagcgacatgatgctgaacatcatcaacagcagcatcaccaccaaggccatcagcagatggagcagcctggcctgcaacatcgccctggacgccgtgaagatggtgcagttcgaggagaacggcagaaaggagatcgacatcaagaagtacgccagagtggagaagatccccggcggcatcatcgaggacagctgcgtgctgagaggcgtgatgatcaacaaggacgtgacccaccccagaatgagaagatacatcaagaaccccagaatcgtgctgctggacagcagcctggagtacaagaagggcgagagctag

SEQ ID NO: 76345 - DNA, 486 bp, synthetic construct
  misc_feature 1..486: note = Description of Artificial Sequence: Synthetic coding sequence
  source 1..486: mol_type = other DNA
atgatgggccacagacccgtgctggtgctgagccagaacaccaagagagagagcggcagaaaggtgcagagcggcaacatcaacgccgccaagaccatcgccgacatcatcagaacctgcctgggccccaagagcatgatgaagatgctgctggaccccatgggcggcatcgtgatgaccaacgacggcaacgccatcctgagagagatccaggtgcagcaccccgccgccaagagcatgatcgagatcagcagaacccaggacgaggaggtgggcgacggcaccaccagcgtgatcatcctggagagccacagcgtgaccatgctggagtgcggcggcgccatcctggcccactgcaacctgtgcctgcccgccggcgagatgctgagcgtggccgagcacttcctggagcagcagatgcaccccaccgtggtgatcagcgcctacagaaaggccctggacgacatgatcagcaccctgaagtag

SEQ ID NO: 76346 - DNA, 567 bp, synthetic construct
  misc_feature 1..567: note = Description of Artificial Sequence: Synthetic coding sequence
  source 1..567: mol_type = other DNA
atgtacgagggcgacctggagggccagagcatgaactggaccagcgaggagggcagaggcgacatcatcagaagcggcaccaacatcgacagagcctggcagtgccagaacaccaagagagagagcggcagaaaggtgcagagcggcaacatcaacgccgccaagatccaggtgcagcaccccgccgccaagagcatgatcgagatcagcagaacccaggacgaggaggtgggcgacggcaccaccagcgtgatcatcctggccggcgagatgctgagcgtggccgagcacttcctggagcagcagatgcaccccaccgtggtgatcagcgcctacagaaaggccctggacgacatgatcagcaccctgaagaagatcagcatccccgtggacatcagcgacagcgacatgatgctgaacatcatcaacagcagcatcaccaccaaggccatcagcagatggagcagcctggcctgcaacatcgccctggacgccgtgaagatggtgcagttcgaggagaacggcagaaaggagatcgacatcaagaagtacgccagagtggagtag

SEQ ID NO: 76347 - DNA, 1503 bp, synthetic construct; identical to SEQ ID NO: 76343
  misc_feature 1..1503: note = Description of Artificial Sequence: Synthetic coding sequence
  source 1..1503: mol_type = other DNA

SEQ ID NO: 76348 - DNA, 1620 bp, synthetic construct
  misc_feature 1..1620: note = Description of Artificial Sequence: Synthetic coding sequence
  source 1..1620: mol_type = other DNA
atgcccgagaacgtggcccccagaagcggcgccaccgccggcgccgccggcggcagaggcaagggcgcctaccaggacagagacaagcccgcccagatcagattcagcaacatcagcgccgccaaggccgtggccgacgccatcagaaccagcctgggccccaagggcatggacaagatgatccaggacggcaagggcgacgtgaccatcaccaacgacggcgccaccatcctgaagcagatgcaggtgctgcaccccgccgccagaatgctggtggagctgagcaaggcccaggacatcgaggccggcgacggcaccaccagcgtggtgatcatcgccggcagcctgctggacagctgcaccaagctgctgcagaagggcatccaccccaccatcatcagcgagagcttccagaaggccctggagaagggcatcgagatcctgaccgacatgagcagacccgtggagctgagcgacagagagaccctgctgaacagcgccaccaccagcctgaacagcaaggtggtgagccagtacagcagcctgctgagccccatgagcgtgaacgccgtgatgaaggtgatcgaccccgccaccgccaccagcgtggacctgagagacatcaagatcgtgaagaagctgggcggcaccatcgacgactgcgagctggtggagggcctggtgctgacccagaaggtgagcaacagcggcatcaccagagtggagaaggccaagatcggcctgatccagttctgcctgagcgcccccaagaccgacatggacaaccagatcgtggtgagcgactacgcccagatggacagagtgctgagagaggagagagcctacatcctgaacctggtgaagcagatcaagaagaccggctgcaacgtgctgctgatccagaagagcatcctgagagacgccctgagcgacctggccctgcacttcctgaacaagatgaagatcatggtgatcaaggacatcgagagagaggacatcgagttcatctgcaagaccatcggcaccaagcccgtggcccacatcgaccagttcaccgccgacatgctgggcagcgccgagctggccgaggaggtgaacctgaacggcagcggcaagctgctgaagatcaccggctgcgccagccccggcaagaccgtgaccatcgtggtgagaggcagcaacaagctggtgatcgaggaggccgagagaagcatccacgacgccctgtgcgtgatcagatgcctggtgaagaagagagccctgatcgccggcggcggcgcccccgagatcgagctggccctgagactgaccgagtacagcagaaccctgagcggcatggagagctactgcgtgagagccttcgccgacgccatggaggtgatccccagcaccctggccgagaacgccggcctgaaccccatcagcaccgtgaccgagctgagaaacagacacgcccagggcgagaagaccgccggcatcaacgtgagaaagggcggcatcagcaacatcctggaggagctggtggtgcagcccctgctggtgagcgtgagcgccctgaccctggccaccgagaccgtgagaagcatcctgaagatcgacgacgtggtgaacaccagatag

SEQ ID NO: 76349 - DNA, 1452 bp, synthetic construct
  misc_feature 1..1452: note = Description of Artificial Sequence: Synthetic coding sequence
  source 1..1452: mol_type = other DNA
atggacaagatgatccaggacggcaagggcgacgtgaccatcaccaacgacggcgccaccatcctgaagcagatgcaggtgctgcaccccgccgccagaatgctggtggagctgagcaaggcccaggacatcgaggccggcgacggcaccaccagcgtggtgatcatcgccggcagcctgctggacagctgcaccaagctgctgcagaagggcatccaccccaccatcatcagcgagagcttccagaaggccctggagaagggcatcgagatcctgaccgacatgagcagacccgtggagctgagcgacagagagaccctgctgaacagcgccaccaccagcctgaacagcaaggtggtgagccagtacagcagcctgctgagccccatgagcgtgaacgccgtgatgaaggtgatcgaccccgccaccgccaccagcgtggacctgagagacatcaagatcgtgaagaagctgggcggcaccatcgacgactgcgagctggtggagggcctggtgctgacccagaaggtgagcaacagcggcatcaccagagtggagaaggccaagatcggcctgatccagttctgcctgagcgcccccaagaccgacatggacaaccagatcgtggtgagcgactacgcccagatggacagagtgctgagagaggagagagcctacatcctgaacctggtgaagcagatcaagaagaccggctgcaacgtgctgctgatccagaagagcatcctgagagacgccctgagcgacctggccctgcacttcctgaacaagatgaagatcatggtgatcaaggacatcgagagagaggacatcgagttcatctgcaagaccatcggcaccaagcccgtggcccacatcgaccagttcaccgccgacatgctgggcagcgccgagctggccgaggaggtgaacctgaacggcagcggcaagctgctgaagatcaccggctgcgccagccccggcaagaccgtgaccatcgtggtgagaggcagcaacaagctggtgatcgaggaggccgagagaagcatccacgacgccctgtgcgtgatcagatgcctggtgaagaagagagccctgatcgccggcggcggcgcccccgagatcgagctggccctgagactgaccgagtacagcagaaccctgagcggcatggagagctactgcgtgagagccttcgccgacgccatggaggtgatccccagcaccctggccgagaacgccggcctgaaccccatcagcaccgtgaccgagctgagaaacagacacgcccagggcgagaagaccgccggcatcaacgtgagaaagggcggcatcagcaacatcctggaggagctggtggtgcagcccctgctggtgagcgtgagcgccctgaccctggccaccgagaccgtgagaagcatcctgaagatcgacgacgtggtgaacaccagatag

SEQ ID NO: 76350 - DNA, 1530 bp, synthetic construct
  misc_feature 1..1530: note = Description of Artificial Sequence: Synthetic coding sequence
  source 1..1530: mol_type = other DNA
atgcccgagaacgtggcccccagaagcggcgccaccgccggcgccgccggcggcagaggcaagggcgcctaccaggacagagacaagcccgcccagatcagattcagcaacatcagcgccgccaaggccgtggccgacgccatcagaaccagcctgggccccaagggcatggacaagatgctggtggagctgagcaaggcccaggacatcgaggccggcgacggcaccaccagcgtggtgatcatcgccggcagcctgctggacagctgcaccaagctgctgcagaagggcatccaccccaccatcatcagcgagagcttccagaaggccctggagaagggcatcgagatcctgaccgacatgagcagacccgtggagctgagcgacagagagaccctgctgaacagcgccaccaccagcctgaacagcaaggtggtgagccagtacagcagcctgctgagccccatgagcgtgaacgccgtgatgaaggtgatcgaccccgccaccgccaccagcgtggacctgagagacatcaagatcgtgaagaagctgggcggcaccatcgacgactgcgagctggtggagggcctggtgctgacccagaaggtgagcaacagcggcatcaccagagtggagaaggccaagatcggcctgatccagttctgcctgagcgcccccaagaccgacatggacaaccagatcgtggtgagcgactacgcccagatggacagagtgctgagagaggagagagcctacatcctgaacctggtgaagcagatcaagaagaccggctgcaacgtgctgctgatccagaagagcatcctgagagacgccctgagcgacctggccctgcacttcctgaacaagatgaagatcatggtgatcaaggacatcgagagagaggacatcgagttcatctgcaagaccatcggcaccaagcccgtggcccacatcgaccagttcaccgccgacatgctgggcagcgccgagctggccgaggaggtgaacctgaacggcagcggcaagctgctgaagatcaccggctgcgccagccccggcaagaccgtgaccatcgtggtgagaggcagcaacaagctggtgatcgaggaggccgagagaagcatccacgacgccctgtgcgtgatcagatgcctggtgaagaagagagccctgatcgccggcggcggcgcccccgagatcgagctggccctgagactgaccgagtacagcagaaccctgagcggcatggagagctactgcgtgagagccttcgccgacgccatggaggtgatccccagcaccctggccgagaacgccggcctgaaccccatcagcaccgtgaccgagctgagaaacagacacgcccagggcgagaagaccgccggcatcaacgtgagaaagggcggcatcagcaacatcctggaggagctggtggtgcagcccctgctggtgagcgtgagcgccctgaccctggccaccgagaccgtgagaagcatcctgaagatcgacgacgtggtgaacaccagatag

SEQ ID NO: 76351 - DNA, 1170 bp, synthetic construct
  misc_feature 1..1170: note = Description of Artificial Sequence: Synthetic coding sequence
  source 1..1170: mol_type = other DNA
atgagcagacccgtggagctgagcgacagagagaccctgctgaacagcgccaccaccagcctgaacagcaaggtggtgagccagtacagcagcctgctgagccccatgagcgtgaacgccgtgatgaaggtgatcgaccccgccaccgccaccagcgtggacctgagagacatcaagatcgtgaagaagctgggcggcaccatcgacgactgcgagctggtggagggcctggtgctgacccagaaggtgagcaacagcggcatcaccagagtggagaaggccaagatcggcctgatccagttctgcctgagcgcccccaagaccgacatggacaaccagatcgtggtgagcgactacgcccagatggacagagtgctgagagaggagagagcctacatcctgaacctggtgaagcagatcaagaagaccggctgcaacgtgctgctgatccagaagagcatcctgagagacgccctgagcgacctggccctgcacttcctgaacaagatgaagatcatggtgatcaaggacatcgagagagaggacatcgagttcatctgcaagaccatcggcaccaagcccgtggcccacatcgaccagttcaccgccgacatgctgggcagcgccgagctggccgaggaggtgaacctgaacggcagcggcaagctgctgaagatcaccggctgcgccagccccggcaagaccgtgaccatcgtggtgagaggcagcaacaagctggtgatcgaggaggccgagagaagcatccacgacgccctgtgcgtgatcagatgcctggtgaagaagagagccctgatcgccggcggcggcgcccccgagatcgagctggccctgagactgaccgagtacagcagaaccctgagcggcatggagagctactgcgtgagagccttcgccgacgccatggaggtgatccccagcaccctggccgagaacgccggcctgaaccccatcagcaccgtgaccgagctgagaaacagacacgcccagggcgagaagaccgccggcatcaacgtgagaaagggcggcatcagcaacatcctggaggagctggtggtgcagcccctgctggtgagcgtgagcgccctgaccctggccaccgagaccgtgagaagcatcctgaagatcgacgacgtggtgaacaccagatag

SEQ ID NO: 76352 - DNA, 1626 bp, synthetic construct
  misc_feature 1..1626: note = Description of Artificial Sequence: Synthetic coding sequence
  source 1..1626: mol_type = other DNA
atggccagcatgggcaccctggccttcgacgagtacggcagacccttcctgatcatcaaggaccaggacagaaagagcagactgatgggcctggaggccctgaagagccacatcatggccgccaaggccgtggccaacaccatgagaaccagcctgggccccaacggcctggacaagatgatggtggacaaggacggcgacgtgaccgtgaccaacgacggcgccaccatcctgagcatgatggacgtggaccaccagatcgccaagctgatggtggagctgagcaagagccaggacgacgagatcggcgacggcaccaccggcgtggtggtgctggccggcgccctgctggaggaggccgagcagctgctggacagaggcatccaccccatcagaatcgccgacggctacgagcaggccgccagagtggccatcgagcacctggacaagatcagcgacagcgtgctggtggacatcaaggacaccgagcccctgatccagaccgccaagaccaccctgggcagcaaggtggtgaacagctgccacagacagatggccgagatcgccgtgaacgccgtgctgaccgtggccgacatggagagaagagacgtggacttcgagctgatcaaggtggagggcaaggtgggcggcagactggaggacaccaagctgatcaagggcgtgatcgtggacaaggacttcagccacccccagatgcccaagaaggtggaggacgccaagatcgccatcctgacctgccccttcgagccccccaagcccaagaccaagcacaagctggacgtgaccagcgtggaggactacaaggccctgcagaagtacgagaaggagaagttcgaggagatgatccagcagatcaaggagaccggcgccaacctggccatctgccagtggggcttcgacgacgaggccaaccacctgctgctgcagaacaacctgcccgccgtgagatgggtgggcggccccgagatcgagctgatcgccatcgccaccggcggcagaatcgtgcccagattcagcgagctgaccgccgagaagctgggcttcgccggcctggtgcaggagatcagcttcggcaccaccaaggacaagatgctggtgatcgagcagtgcaagaacagcagagccgtgaccatcttcatcagaggcggcaacaagatgatcatcgaggaggccaagagaagcctgcacgacgccctgtgcgtgatcagaaacctgatcagagacaacagagtggtgtacggcggcggcgccgccgagatcagctgcgccctggccgtgagccaggaggccgacaagtgccccaccctggagcagtacgccatgagagccttcgccgacgccctggaggtgatccccatggccctgagcgagaacagcggcatgaaccccatccagaccatgaccgaggtgagagccagacaggtgaaggagatgaaccccgccctgggcatcgactgcctgcacaagggcaccaacgacatgaagcagcagcacgtgatcgagaccctgatcggcaagaagcagcagatcagcctggccacccagatggtgagaatgatcctgaagatcgacgacatcagaaagcccggcgagagcgaggagtag

SEQ ID NO: 76353 - DNA, 1545 bp, synthetic construct
  misc_feature 1..1545: note = Description of Artificial Sequence: Synthetic coding sequence
  source 1..1545: mol_type = other DNA
atggccagcatgggcaccctggccttcgacgagtacggcagacccttcctgatcatcaaggaccaggacagaaagagcagactgatgggcctggaggccctgaagagccacatcatggccgccaaggccgtggccaacaccatgagaaccagcctgggccccaacggcctggacaagatgatggtggacaaggacggcgacgtgaccgtgaccaacgacgagatcggcgacggcaccaccggcgtggtggtgctggccggcgccctgctggaggaggccgagcagctgctggacagaggcatccaccccatcagaatcgccgacggctacgagcaggccgccagagtggccatcgagcacctggacaagatcagcgacagcgtgctggtggacatcaaggacaccgagcccctgatccagaccgccaagaccaccctgggcagcaaggtggtgaacagctgccacagacagatggccgagatcgccgtgaacgccgtgctgaccgtggccgacatggagagaagagacgtggacttcgagctgatcaaggtggagggcaaggtgggcggcagactggaggacaccaagctgatcaagggcgtgatcgtggacaaggacttcagccacccccagatgcccaagaaggtggaggacgccaagatcgccatcctgacctgccccttcgagccccccaagcccaagaccaagcacaagctggacgtgaccagcgtggaggactacaaggccctgcagaagtacgagaaggagaagttcgaggagatgatccagcagatcaaggagaccggcgccaacctggccatctgccagtggggcttcgacgacgaggccaaccacctgctgctgcagaacaacctgcccgccgtgagatgggtgggcggccccgagatcgagctgatcgccatcgccaccggcggcagaatcgtgcccagattcagcgagctgaccgccgagaagctgggcttcgccggcctggtgcaggagatcagcttcggcaccaccaaggacaagatgctggtgatcgagcagtgcaagaacagcagagccgtgaccatcttcatcagaggcggcaacaagatgatcatcgaggaggccaagagaagcctgcacgacgccctgtgcgtgatcagaaacctgatcagagacaacagagtggtgtacggcggcggcgccgccgagatcagctgcgccctggccgtgagccaggaggccgacaagtgccccaccctggagcagtacgccatgagagccttcgccgacgccctggaggtgatccccatggccctgagcgagaacagcggcatgaaccccatccagaccatgaccgaggtgagagccagacaggtgaaggagatgaaccccgccctgggcatcgactgcctgcacaagggcaccaacgacatgaagcagcagcacgtgatcgagaccctgatcggcaagaagcagcagatcagcctggccacccagatggtgagaatgatcctgaagatcgacgacatcagaaagcccggcgagagcgaggagtag

SEQ ID NO: 76354 - DNA, 1563 bp, synthetic construct
  misc_feature 1..1563: note = Description of Artificial Sequence: Synthetic coding sequence
  source 1..1563: mol_type = other DNA
atgaacagcagcctgggccccaccatcgagaagctgagcgtgagccacatcatggccgccaaggccgtggccaacaccatgagaaccagcctgggccccaacggcctggacaagatgatggtggacaaggacggcgacgtgaccgtgaccaacgacggcgccaccatcctgagcatgatggacgtggaccaccagatcgccaagctgatggtggagctgagcaagagccaggacgacgagatcggcgacggcaccaccggcgtggtggtgctggccggcgccctgctggaggaggccgagcagctgctggacagaggcatccaccccatcagaatcgccgacggctacgagcaggccgccagagtggccatcgagcacctggacaagatcagcgacagcgtgctggtggacatcaaggacaccgagcccctgatccagaccgccaagaccaccctgggcagcaaggtggtgaacagctgccacagacagatggccgagatcgccgtgaacgccgtgctgaccgtggccgacatggagagaagagacgtggacttcgagctgatcaaggtggagggcaaggtgggcggcagactggaggacaccaagctgatcaagggcgtgatcgtggacaaggacttcagccacccccagatgcccaagaaggtggaggacgccaagatcgccatcctgacctgccccttcgagccccccaagcccaagaccaagcacaagctggacgtgaccagcgtggaggactacaaggccctgcagaagtacgagaaggagaagttcgaggagatgatccagcagatcaaggagaccggcgccaacctggccatctgccagtggggcttcgacgacgaggccaaccacctgctgctgcagaacaacctgcccgccgtgagatgggtgggcggccccgagatcgagctgatcgccatcgccaccggcggcagaatcgtgcccagattcagcgagctgaccgccgagaagctgggcttcgccggcctggtgcaggagatcagcttcggcaccaccaaggacaagatgctggtgatcgagcagtgcaagaacagcagagccgtgaccatcttcatcagaggcggcaacaagatgatcatcgaggaggccaagagaagcctgcacgacgccctgtgcgtgatcagaaacctgatcagagacaacagagtggtgtacggcggcggcgccgccgagatcagctgcgccctggccgtgagccaggaggccgacaagtgccccaccctggagcagtacgccatgagagccttcgccgacgccctggaggtgatccccatggccctgagcgagaacagcggcatgaaccccatccagaccatgaccgaggtgagagccagacaggtgaaggagatgaaccccgccctgggcatcgactgcctgcacaagggcaccaacgacatgaagcagcagcacgtgatcgagaccctgatcggcaagaagcagcagatcagcctggccacccagatggtgagaatgatcctgaagatcgacgacatcagaaagcccggcgagagcgaggagtag

SEQ ID NO: 76355 - DNA, 1347 bp, synthetic construct
  misc_feature 1..1347: note = Description of Artificial Sequence: Synthetic coding sequence
  source 1..1347: mol_type = other DNA
atggccgccaaggccgtggccaacaccatgagaaccagcctgggccccaacgtgctggccggcgccctgctggaggaggccgagcagctgctggacagaggcatccaccccatcagaatcgccgacggctacgagcaggccgccagagtggccatcgagcacctggacaagatcagcgacagcgtgctggtggacatcaaggacaccgagcccctgatccagaccgccaagaccaccctgggcagcaaggtggtgaacagctgccacagacagatggccgagatcgccgtgaacgccgtgctgaccgtggccgacatggagagaagagacgtggacttcgagctgatcaaggtggagggcaaggtgggcggcagactggaggacaccaagctgatcaagggcgtgatcgtggacaaggacttcagccacccccagatgcccaagaaggtggaggacgccaagatcgccatcctgacctgccccttcgagccccccaagcccaagaccaagcacaagctggacgtgaccagcgtggaggactacaaggccctgcagaagtacgagaaggagaagttcgaggagatgatccagcagatcaaggagaccggcgccaacctggccatctgccagtggggcttcgacgacgaggccaaccacctgctgctgcagaacaacctgcccgccgtgagatgggtgggcggccccgagatcgagctgatcgccatcgccaccggcggcagaatcgtgcccagattcagcgagctgaccgccgagaagctgggcttcgccggcctggtgcaggagatcagcttcggcaccaccaaggacaagatgctggtgatcgagcagtgcaagaacagcagagccgtgaccatcttcatcagaggcggcaacaagatgatcatcgaggaggccaagagaagcctgcacgacgccctgtgcgtgatcagaaacctgatcagagacaacagagtggtgtacggcggcggcgccgccgagatcagctgcgccctggccgtgagccaggaggccgacaagtgccccaccctggagcagtacgccatgagagccttcgccgacgccctggaggtgatccccatggccctgagcgagaacagcggcatgaaccccatccagaccatgaccgaggtgagagccagacaggtgaaggagatgaaccccgccctgggcatcgactgcctgcacaagggcaccaacgacatgaagcagcagcacgtgatcgagaccctgatcggcaagaagcagcagatcagcctggccacccagatggtgagaatgatcctgaagatcgacgacatcagaaagcccggcgagagcgaggagtag

SEQ ID NO: 76356 - DNA, 1461 bp, synthetic construct
  misc_feature 1..1461: note = Description of Artificial Sequence: Synthetic coding sequence
  source 1..1461: mol_type = other DNA
atggccagcatgggcaccctggccttcgacgagtacggcagacccttcctgatcatcaaggaccaggacagaaagagcagactgatgggcctggaggccctgaagagccacatcatggccgccaaggccgtggccaacaccatgagaaccagcctgggccccaacgtgctggccggcgccctgctggaggaggccgagcagctgctggacagaggcatccaccccatcagaatcgccgacggctacgagcaggccgccagagtggccatcgagcacctggacaagatcagcgacagcgtgctggtggacatcaaggacaccgagcccctgatccagaccgccaagaccaccctgggcagcaaggtggtgaacagctgccacagacagatggccgagatcgccgtgaacgccgtgctgaccgtggccgacatggagagaagagacgtggacttcgagctgatcaaggtggagggcaaggtgggcggcagactggaggacaccaagctgatcaagggcgtgatcgtggacaaggacttcagccacccccagatgcccaagaaggtggaggacgccaagatcgccatcctgacctgccccttcgagccccccaagcccaagaccaagcacaagctggacgtgaccagcgtggaggactacaaggccctgcagaagtacgagaaggagaagttcgaggagatgatccagcagatcaaggagaccggcgccaacctggccatctgccagtggggcttcgacgacgaggccaaccacctgctgctgcagaacaacctgcccgccgtgagatgggtgggcggccccgagatcgagctgatcgccatcgccaccggcggcagaatcgtgcccagattcagcgagctgaccgccgagaagctgggcttcgccggcctggtgcaggagatcagcttcggcaccaccaaggacaagatgctggtgatcgagcagtgcaagaacagcagagccgtgaccatcttcatcagaggcggcaacaagatgatcatcgaggaggccaagagaagcctgcacgacgccctgtgcgtgatcagaaacctgatcagagacaacagagtggtgtacggcggcggcgccgccgagatcagctgcgccctggccgtgagccaggaggccgacaagtgccccaccctggagcagtacgccatgagagccttcgccgacgccctggaggtgatccccatggccctgagcgagaacagcggcatgaaccccatccagaccatgaccgaggtgagagccagacaggtgaaggagatgaaccccgccctgggcatcgactgcctgcacaagggcaccaacgacatgaagcagcagcacgtgatcgagaccctgatcggcaagaagcagcagatcagcctggccacccagatggtgagaatgatcctgaagatcgacgacatcagaaagcccggcgagagcgaggagtag

SEQ ID NO: 76357 - DNA, 1512 bp, synthetic construct
  misc_feature 1..1512: note = Description of Artificial Sequence: Synthetic coding sequence
  source 1..1512: mol_type = other DNA
atggccgccaaggccgtggccaacaccatgagaaccagcctgggccccaacggcctggacaagatgatggtggacaaggacggcgacgtgaccgtgaccaacgacggcgccaccatcctgagcatgatggacgtggaccaccagatcgccaagctgatggtggagctgagcaagagccaggacgacgagatcggcgacggcaccaccggcgtggtggtgctggccggcgccctgctggaggaggccgagcagctgctggacagaggcatccaccccatcagaatcgccgacggctacgagcaggccgccagagtggccatcgagcacctggacaagatcagcgacagcgtgctggtggacatcaaggacaccgagcccctgatccagaccgccaagaccaccctgggcagcaaggtggtgaacagctgccacagacagatggccgagatcgccgtgaacgccgtgctgaccgtggccgacatggagagaagagacgtggacttcgagctgatcaaggtggagggcaaggtgggcggcagactggaggacaccaagctgatcaagggcgtgatcgtggacaaggacttcagccacccccagatgcccaagaaggtggaggacgccaagatcgccatcctgacctgccccttcgagccccccaagcccaagaccaagcacaagctggacgtgaccagcgtggaggactacaaggccctgcagaagtacgagaaggagaagttcgaggagatgatccagcagatcaaggagaccggcgccaacctggccatctgccagtggggcttcgacgacgaggccaaccacctgctgctgcagaacaacctgcccgccgtgagatgggtgggcggccccgagatcgagctgatcgccatcgccaccggcggcagaatcgtgcccagattcagcgagctgaccgccgagaagctgggcttcgccggcctggtgcaggagatcagcttcggcaccaccaaggacaagatgctggtgatcgagcagtgcaagaacagcagagccgtgaccatcttcatcagaggcggcaacaagatgatcatcgaggaggccaagagaagcctgcacgacgccctgtgcgtgatcagaaacctgatcagagacaacagagtggtgtacggcggcggcgccgccgagatcagctgcgccctggccgtgagccaggaggccgacaagtgccccaccctggagcagtacgccatgagagccttcgccgacgccctggaggtgatccccatggccctgagcgagaacagcggcatgaaccccatccagaccatgaccgaggtgagagccagacaggtgaaggagatgaaccccgccctgggcatcgactgcctgcacaagggcaccaacgacatgaagcagcagcacgtgatcgagaccctgatcggcaagaagcagcagatcagcctggccacccagatggtgagaatgatcctgaagatcgacgacatcagaaagcccggcgagagcgaggagtag

SEQ ID NO: 76358 - DNA, 1593 bp, synthetic construct
  misc_feature 1..1593: note = Description of Artificial Sequence: Synthetic coding sequence
  source 1..1593: mol_type = other DNA
atggccgccatcaaggccgtgaacagcaaggccgaggtggccagagccagagccgccctggccgtgaacatctgcgccgccagaggcctgcaggacgtgctgagaaccaacctgggccccaagggcaccatgaagatgctggtgagcggcgccggcgacatcaagctgaccaaggacggcaacgtgctgctggacgagatgcagatccagcaccccaccgccagcctgatcgccaaggtggccaccgcccaggacgacgtgaccggcgacggcaccaccagcaacgtgctgatcatcggcgagctgctgaagcaggccgacctgtacatcagcgagggcctgcaccccagaatcatcgccgagggcttcgaggccgccaagatcaaggccctggaggtgctggaggaggtgaaggtgaccaaggagatgaagagaaagatcctgctggacgtggccagaaccagcctgcagaccaaggtgcacgccgagctggccgacgtgctgaccgaggtggtggtggacagcgtgctggccgtgagaagacccggctaccccatcgacctgttcatggtggagatcatggagatgaagcacaagctgggcaccgacaccaagctgatccagggcctggtgctggaccacggcgccagacaccccgacatgaagaagagagtggaggacgccttcatcctgatctgcaacgtgagcctggagtacgagaagaccgaggtgaacagcggcttcttctacaagaccgccgaggagaaggagaagctggtgaaggccgagagaaagttcatcgaggacagagtgcagaagatcatcgacctgaaggacaaggtgtgcgcccagagcaacaagggcttcgtggtgatcaaccagaagggcatcgaccccttcagcctggacagcctggccaagcacggcatcgtggccctgagaagagccaagagaagaaacatggagagactgagcctggcctgcggcggcatggccgtgaacagcttcgaggacctgaccgtggactgcctgggccacgccggcctggtgtacgagtacaccctgggcgaggagaagttcaccttcatcgaggagtgcgtgaacccctgcagcgtgaccctgctggtgaagggccccaacaagcacaccctgacccaggtgaaggacgccatcagagacggcctgagagccatcaagaacgccatcgaggacggctgcatggtgcccggcgccggcgccatcgaggtggccatggccgaggccctggtgacctacaagaacagcatcaagggcagagccagactgggcgtgcaggccttcgccgacgccctgctgatcatccccaaggtgctggcccagaacgccggctacgacccccaggagaccctggtgaaggtgcaggccgagcacgtggagagcaagcagctggtgggcgtggacctgaacaccggcgagcccatggtggccgccgacgccggcgtgtgggacaactactgcgtgaagaagcagctgctgcacagctgcaccgtgatcgccaccaacatcctgctggtggacgagatcatgagagccggcatgagcagcctgaagtag

SEQ ID NO: 76359 - DNA, 1482 bp, synthetic construct
  misc_feature 1..1482: note = Description of Artificial Sequence: Synthetic coding sequence
  source 1..1482: mol_type = other DNA
atggccgccatcaaggccgtgaacagcaaggccgaggtggccagagccagagccgccctggccgtgaacatctgcgccgccagaggcctgcaggacgtgctgagaaccaacctgggccccaagggcaccatgaagatgctggtgagcggcgccggcgacatcaagctgaccaaggacggcaacgtgctgctggacgagatgcagatccagcaccccaccgccagcctgatcgccaaggtggccaccgcccaggacgacgtgaccggcgacggcaccaccagcaacgtgctgatcatcggcgagctgctgaagcaggccgacctgtacatcagcgagggcctgcaccccagaatcatcgccgagggcttcgaggccgccaagatcaaggccctggaggtgctggaggaggtgaaggtgaccaaggagatgaagagaaagatcctgctggacgtggccagaaccagcctgcagaccaaggtgcacgccgagctggccgacgtgctgaccgaggtggtggtggacagcgtgctggccgtgagaagacccggctaccccatcgacctgttcatggtggagatcatggagatgaagcacaagctgggcaccgacaccaaggaggtgaacagcggcttcttctacaagaccgccgaggagaaggagaagctggtgaaggccgagagaaagttcatcgaggacagagtgcagaagatcatcgacctgaaggacaaggtgtgcgcccagagcaacaagggcttcgtggtgatcaaccagaagggcatcgaccccttcagcctggacagcctggccaagcacggcatcgtggccctgagaagagccaagagaagaaacatggagagactgagcctggcctgcggcggcatggccgtgaacagcttcgaggacctgaccgtggactgcctgggccacgccggcctggtgtacgagtacaccctgggcgaggagaagttcaccttcatcgaggagtgcgtgaacccctgcagcgtgaccctgctggtgaagggccccaacaagcacaccctgacccaggtgaaggacgccatcagagacggcctgagagccatcaagaacgccatcgaggacggctgcatggtgcccggcgccggcgccatcgaggtggccatggccgaggccctggtgacctacaagaacagcatcaagggcagagccagactgggcgtgcaggccttcgccgacgccctgctgatcatccccaaggtgctggcccagaacgccggctacgacccccaggagaccctggtgaaggtgcaggccgagcacgtggagagcaagcagctggtgggcgtggacctgaacaccggcgagcccatggtggccgccgacgccggcgtgtgggacaactactgcgtgaagaagcagctgctgcacagctgcaccgtgatcgccaccaacatcctgctggtggacgagatcatgagagccggcatgagcagcctgaagtag

SEQ ID NO: 76360 - DNA, 1458 bp, synthetic construct
  misc_feature 1..1458: note = Description of Artificial Sequence: Synthetic coding sequence
  source 1..1458: mol_type = other DNA
atggccgccatcaaggccgtgaacagcaaggccgaggtggccagagccagagccgccctggccgtgaacatctgcgccgccagaggcctgcaggacgtgctgagaaccaacctgggccccaagggcaccatgaagatgctggtgagcggcgccggcgacatcaagctgaccaaggacggcaacgtgctgctggacgagatgggcctgcaccccagaatcatcgccgagggcttcgaggccgccaagatcaaggccctggaggtgctggaggaggtgaaggtgaccaaggagatgaagagaaagatcctgctggacgtggccagaaccagcctgcagaccaaggtgcacgccgagctggccgacgtgctgaccgaggtggtggtggacagcgtgctggccgtgagaagacccggctaccccatcgacctgttcatggtggagatcatggagatgaagcacaagctgggcaccgacaccaagctgatccagggcctggtgctggaccacggcgccagacaccccgacatgaagaagagagtggaggacgccttcatcctgatctgcaacgtgagcctggagtacgagaagaccgaggtgaacagcggcttcttctacaagaccgccgaggagaaggagaagctggtgaaggccgagagaaagttcatcgaggacagagtgcagaagatcatcgacctgaaggacaaggtgtgcgcccagagcaacaagggcttcgtggtgatcaaccagaagggcatcgaccccttcagcctggacagcctggccaagcacggcatcgtggccctgagaagagccaagagaagaaacatggagagactgagcctggcctgcggcggcatggccgtgaacagcttcgaggacctgaccgtggactgcctgggccacgccggcctggtgtacgagtacaccctgggcgaggagaagttcaccttcatcgaggagtgcgtgaacccctgcagcgtgaccctgctggtgaagggccccaacaagcacaccctgacccaggtgaaggacgccatcagagacggcctgagagccatcaagaacgccatcgaggacggctgcatggtgcccggcgccggcgccatcgaggtggccatggccgaggccctggtgacctacaagaacagcatcaagggcagagccagactgggcgtgcaggccttcgccgacgccctgctgatcatccccaaggtgctggcccagaacgccggctacgacccccaggagaccctggtgaaggtgcaggccgagcacgtggagagcaagcagctggtgggcgtggacctgaacaccggcgagcccatggtggccgccgacgccggcgtgtgggacaactactgcgtgaagaagcagctgctgcacagctgcaccgtgatcgccaccaacatcctgctggtggacgagatcatgagagccggcatgagcagcctgaagtag

SEQ ID NO: 76361 - DNA, 966 bp, synthetic construct
  misc_feature 1..966: note = Description of Artificial Sequence: Synthetic coding sequence
  source 1..966: mol_type = other DNA
atgaagcccggcttcagccccagaggcggcggcttcggcggcagaggcggcttcggcgacagaggcggcagaggcggcagaggcggcttcggcggcggcagaggcagaggcggcggcttcagaggcagaggcagaggcggcggcggcggcggcggcggcggcggcggcggcggcagaggcggcggcggcttccacagcggcggcaacagaggcagaggcagaggcggcaagagaggcaaccagagcggcaagaacgtgatggtggagccccacagacacgagggcgtgttcatctgcagaggcaaggaggacgccctggtgaccaagaacctggtgcccggcgagagcgtgtacggcgagaagagagtgagcatcagcgagggcgacgacaagatcgagtacagagcctggaaccccttcagaagcaagctggccgccgccatcctgggcggcgtggaccagatccacatcaagcccggcgccaaggtgctgtacctgggcgccgccagcggcaccaccgtgagccacgtgagcgacatcgtgggccccgacggcctggtgtacgccgtggagttcagccacagaagcggcagagacctgatcaacctggccaagaagagaaccaacatcatccccgtgatcgaggacgccagacacccccacaagtacagaatgctgatcgccatggtggacgtgatcttcgccgacgtggcccagcccgaccagaccagaatcgtggccctgaacgcccacaccttcctgagaaacggcggccacttcgtgatcagcatcaaggccaactgcatcgacagcaccgccagcgccgaggccgtgttcgccagcgaggtgaagaagatgcagcaggagaacatgaagccccaggagcagctgaccctggagccctacgagagagaccacgccgtggtggtgggcgtgtacagacccccccccaaggtgaagaactag

SEQ ID NO: 76362 - DNA, 723 bp, synthetic construct
  misc_feature 1..723: note = Description of Artificial Sequence: Synthetic coding sequence
  source 1..723: mol_type = other DNA
atggacgtgcacggcgaggccgccggcgaggccggccaggagggcggcgagggcctgcagggcggcgccggccagagcgaggagggccccagcgccgagaagtgcagagtgtgcccctgcgtgtgcagagagagacacccccaggaggagagaagatgcgagctggccagcgacggcgtgcccagaagaagaagcggcctgcagggcgccgacagctgcgactacgagggcggcgaccaggagtacggccccggcgaccagagccccggccagggccccgagcaccacggccccgccgagggcctgctgagcgacggccaggtgagagccgccggcgccgagcccggcagaccctacatcggcgacggcggcctgcacgagctgggccaccaccccgaccacgccgccggcgccggcggccagccccaccacgccgacagaagaggcgagtggcccggcggcgccggccccgcccagcccgccgccagaggcagactgtgcagaggcagagagctgtgcgcccagcccggcggccccgccgtgaccgaggtgggcagactggaggagctggccgtgcccagaagatgcgccccccccctgcccagagacgtgctggagggcagctgccccctgcccaccgccagctgcctgtgcgccgaccccgccggcctgagacccgccgccaccctgagactgagccccgccagacccgcctggccctag

SEQ ID NO: 76363 - DNA, 591 bp, synthetic construct
  misc_feature 1..591: note = Description of Artificial Sequence: Synthetic coding sequence
  source 1..591: mol_type = other DNA
atggacgacaccctgttccagctgaagttcaccgccaagcagctggagaagctggccaagaaggccgagaaggacagcaaggccgagcaggccaaggtgaagaaggccctgctgcagaagaacgtggagtgcgccagagtgtacgccgagaacgccatcagaaagaagaacgagggcgtgaactggctgagaatggccagcagagtggacgccgtggccagcaaggtgcagaccgccgtgaccatgaagggcgtgaccaagaacatggcccaggtgaccaaggccctggacaaggccctgagcaccatggacctgcagaaggtgagcagcgtgatggacagattcgagcagcaggtgcagaacctggacgtgcacaccagcgtgatggaggacagcatgagcagcgccaccaccctgaccaccccccaggagcaggtggacagcctgatcatgcagatcgccgaggagaacggcctggaggtgctggaccagctgagccagctgcccgagggcgccagcgccgtgggcgagagcagcgtgagaagccaggaggaccagctgagcagaagactggccgccctgagaaactag

SEQ ID NO: 76364 - DNA, 600 bp, synthetic construct
  misc_feature 1..600: note = Description of Artificial Sequence: Synthetic coding sequence
  source 1..600: mol_type = other DNA
atgagcaacatggagaagcacctgttcaacctgaagttcgccgccaaggagctgagcagaagcgccaagaagtgcgacaaggaggagaaggccgagaaggccaagatcaagaaggccatccagaagggcaacatggaggtggccagaatccacgccgagaacgccatcagacagaagaaccaggccgtgaacttcctgagaatgagcgccagagtggacgccgtggccgccagagtgcagaccgccgtgaccatgggcaaggtgaccaagagcatggccggcgtggtgaagagcatggacgccaccctgaagaccatgaacctggagaagatcagcgccctgatggacaagttcgagcaccagttcgagaccctggacgtgcagacccagcagatggaggacaccatgagcagcaccaccaccctgaccaccccccagaaccaggtggacatgctgctgcaggagatggccgacgaggccggcctggacctgaacatggagctgccccagggccagaccggcagcgtgggcaccagcgtggccagcgccgagcaggacgagctgagccagagactggccagactgagagaccaggtgtag

SEQ ID NO: 76365 - DNA, 669 bp, synthetic construct
  misc_feature 1..669: note = Description of Artificial Sequence: Synthetic coding sequence
  source 1..669: mol_type = other DNA
atggacctgctgttcggcagaagaaagacccccgaggagctgctgagacagaaccagagagccctgaacagagccatgagagagctggacagagagagacagaagctggagacccaggagaagaagatcatcgccgacatcaagaagatggccaagcagggccagatggacgccgtgagaatcatggccaaggacctggtgagaaccagaagatacgtgagaaagttcgtgctgatgagagccaacatccaggccgtgagcctgaagatccagaccctgaagagcaacaacagcatggcccaggccatgaagggcgtgaccaaggccatgggcaccatgaacagacagctgaagctgccccagatccagaagatcatgatggagttcgagagacaggccgagatcatggacatgaaggaggagatgatgaacgacgccatcgacgacgccatgggcgacgaggaggacgaggaggagagcgacgccgtggtgagccaggtgctggacgagctgggcctgagcctgaccgacgagctgagcaacctgcccagcaccggcggcagcctgagcgtggccgccggcggcaagaaggccgaggccgccgccagcgccctggccgacgccgacgccgacctggaggagagactgaagaacctgagaagagactag

SEQ ID NO: 76366 - DNA, 669 bp, synthetic construct; identical to SEQ ID NO: 76365
  misc_feature 1..669: note = Description of Artificial Sequence: Synthetic coding sequence
  source 1..669: mol_type = other DNA

SEQ ID NO: 76367 - DNA, 642 bp, synthetic construct
  misc_feature 1..642: note = Description of Artificial Sequence: Synthetic coding sequence
  source 1..642: mol_type = other DNA
atggccagcctgttcaagaagaagaccgtggacgacgtgatcaaggagcagaacagagagctgagaggcacccagagagccatcatcagagacagagccgccctggagaagcaggagaagcagctggagctggagatcaagaagatggccaagatcggcaacaaggaggcctgcaaggtgctggccaagcagctggtgcacctgagaaagcagaagaccagaaccttcgccgtgagcagcaaggtgaccagcatgagcacccagaccaaggtgatgaacagccagatgaagatggccggcgccatgagcaccaccgccaagaccatgcaggccgtgaacaagaagatggacccccagaagaccctgcagaccatgcagaacttccagaaggagaacatgaagatggagatgaccgaggagatgatcaacgacaccctggacgacatcttcgacggcagcgacgacgaggaggagagccaggacatcgtgaaccaggtgctggacgagatcggcatcgagatcagcggcaagatggccaaggcccccagcgccgccagaagcctgcccagcgccagcaccagcaaggccaccatcagcgacgaggagatcgagagacagctgaaggccctgggcgtggactag

SEQ ID NO: 76368 - DNA, 519 bp, synthetic construct
  misc_feature 1..519: note = Description of Artificial Sequence: Synthetic coding sequence
  source 1..519: mol_type = other DNA
atggagctggagatcaagaagatggccaagatcggcaacaaggaggcctgcaaggtgctggccaagcagctggtgcacctgagaaagcagaagaccagaaccttcgccgtgagcagcaaggtgaccagcatgagcacccagaccaaggtgatgaacagccagatgaagatggccggcgccatgagcaccaccgccaagaccatgcaggccgtgaacaagaagatggacccccagaagaccctgcagaccatgcagaacttccagaaggagaacatgaagatggagatgaccgaggagatgatcaacgacaccctggacgacatcttcgacggcagcgacgacgaggaggagagccaggacatcgtgaaccaggtgctggacgagatcggcatcgagatcagcggcaagatggccaaggcccccagcgccgccagaagcctgcccagcgccagcaccagcaaggccaccatcagcgacgaggagatcgagagacagctgaaggccctgggcgtggactag

SEQ ID NO: 76369 - DNA, 669 bp, synthetic construct
  misc_feature 1..669: note = Description of Artificial Sequence: Synthetic coding sequence
  source 1..669: mol_type = other DNA
atgggcctgttcggcaagacccaggagaagccccccaaggagctggtgaacgagtggagcctgaagatcagaaaggagatgagagtggtggacagacagatcagagacatccagagagaggaggagaaggtgaagagaagcgtgaaggacgccgccaagaagggccagaaggacgtgtgcatcgtgctggccaaggagatgatcagaagcagaaaggccgtgagcaagctgtacgccagcaaggcccacatgaacagcgtgctgatgggcatgaagaaccagctggccgtgctgagagtggccggcagcctgcagaagagcaccgaggtgatgaaggccatgcagagcctggtgaagatccccgagatccaggccaccatgagagagctgagcaaggagatgatgaaggccggcatcatcgaggagatgctggaggacaccttcgagagcatggacgaccaggaggagatggaggaggaggccgagatggagatcgacagaatcctgttcgagatcaccgccggcgccctgggcaaggcccccagcaaggtgaccgacgccctgcccgagcccgagccccccggcgccatggccgccagcgaggacgaggaggaggaggaggaggccctggaggccatgcagagcagactggccaccctgagaagctag

SEQ ID NO: 76370 - DNA, 471 bp, synthetic construct
  misc_feature 1..471: note = Description of Artificial Sequence: Synthetic coding sequence
  source 1..471: mol_type = other DNA
atgatcagaagcagaaaggccgtgagcaagctgtacgccagcaaggcccacatgaacagcgtgctgatgggcatgaagaaccagctggccgtgctgagagtggccggcagcctgcagaagagcaccgaggtgatgaaggccatgcagagcctggtgaagatccccgagatccaggccaccatgagagagctgagcaaggagatgatgaaggccggcatcatcgaggagatgctggaggacaccttcgagagcatggacgaccaggaggagatggaggaggaggccgagatggagatcgacagaatcctgttcgagatcaccgccggcgccctgggcaaggcccccagcaaggtgaccgacgccctgcccgagcccgagccccccggcgccatggccgccagcgaggacgaggaggaggaggaggaggccctggaggccatgcagagcagactggccaccctgagaagctag

SEQ ID NO: 76371 - DNA, 756 bp, synthetic construct
  misc_feature 1..756: note = Description of Artificial Sequence: Synthetic coding sequence
  source 1..756: mol_type = other DNA
atggagggcgagctgtacagcgccctgaaggaggaggaggccagcgagagcgtgagcagcaccaacttcagcggcgagatgcacttctacgagctggtggaggacaccaaggacggcatctggctggtgcaggtgaacgagtggagcctgaagatcagaaaggagatgagagtggtggacagacagatcagagacatccagagagaggaggagaaggtgaagagaagcgtgaaggacgccgccaagaagggccagaaggacgtgtgcatcgtgctggccaaggagatgatcagaagcagaaaggccgtgagcaagctgtacgccagcaaggcccacatgaacagcgtgctgatgggcatgaagaaccagctggccgtgctgagagtggccggcagcctgcagaagagcaccgaggtgatgaaggccatgcagagcctggtgaagatccccgagatccaggccaccatgagagagctgagcaaggagatgatgaaggccggcatcatcgaggagatgctggaggacaccttcgagagcatggacgaccaggaggagatggaggaggaggccgagatggagatcgacagaatcctgttcgagatcaccgccggcgccctgggcaaggcccccagcaaggtgaccgacgccctgcccgagcccgagccccccggcgccatggccgccagcgaggacgaggaggaggaggaggaggccctggaggccatgcagagcagactggccaccctgagaagctag

SEQ ID NO: 76372 - DNA, 549 bp, synthetic construct
  misc_feature 1..549: note = Description of Artificial Sequence: Synthetic coding sequence
  source 1..549: mol_type = other DNA
atgggcctgttcggcaagacccaggagaagccccccaaggagctggtgaacgagtggagcctgaagatcagaaaggagatgagagtggtggacagacagatcagagacatccagagagaggaggagaaggtgaagagaagcgtgaaggacgccgccaagaagggccagaaggacgtgtgcatcgtgctggccaaggagatgatcagaagcagaaaggccatgcagagcctggtgaagatccccgagatccaggccaccatgagagagctgagcaaggagatgatgaaggccggcatcatcgaggagatgctggaggacaccttcgagagcatggacgaccaggaggagatggaggaggaggccgagatggagatcgacagaatcctgttcgagatcaccgccggcgccctgggcaaggcccccagcaaggtgaccgacgccctgcccgagcccgagccccccggcgccatggccgccagcgaggacgaggaggaggaggaggaggccctggaggccatgcagagcagactggccaccctgagaagctag

SEQ ID NO: 76373 - DNA, 798 bp, synthetic construct
  misc_feature 1..798: note = Description of Artificial Sequence: Synthetic coding sequence
  source 1..798: mol_type = other DNA
atgagcagaagaagacccgaggacggcctgggcaaggccggcccctgcgtgatgagacaccacccccccagaagcaaggccgaggtgtggagaaccctgagaggcggcggcggcagaggcgagctggccatgagcggcctgggcagactgttcggcaagggcaagaaggagaagggccccacccccgaggaggccatccagaagctgaaggagaccgagaagatcctgatcaagaagcaggagttcctggagcagaagatccagcaggagctgcagaccgccaagaagtacggcaccaagaacaagagagccgccctgcaggccctgagaagaaagaagagattcgagcagcagctggcccagaccgacggcaccctgagcaccctggagttccagagagaggccatcgagaacgccaccaccaacgccgaggtgctgagaaccatggagctggccgcccagagcatgaagaaggcctaccaggacatggacatcgacaaggtggacgagctgatgaccgacatcaccgagcagcaggaggtggcccagcagatcagcgacgccatcagcagacccatgggcttcggcgacgacgtggacgaggacgagctgctggaggagctggaggagctggagcaggaggagctggcccaggagctgctgaacgtgggcgacaaggaggaggagcccagcgtgaagctgcccagcgtgcccagcacccacctgcccgccggccccgcccccaaggtggacgaggacgaggaggccctgaagcagctggccgagtgggtgagctag

SEQ ID NO: 76374 - DNA, 378 bp, synthetic construct
  misc_feature 1..378: note = Description of Artificial Sequence: Synthetic coding sequence
  source 1..378: mol_type = other DNA
atggccggccccagcctggcctgctgcctgctgggcctgctggccctgaccagcgcctgctacatccagaactgccccctgggcggcaagagagccgcccccgacctggacgtgagaaagtgcctgccctgcggccccggcggcaagggcagatgcttcggccccaacatctgctgcgccgaggagctgggctgcttcgtgggcaccgccgaggccctgagatgccaggaggagaactacctgcccagcccctgccagagcggccagaaggcctgcggcagcggcggcagatgcgccgtgctgggcctgtgctgcagccccgacggctgccacgccgaccccgcctgcgacgccgaggccaccttcagccagagatag

SEQ ID NO: 76375 - DNA, 831 bp, synthetic construct
  misc_feature 1..831: note = Description of Artificial Sequence: Synthetic coding sequence
  source 1..831: mol_type = other DNA
atggcccccccccccgcccccctgctggcccccagacccggcgagaccagacccggctgcagaaagcccggcaccgtgagcttcgccgacgtggccgtgtacttcagccccgaggagtggggctgcctgagacccgcccagagagccctgtacagagacgtgatgcaggagacctacggccacctgggcgccctgggcttccccggccccaagcccgccctgatcagctggatggagcaggagagcgaggcctggagccccgccgcccaggaccccgagaagggcgagagactgggcggcgccagaagaggcgacgtgcccaacagaaaggaggaggagcccgaggaggtgcccagagccaagggccccagaaaggcccccgtgaaggagagccccgaggtgctggtggagagaaaccccgaccccgccatcagcgtggcccccgccagagcccagccccccaagaacgccgcctgggaccccaccaccggcgcccagccccccgcccccatccccagcatggacgcccaggccggccagagaagacacgtgtgcaccgactgcggcagaagattcacctaccccagcctgctggtgagccacagaagaatgcacagcggcgagagacccttcccctgccccgagtgcggcatgagattcaagagaaagttcgccgtggaggcccaccagtggatccacagaagctgcagcggcggcagaagaggcagaagacccggcatcagagccgtgcccagagcccccgtgagaggcgacagagacccccccgtgctgttcagacactaccccgacatcttcgaggagtgcggctag

SEQ ID NO: 76376 - DNA, 516 bp, synthetic construct
  misc_feature 1..516: note = Description of Artificial Sequence: Synthetic coding sequence
  source 1..516: mol_type = other DNA
atgaacagactgttcggcaaggccaagcccaaggcccccccccccagcctgaccgactgcatcggcaccgtggacagcagagccgagagcatcgacaagaagatcagcagactggacgccgagctggtgaagtacaaggaccagatcaagaagatgagagagggccccgccaagaacatggtgaagcagaaggccctgagagtgctgaagcagaagagaatgtacgagcagcagagagacaacctggcccagcagagcttcaacatggagcaggccaactacaccatccagagcctgaaggacaccaagaccaccgtggacgccatgaagctgggcgtgaaggagatgaagaaggcctacaagcaggtgaagatcgaccagatcgaggacctgcaggaccagctggaggacatgatggaggacgccaacgagatccaggaggccctgagcagaagctacggcacccccgagctggacgaggacgacctggaggccggctggagcagcggcggctag

SEQ ID NO: 76377 - DNA, 606 bp, synthetic construct
  misc_feature 1..606: note = Description of Artificial Sequence: Synthetic coding sequence
  source 1..606: mol_type = other DNA
atgggcaacctgttcggcagaaagaagcagagcagagtgaccgagcaggacaaggccatcctgcagctgaagcagcagagagacaagctgagacagtaccagaagagaatcgcccagcagctggagagagagagagccctggccagacagctgctgagagacggcagaaaggagagagccaagctgctgctgaagaagaagagataccaggagcagctgctggacagaaccgagaaccagatcagcagcctggaggccatggtgcagagcatcgagttcacccagatcgagatgaaggtgatggagggcctgcagttcggcaacgagtgcctgaacaagatgcaccaggtgatgagcatcgaggaggtggagagaatcctggacgagacccaggaggccgtggagtaccagagacagatcgacgagctgctggccggcagcttcacccaggaggacgaggacgccatcctggaggagctgagcgccatcacccaggagcagatcgagctgcccgaggtgcccagcgagcccctgcccgagaagatccccgagaacgtgcccgtgaaggccagacccagacaggccgagctggtggccgccagctag

SEQ ID NO: 76378 - DNA, 1362 bp, synthetic construct
  misc_feature 1..1362: note = Description of Artificial Sequence: Synthetic coding sequence
  source 1..1362: mol_type = other DNA
atgtggagccccgagagagaggccgaggcccccgccggcggcgaccccgccggcctgctgccccccgagtgggaggaggacgaggagagaatgagcttcctgttcagcgccttcaagagaagcagagaggtgaacagcaccgactgggacagcaagatgggcttctgggcccccctggtgctgagccacagcagaagacagggcgtggtgagactgagactgagagacctgcaggaggccttccagagaaagggcagcgtgcccctgggcctggccaccgtgctgcaggacctgctgagaagaggcgagctgcagagagagagcgacttcatggccagcgtggacagcagctggatcagctggggcgtgggcgtgttcctgctgaagcccctgaagtggaccctgagcaacatgctgggcgacaacaaggtgcccgccgaggaggtgctggtggccgtggagctgctgaaggagaaggccgaggaggtgtacagactgtaccagaacagccccctgagcagccaccccgtggtggccctgagcgagctgagcaccctgtgcgccaacagctgccccgacgagagaaccttctacctggtgctgctgcagctgcagaaggagaagagagtgaccgtgctggagcagaacggcgagaagatcgtgaagttcgccagaggccccagagccaaggtgagccccgtgaacgacgtggacgtgggcgtgtaccagctgatgcagagcgagcagctgctgagcagaaaggtggagagcctgagccaggaggccgagagatgcaaggaggaggccagaagagcctgcagagccggcaagaagcagctggccctgagaagcctgaaggccaagcagagaaccgagaagagaatcgaggccctgcacgccaagctggacaccgtgcagggcatcctggacagaatctacgccagccagaccgaccagatggtgttcaacgcctaccaggccggcgtgggcgccctgaagctgagcatgaaggacgtgaccgtggagaaggccgagagcctggtggaccagatccaggagctgtgcgacacccaggacgaggtgagccagaccctggccggcggcgtgaccaacggcctggacttcgacagcgaggagctggagaaggagctggacatcctgctgcaggacaccaccaaggagcccctggacctgcccgacaaccccagaaacagacacttcaccaacagcgtgcccaaccccagaatcagcgacgccgagctggaggccgagctggagaagctgagcctgagcgagggcggcctggtgcccagcagcaagagccccaagagacagctggagcccaccctgaagcccctgtag

SEQ ID NO: 76379 - DNA, 1362 bp, synthetic construct; identical to SEQ ID NO: 76378
  misc_feature 1..1362: note = Description of Artificial Sequence: Synthetic coding sequence
  source 1..1362: mol_type = other DNA

SEQ ID NO: 76380 - DNA, 1992 bp, synthetic construct
  misc_feature 1..1992: note = Description of Artificial Sequence: Synthetic coding sequence
  source 1..1992: mol_type = other DNA
atggagagacccgaggagggcaagcagagcccccccccccagccctggggcagactgctgagactgggcgccgaggagggcgagccccacgtgctgctgagaaagagagagtggaccatcggcagaagaagaggctgcgacctgagcttccccagcaacaagctggtgagcggcgaccactgcagaatcgtggtggacgagaagagcggccaggtgaccctggaggacaccagcaccagcggcaccgtgatcaacaagctgaaggtggtgaagaagcagacctgccccctgcagaccggcgacgtgatctacctggtgtacagaaagaacgagcccgagcacaacgtggcctacctgtacgagagcctgagcgagaagcagggcatgacccaggagagcttcgaggccaacaaggagaacgtgttccacggcaccaaggacaccagcggcgccggcgccggcagaggcgccgaccccagagtgccccccagcagccccgccacccaggtgtgcttcgaggagccccagcccagcaccagcaccagcgacctgttccccaccgccagcgccagcagcaccgagcccagccccgccggcagagagagaagcagcagctgcggcagcggcggcggcggcatcagccccaagggcagcggccccagcgtggccagcgacgaggtgagcagcttcgccagcgccctgcccgacagaaagaccgccagcttcagcagcctggagccccaggaccaggaggacctggagcccgtgaagaagaagatgagaggcgacggcgacctggacctgaacggccagctgctggtggcccagcccagaagaaacgcccagaccgtgcacgaggacgtgagagccgccgccggcaagcccgacaagatggaggagaccctgacctgcatcatctgccaggacctgctgcacgactgcgtgagcctgcagccctgcatgcacaccttctgcgccgcctgctacagcggctggatggagagaagcagcctgtgccccacctgcagatgccccgtggagagaatctgcaagaaccacatcctgaacaacctggtggaggcctacctgatccagcaccccggcaacagcagaagcgaggaggacgtgcagagcatggacgccagaaacaagatcacccaggacatgctgcagcccaaggtgagaagaagcttcagcgacgaggagggcagcagcgaggacctgctggagctgagcgacgtggacagcgagagcagcgacatcagccagccctacgtggtgtgcagacagtgccccgagtacagaagacaggccgcccagcccccccactgccccgcccccgagggcgagcccggcgccccccaggccctgggcgacgcccccagcaccagcgtgagcctgaccaccgtgcaggactacgtgtgccccctgcagggcagccacgccctgtgcacctgctgcttccagcccatgcccgacagaagagccgagagagagcaggaccccagagtggccccccagcagtgcgccgtgtgcctgcagcccttctgccacctgtactggggctgcaccagaaccggctgctacggctgcctggcccccttctgcgagctgaacctgggcgacaagtgcctggacggcgtgctgaacaacaacagctacgagagcgacatcctgaagaactacctggccaccagaggcctgacctggaagaacatgctgaccgagagcctggtggccctgcagagaggcgtgttcctgctgagcgactacagagtgaccggcgacaccgtgctgtgctactgctgcggcctgagaagcttcagagagctgacctaccagtacagacagaacatccccgccagcgagctgcccgtggccgtgaccagcagacccgactgctactggggcagaaactgcagaacccaggtgaaggcccaccacgccatgaagttcaaccacatctgcgagcagaccagattcaagaactag

SEQ ID NO: 76381 - DNA, 1872 bp, synthetic construct
  misc_feature 1..1872: note = Description of Artificial Sequence: Synthetic coding sequence
  source 1..1872: mol_type = other DNA
atggagagacccgaggagggcaagcagagcccccccccccagccctggggcagactgctgagactgggcgccgaggagggcgagccccacgtgctgctgagaaagagagagtggaccatcggcagaagaagaggctgcgacctgagcttccccagcaacaagctggtgagcggcgaccactgcagaatcgtggtggacgagaagagcggccaggtgaccctggaggacaccagcaccagcggcaccgtgatcaacaagctgaaggtggtgaagaagcagacctgccccctgcagaccggcgacgtgatctacctggtgtacagaaagaacgagcccgagcacaacgtggcctacctgtacgagagcctgagcgagaagcagggcatgacccaggagagcttcgagatggtgccctgctgcgtggcccaggccggcctgaagctgctgggcagcagcgacccccccaccctggccagccagagcatcgtgatcaccggcagcggcggcggcggcatcagccccaagggcagcggccccagcgtggccagcgacgaggtgagcagcttcgccagcgccctgcccgacagaaagaccgccagcttcagcagcctggagccccaggaccaggaggacctggagcccgtgaagaagaagatgagaggcgacggcgacctggacctgaacggccagctgctggtggcccagcccagaagaaacgcccagaccgtgcacgaggacgtgagagccgccgccggcaagcccgacaagatggaggagaccctgacctgcatcatctgccaggacctgctgcacgactgcgtgagcctgcagccctgcatgcacaccttctgcgccgcctgctacagcggctggatggagagaagcagcctgtgccccacctgcagatgccccgtggagagaatctgcaagaaccacatcctgaacaacctggtggaggcctacctgatccagcaccccgacaagagcagaagcgaggaggacgtgcagagcatggacgccagaaacaagatcacccaggacatgctgcagcccaaggtgagaagaagcttcagcgacgaggagggcagcagcgaggacctgctggagctgagcgacgtggacagcgagagcagcgacatcagccagccctacgtggtgtgcagacagtgccccgagtacagaagacaggccgcccagcccccccactgccccgcccccgagggcgagcccggcgccccccaggccctgggcgacgcccccagcaccagcgtgagcctgaccaccgccgtgcaggactacgtgtgccccctgcagggcagccacgccctgtgcacctgctgcttccagcccatgcccgacagaagagccgagagagagcaggaccccagagtggccccccagcagtgcgccgtgtgcctgcagcccttctgccacctgtactggggctgcaccagaaccggctgctacggctgcctggcccccttctgcgagctgaacctgggcgacaagtgcctggacggcgtgctgaacaacaacagctacgagagcgacatcctgaagaactacctggccaccagaggcctgacctggaagaacatgctgaccgagagcctggtggccctgcagagaggcgtgttcctgctgagcgactacagagtgaccggcgacaccgtgctgtgctactgctgcggcctgagaagcttcagagagctgacctaccagtacagacagaacatccccgccagcgagctgcccgtggccgtgaccagcagacccgactgctactggggcagaaactgcagaacccaggtgaaggcccaccacgccatgaagttcaaccacatctgcgagcagaccagattcaagaactag

SEQ ID NO: 76382 - DNA, 1995 bp, synthetic construct
  misc_feature 1..1995: note = Description of Artificial Sequence: Synthetic coding sequence
  source 1..1995: mol_type = other DNA
atggagagacccgaggagggcaagcagagcccccccccccagccctggggcagactgctgagactgggcgccgaggagggcgagccccacgtgctgctgagaaagagagagtggaccatcggcagaagaagaggctgcgacctgagcttccccagcaacaagctggtgagcggcgaccactgcagaatcgtggtggacgagaagagcggccaggtgaccctggaggacaccagcaccagcggcaccgtgatcaacaagctgaaggtggtgaagaagcagacctgccccctgcagaccggcgacgtgatctacctggtgtacagaaagaacgagcccgagcacaacgtggcctacctgtacgagagcctgagcgagaagcagggcatgacccaggagagcttcgaggccaacaaggagaacgtgttccacggcaccaaggacaccagcggcgccggcgccggcagaggcgccgaccccagagtgccccccagcagccccgccacccaggtgtgcttcgaggagccccagcccagcaccagcaccagcgacctgttccccaccgccagcgccagcagcaccgagcccagccccgccggcagagagagaagcagcagctgcggcagcggcggcggcggcatcagccccaagggcagcggccccagcgtggccagcgacgaggtgagcagcttcgccagcgccctgcccgacagaaagaccgccagcttcagcagcctggagccccaggaccaggaggacctggagcccgtgaagaagaagatgagaggcgacggcgacctggacctgaacggccagctgctggtggcccagcccagaagaaacgcccagaccgtgcacgaggacgtgagagccgccgccggcaagcccgacaagatggaggagaccctgacctgcatcatctgccaggacctgctgcacgactgcgtgagcctgcagccctgcatgcacaccttctgcgccgcctgctacagcggctggatggagagaagcagcctgtgccccacctgcagatgccccgtggagagaatctgcaagaaccacatcctgaacaacctggtggaggcctacctgatccagcaccccgacaagagcagaagcgaggaggacgtgcagagcatggacgccagaaacaagatcacccaggacatgctgcagcccaaggtgagaagaagcttcagcgacgaggagggcagcagcgaggacctgctggagctgagcgacgtggacagcgagagcagcgacatcagccagccctacgtggtgtgcagacagtgccccgagtacagaagacaggccgcccagcccccccactgccccgcccccgagggcgagcccggcgccccccaggccctgggcgacgcccccagcaccagcgtgagcctgaccaccgccgtgcaggactacgtgtgccccctgcagggcagccacgccctgtgcacctgctgcttccagcccatgcccgacagaagagccgagagagagcaggaccccagagtggccccccagcagtgcgccgtgtgcctgcagcccttctgccacctgtactggggctgcaccagaaccggctgctacggctgcctggcccccttctgcgagctgaacctgggcgacaagtgcctggacggcgtgctgaacaacaacagctacgagagcgacatcctgaagaactacctggccaccagaggcctgacctggaagaacatgctgaccgagagcctggtggccctgcagagaggcgtgttcctgctgagcgactacagagtgaccggcgacaccgtgctgtgctactgctgcggcctgagaagcttcagagagctgacctaccagtacagacagaacatccccgccagcgagctgcccgtggccgtgaccagcagacccgactgctactggggcagaaactgcagaacccaggtgaaggcccaccacgccatgaagttcaaccacatctgcgagcagaccagattcaagaactag

SEQ ID NO: 76383 - DNA, 1959 bp, synthetic construct
  misc_feature 1..1959: note = Description of Artificial Sequence: Synthetic coding sequence
  source 1..1959: mol_type = other DNA
atggagagacccgaggagggcaagcagagcccccccccccagccctggggcagactgctgagactgggcgccgaggagggcgagccccacgtgctgctgagaaagagagagtggaccatcggcagaagaagaggctgcgacctgagcttccccagcaacaagctggtgagcggcgaccactgcagaatcgtggtggacgagaagagcggccaggtgaccctggaggacaccagcaccagcggcaccgtgatcaacaagctgaaggtggtgaagaagcagacctgccccctgcagaccggcgacgtgatctacctggtgtacagaaagaacgagcccgagcacaacgtggcctacctgtacgagagcctgagcgagaagcagggcatgacccaggagagcttcgacaccagcggcgccggcgccggcagaggcgccgaccccagagtgccccccagcagccccgccacccaggtgtgcttcgaggagccccagcccagcaccagcaccagcgacctgttccccaccgccagcgccagcagcaccgagcccagccccgccggcagagagagaagcagcagctgcggcagcggcggcggcggcatcagccccaagggcagcggccccagcgtggccagcgacgaggtgagcagcttcgccagcgccctgcccgacagaaagaccgccagcttcagcagcctggagccccaggaccaggaggacctggagcccgtgaagaagaagatgagaggcgacggcgacctggacctgaacggccagctgctggtggcccagcccagaagaaacgcccagaccgtgcacgaggacgtgagagccgccgccggcaagcccgacaagatggaggagaccctgacctgcatcatctgccaggacctgctgcacgactgcgtgagcctgcagccctgcatgcacaccttctgcgccgcctgctacagcggctggatggagagaagcagcctgtgccccacctgcagatgccccgtggagagaatctgcaagaaccacatcctgaacaacctggtggaggcctacctgatccagcaccccgacaagagcagaagcgaggaggacgtgcagagcatggacgccagaaacaagatcacccaggacatgctgcagcccaaggtgagaagaagcttcagcgacgaggagggcagcagcgaggacctgctggagctgagcgacgtggacagcgagagcagcgacatcagccagccctacgtggtgtgcagacagtgccccgagtacagaagacaggccgcccagcccccccactgccccgcccccgagggcgagcccggcgccccccaggccctgggcgacgcccccagcaccagcgtgagcctgaccaccgccgtgcaggactacgtgtgccccctgcagggcagccacgccctgtgcacctgctgcttccagcccatgcccgacagaagagccgagagagagcaggaccccagagtggccccccagcagtgcgccgtgtgcctgcagcccttctgccacctgtactggggctgcaccagaaccggctgctacggctgcctggcccccttctgcgagctgaacctgggcgacaagtgcctggacggcgtgctgaacaacaacagctacgagagcgacatcctgaagaactacctggccaccagaggcctgacctggaagaacatgctgaccgagagcctggtggccctgcagagaggcgtgttcctgctgagcgactacagagtgaccggcgacaccgtgctgtgctactgctgcggcctgagaagcttcagagagctgacctaccagtacagacagaacatccccgccagcgagctgcccgtggccgtgaccagcagacccgactgctactggggcagaaactgcagaacccaggtgaaggcccaccacgccatgaagttcaaccacatctgcgagcagaccagattcaagaactag

SEQ ID NO: 76384 - DNA, 672 bp, synthetic construct
  misc_feature 1..672: note = Description of Artificial Sequence: Synthetic coding sequence
  source 1..672: mol_type = other DNA
atggagagacccgaggagggcaagcagagcccccccccccagccctggggcagactgctgagactgggcgccgaggagggcgagccccacgtgctgctgagaaagagagagtggaccatcggcagaagaagaggctgcgacctgagcttccccagcaacaagctggtgagcggcgaccactgcagaatcgtggtggacgagaagagcggccaggtgaccctggaggacaccagcaccagcggcaccgtgatcaacaagctgaaggtggtgaagaagcagacctgccccctgcagaccggcgacgtgatctacctggtgtacagaaagaacgagcccgagcacaacgtggcctacctgtacgagagcctgagcgagaagcagggcatgacccaggagagcttcgacaccagcggcgccggcgccggcagaggcgccgaccccagagtgccccccagcagccccgccacccaggtgtgcttcgaggagccccagcccagcaccagcaccagcgacctgttccccaccgccagcgccagcagcaccgagcccagccccgccggcagagagagaagcagcagctgcggcagcggcggcggcggcatcagccccaagggcagcggccccagcgtggccagcgacgaggtgagcagcttcgccagcgccctgccctag

SEQ ID NO: 76385 - DNA, 1050 bp, synthetic construct
  misc_feature 1..1050: note = Description of Artificial Sequence: Synthetic coding sequence
  source 1..1050: mol_type = other DNA
atgacccaggagagcttcggcagcggcggcggcggcatcagccccaagggcagcggccccagcgtggccagcgacgaggtgagcagcttcgccagcgccctgcccgacagaaagaccgccagcttcagcagcctggagccccaggaccaggaggacctggagcccgtgaagaagaagatgagaggcgacggcgacctggacctgaacggccagctgctggtggcccagcccagaagaaacgcccagaccgtgcacgaggacgtgagagccgccgccggcaagcccgacaagatggaggagaccctgacctgcatcatctgccaggacctgctgcacgactgcgtgagcctgcagccctgcatgcacaccttctgcgccgcctgctacagcggctggatggagagaagcagcctgtgccccacctgcagatgccccgtggagagaatctgcaagaaccacatcctgaacaacctggtggaggcctacctgatccagcaccccgacaagagcagaagcgaggaggacgtgcagagcatggacgccagaaacaagatcacccaggacatgctgcagcccaaggtgagaagaagcttcagcgacgaggagggcagcagcgaggacctgctggagctgagcgacgtggacagcgagagcagcgacatcagccagccctacgtggtgtgcagacagtgccccgagtacagaagacaggccgcccagcccccccactgccccgcccccgagggcgagcccggcgccccccaggccctgggcgacgcccccagcaccagcgtgagcctgaccaccgccgtgcaggactacgtgtgccccctgcagggcagccacgccctgtgcacctgctgcttccagcccatgcccgacagaagagccgagagagagcaggaccccagagtggccccccagcagtgcgccgtgtgcctgcagcccttctgccacctgtactggggctgcaccagaaccggctgctacggctgcctggcccccttctgcgtgagcggcagacagtgcttccccgccaccagcctgtag

SEQ ID NO: 76386 - DNA, 1719 bp, synthetic construct
  misc_feature 1..1719: note = Description of Artificial Sequence: Synthetic coding sequence
  source 1..1719: mol_type = other DNA
atggagagacccgaggagggcaagcagagcccccccccccagccctggggcagactgctgagactgggcgccgaggagggcgagccccacgtgctgctgagaaagagagagtggaccatcggcagaagaagaggctgcgacctgagcttccccagcaacaagctggtgagcggcgaccactgcagaatcgtggtggacgagaagagcggccaggtgaccctggaggacaccagcaccagcggcaccgtgatcaacaagctgaaggtggtgaagaagcagacctgccccctgcagaccggcgacgtgatctacctggtgtacagaaagaacgagcccgagcacagaagcggcggcggcggcatcagccccaagggcagcggccccagcgtggccagcgacgaggtgagcagcttcgccagcgccctgcccgacagaaagaccgccagcttcagcagcctggagccccaggaccaggaggacctggagcccgtgaagaagaagatgagaggcgacggcgacctggacctgaacggccagctgctggtggcccagcccagaagaaacgcccagaccgtgcacgaggacgtgagagccgccgccggcaagcccgacaagatggaggagaccctgacctgcatcatctgccaggacctgctgcacgactgcgtgagcctgcagccctgcatgcacaccttctgcgccgcctgctacagcggctggatggagagaagcagcctgtgccccacctgcagatgccccgtggagagaatctgcaagaaccacatcctgaacaacctggtggaggcctacctgatccagcaccccgacaagagcagaagcgaggaggacgtgcagagcatggacgccagaaacaagatcacccaggacatgctgcagcccaaggtgagaagaagcttcagcgacgaggagggcagcagcgaggacctgctggagctgagcgacgtggacagcgagagcagcgacatcagccagccctacgtggtgtgcagacagtgccccgagtacagaagacaggccgcccagcccccccactgccccgcccccgagggcgagcccggcgccccccaggccctgggcgacgcccccagcaccagcgtgagcctgaccaccgccgtgcaggactacgtgtgccccctgcagggcagccacgccctgtgcacctgctgcttccagcccatgcccgacagaagagccgagagagagcaggaccccagagtggccccccagcagtgcgccgtgtgcctgcagcccttctgccacctgtactggggctgcaccagaaccggctgctacggctgcctggcccccttctgcgagctgaacctgggcgacaagtgcctggacggcgtgctgaacaacaacagctacgagagcgacatcctgaagaactacctggccaccagaggcctgacctggaagaacatgctgaccgagagcctggtggccctgcagagaggcgtgttcctgctgagcgactacagagtgaccggcgacaccgtgctgtgctactgctgcggcctgagaagcttcagagagctgacctaccagtacagacagaacatccccgccagcgagctgcccgtggccgtgaccagcagacccgactgctactggggcagaaactgcagaacccaggtgaaggcccaccacgccatgaagttcaaccacatctgcgagcagaccagattcaagaactag

SEQ ID NO: 76387 - DNA, 345 bp, synthetic construct
  misc_feature 1..345: note = Description of Artificial Sequence: Synthetic coding sequence
  source 1..345: mol_type = other DNA
atgagactgctgatcctggccctgctgggcatctgcagcctgaccgcctacatcgtggagggcgtgggcagcgaggtgagcgacaagagaacctgcgtgagcctgaccacccagagactgcccgtgagcagaatcaagacctacaccatcaccgagggcagcctgagagccgtgatcttcatcaccaagagaggcctgaaggtgtgcgccgacccccaggccacctgggtgagagacgtggtgagaagcatggacagaaagagcaacaccagaaacaacatgatccagaccaagcccaccggcacccagcagagcaccaacaccgccgtgaccctgaccggctag

SEQ ID NO: 76388 - DNA, 345 bp, synthetic construct
  misc_feature 1..345: note = Description of Artificial Sequence: Synthetic coding sequence
  source 1..345: mol_type = other DNA
atgagactgctgatcctggccctgctgggcatctgcagcctgaccgcctacatcgtggagggcgtgggcagcgaggtgagccacagaagaacctgcgtgagcctgaccacccagagactgcccgtgagcagaatcaagacctacaccatcaccgagggcagcctgagagccgtgatcttcatcaccaagagaggcctgaaggtgtgcgccgacccccaggccacctgggtgagagacgtggtgagaagcatggacagaaagagcaacaccagaaacaacatgatccagaccaagcccaccggcacccagcagagcaccaacaccgccgtgaccctgaccggctag

SEQ ID NO: 76389 - DNA, 1002 bp, synthetic construct
  misc_feature 1..1002: note = Description of Artificial Sequence: Synthetic coding sequence
  source 1..1002: mol_type = other DNA
atggagagcagcggcaaccccgagagcaccaccttcttctactacgacctgcagagccagccctgcgagaaccaggcctgggtgttcgccaccctggccaccaccgtgctgtactgcctggtgttcctgctgagcctggtgggcaacagcctggtgctgtgggtgctggtgaagtacgagagcctggagagcctgaccaacatcttcatcctgaacctgtgcctgagcgacctggtgttcgcctgcctgctgcccgtgtggatcagcccctaccactggggctgggtgctgggcgacttcctgtgcaagctgctgaacatgatcttcagcatcagcctgtacagcagcatcttcttcctgaccatcatgaccatccacagatacctgagcgtggtgagccccctgagcaccctgagagtgcccaccctgagatgcagagtgctggtgaccatggccgtgtgggtggccagcatcctgagcagcatcctggacaccatcttccacaaggtgctgagcagcggctgcgactacagcgagctgacctggtacctgaccagcgtgtaccagcacaacctgttcttcctgctgagcctgggcatcatcctgttctgctacgtggagatcctgagaaccctgttcagaagcagaagcaagagaagacacagaaccgtgaagctgatcttcgccatcgtggtggcctacttcctgagctggggcccctacaacttcaccctgttcctgcagaccctgttcagaacccagatcatcagaagctgcgaggccaagcagcagctggagtacgccctgctgatctgcagaaacctggccttcagccactgctgcttcaaccccgtgctgtacgtgttcgtgggcgtgaagttcagaacccacctgaagcacgtgctgagacagttctggttctgcagactgcaggcccccagccccgccagcatcccccacagccccggcgccttcgcctacgagggcgccagcttctactag

SEQ ID NO: 76390 - DNA, 111 bp, synthetic construct
  misc_feature 1..111: note = Description of Artificial Sequence: Synthetic coding sequence
  source 1..111: mol_type = other DNA
atggagagcagcggcaaccccgagagcaccaccttcttctactacgacctgcagagccagccctgcgagaaccaggcctgggtgttcgccaccctggccaccaccgtgtag

SEQ ID NO: 76391 - DNA, 1002 bp, synthetic construct; identical to SEQ ID NO: 76389
  misc_feature 1..1002: note = Description of Artificial Sequence: Synthetic coding sequence
  source 1..1002: mol_type = other DNA

SEQ ID NO: 76392 - DNA, 300 bp, synthetic construct
  misc_feature 1..300: note = Description of Artificial Sequence: Synthetic coding sequence
  source 1..300: mol_type = other DNA
atgaaggtgagcgccgccctgctgtgcctgctgctgatggccgccaccttcagcccccagggcctggcccagcccgacagcgtgagcatccccatcacctgctgcttcaacgtgatcaacagaaagatccccatccagagactggagagctacaccagaatcaccaacatccagtgccccaaggaggccgtgatcttcaagaccaagagaggcaaggaggtgtgcgccgaccccaaggagagatgggtgagagacagcatgaagcacctggaccagatcttccagaacctgaagccctag

SEQ ID NO: 76393 - DNA, 291 bp, synthetic construct
  misc_feature 1..291: note = Description of Artificial Sequence: Synthetic coding sequence
  source 1..291: mol_type = other DNA
atgcagatcatcaccaccgccctggtgtgcctgctgctggccggcatgtggcccgaggacgtggacagcaagagcatgcaggtgcccttcagcagatgctgcttcagcttcgccgagcaggagatccccctgagagccatcctgtgctacagaaacaccagcagcatctgcagcaacgagggcctgatcttcaagctgaagagaggcaaggaggcctgcgccctggacaccgtgggctgggtgcagagacacagaaagatgctgagacactgccccagcaagagaaagtag

SEQ ID NO: 76394 - DNA, 282 bp, synthetic construct
  misc_feature 1..282: note = Description of Artificial Sequence: Synthetic coding sequence
  source 1..282: mol_type = other DNA
atgaagatcagcgtggccgccatccccttcttcctgctgatcaccatcgccctgggcaccaagaccgagagcagcagcagaggcccctaccaccccagcgagtgctgcttcacctacaccacctacaagatccccagacagagaatcatggactactacgagaccaacagccagtgcagcaagcccggcatcgtgttcatcaccaagagaggccacagcgtgtgcaccaaccccagcgacaagtgggtgcaggactacatcaaggacatgaaggagaactag

SEQ ID NO: 76395 - DNA, 330 bp, synthetic construct
  misc_feature 1..330: note = Description of Artificial Sequence: Synthetic coding sequence
  source 1..330: mol_type = other DNA
atgaagatcagcgtggccgccatccccttcttcctgctgatcaccatcgccctgggcaccaagaccgagagcagcagccagaccggcggcaagcccaaggtggtgaagatccagctgaagctggtgggcggcccctaccaccccagcgagtgctgcttcacctacaccacctacaagatccccagacagagaatcatggactactacgagaccaacagccagtgcagcaagcccggcatcgtgttcatcaccaagagaggccacagcgtgtgcaccaaccccagcgacaagtgggtgcaggactacatcaaggacatgaaggagaactag

SEQ ID NO: 76396 - DNA, 330 bp, synthetic construct; identical to SEQ ID NO: 76395
  misc_feature 1..330: note = Description of Artificial Sequence: Synthetic coding sequence
  source 1..330: mol_type = other DNA

SEQ ID NO: 76397 - DNA, 342 bp, synthetic construct
  misc_feature 1..342: note = Description of Artificial Sequence: Synthetic coding sequence
  source 1..342: mol_type = other DNA
atgaaggtgagcgtggccgccctgagctgcctgatgctggtggccgtgctgggcagccaggcccagttcatcaacgacgccgagaccgagctgatgatgagcaagctgcccctggagaaccccgtggtgctgaacagcttccacttcgccgccgactgctgcaccagctacatcagccagagcatcccctgcagcctgatgaagagctacttcgagaccagcagcgagtgcagcaagcccggcgtgatcttcctgaccaagaagggcagacaggtgtgcgccaagcccagcggccccggcgtgcaggactgcatgaagaagctgaagccctacagcatctag

SEQ ID NO: 76398 - DNA, 186 bp, synthetic construct
  misc_feature 1..186: note = Description of Artificial Sequence: Synthetic coding sequence
  source 1..186: mol_type = other DNA
tgatgcaccagctacatcagccagagcatcccctgcagcctgatgaagagctacttcgagaccagcagcgagtgcagcaagcccggcgtgatcttcctgaccaagaagggcagacaggtgtgcgccaagcccagcggccccggcgtgcaggactgcatgaagaagctgaagccctacagcatctag

SEQ ID NO: 76399 - DNA, 342 bp, synthetic construct; identical to SEQ ID NO: 76397
  misc_feature 1..342: note = Description of Artificial Sequence: Synthetic coding sequence
  source 1..342: mol_type = other DNA

SEQ ID NO: 76400 - DNA, 342 bp, synthetic construct; identical to SEQ ID NO: 76397
  misc_feature 1..342: note = Description of Artificial Sequence: Synthetic coding sequence
  source 1..342: mol_type = other DNA

SEQ ID NO: 76401 - DNA, 363 bp, synthetic construct
  misc_feature 1..363: note = Description of Artificial Sequence: Synthetic coding sequence
  source 1..363: mol_type = other DNA
atgaaggtgagcgaggccgccctgagcctgctggtgctgatcctgatcatcaccagcgccagcagaagccagcccaaggtgcccgagtgggtgaacacccccagcacctgctgcctgaagtactacgagaaggtgctgcccagaagactggtggtgggctacagaaaggccctgaactgccacctgcccgccatcatcttcgtgaccaagagaaacagagaggtgtgcaccaaccccaacgacgactgggtgcaggagtacatcaaggaccccaacctgcccctgctgcccaccagaaacctgagcaccgtgaagatcatcaccgccaagaacggccagccccagctgctgaacagccagtag

SEQ ID NO: 76402 - DNA, 1188 bp, synthetic construct
  misc_feature 1..1188: note = Description of Artificial Sequence: Synthetic coding sequence
  source 1..1188: mol_type = other DNA
atggcctggagacacctgaagaagagagcccaggacgccgtgatcatcctgggcggcggcggcctgctgttcgccagctacctgatggccaccggcgacgagagattctacgccgagcacctgatgcccaccctgcagggcctgctggaccccgagagcgcccacagactggccgtgagattcaccagcctgggcctgctgcccagagccagattccaggacagcgacatgctggaggtgagagtgctgggccacaagttcagaaaccccgtgggcatcgccgccggcttcgacaagcacggcgaggccgtggacggcctgtacaagatgggcttcggcttcgtggagatcggcagcgtgacccccaagccccaggagggcaaccccagacccagagtgttcagactgcccgaggaccaggccgtgatcaacagatacggcttcaacagccacggcctgagcgtggtggagcacagactgagagccagacagcagaagcaggccaagctgaccgaggacggcctgcccctgggcgtgaacctgggcaagaacaagaccagcgtggacgccgccgaggactacgccgagggcgtgagagtgctgggccccctggccgactacctggtggtgaacgtgagcagccccaacaccgccggcctgagaagcctgcagggcaaggccgagctgagaagactgctgaccaaggtgctgcaggagagagacggcctgagaagagtgcacagacccgccgtgctggtgaagatcgcccccgacctgaccagccaggacaaggaggacatcgccagcgtggtgaaggagctgggcatcgacggcctgatcgtgaccaacaccaccgtgagcagacccgccggcctgcagggcgccctgagaagcgagaccggcggcctgagcggcaagcccctgagagacctgagcacccagaccatcagagagatgtacgccctgacccagggcagagtgcccatcatcggcgtgggcggcgtgagcagcggccaggacgccctggagaagatcagagccggcgccagcctggtgcagctgtacaccgccctgaccttctggggcccccccgtggtgggcaaggtgaagagagagctggaggccctgctgaaggagcagggcttcggcggcgtgaccgacgccatcggcgccgaccacagaagatag

SEQ ID NO: 76403 - DNA, 270 bp, synthetic construct
  misc_feature 1..270: note = Description of Artificial Sequence: Synthetic coding sequence
  source 1..270: mol_type = other DNA
atgaagggcctggccgccgccctgctggtgctggtgtgcaccatggccctgtgcagctgcgcccaggtgggcaccaacaaggagctgtgctgcctggtgtacaccagctggcagatcccccagaagttcatcgtggactacagcgagaccagcccccagtgccccaagcccggcgtgatcctgctgaccaagagaggcagacagatctgcgccgaccccaacaagaagtgggtgcagaagtacatcagcgacctgaagctgaacgcctag

SEQ ID NO: 76404 - DNA, 297 bp, synthetic construct
  misc_feature 1..297: note = Description of Artificial Sequence: Synthetic coding sequence
  source 1..297: mol_type = other DNA
atggccctgctgctggccctgagcctgctggtgctgtggaccagccccgcccccaccctgagcggcaccaacgacgccgaggactgctgcctgagcgtgacccagaagcccatccccggctacatcgtgagaaacttccactacctgctgatcaaggacggctgcagagtgcccgccgtggtgttcaccaccctgagaggcagacagctgtgcgccccccccgaccagccctgggtggagagaatcatccagagactgcagagaaccagcgccaagatgaagagaagaagcagctag

SEQ ID NO: 76405 - DNA, 315 bp, synthetic construct
  misc_feature 1..315: note = Description of Artificial Sequence: Synthetic coding sequence
  source 1..315: mol_type = other DNA
atggccctgctgctggccctgagcctgctggtgctgtggaccagccccgcccccaccctgagcggcaccaacgacgccgaggactgctgcctgagcgtgacccagaagcccatccccggctacatcgtgagaaacttccactacctgctgatcaaggacggctgcagagtgcccgccgtggtgttcaccaccctgagaggcagacagctgtgcgccccccccgaccagccctgggtggagagaatcatccagagactgcagagaaccagcgccaaggccagcctggccctgcccggccccgtgagcagcctgtag

SEQ ID NO: 76406 - DNA, 291 bp, synthetic construct
  misc_feature 1..291: note = Description of Artificial Sequence: Synthetic coding sequence
  source 1..291: mol_type = other DNA
atgtgctgcaccaagagcctgctgctggccgccctgatgagcgtgctgctgctgcacctgtgcggcgagagcgaggccgccagcaacttcgactgctgcctgggctacaccgacagaatcctgcaccccaagttcatcgtgggcttcaccagacagctggccaacgagggctgcgacatcaacgccatcatcttccacaccaagaagaagctgagcgtgtgcgccaaccccaagcagacctgggtgaagtacatcgtgagactgctgagcaagaaggtgaagaacatgtag

SEQ ID NO: 76407 - DNA, 288 bp, synthetic construct
  misc_feature 1..288: note = Description of Artificial Sequence: Synthetic coding sequence
  source 1..288: mol_type = other DNA
atgtgctgcaccaagagcctgctgctggccgccctgatgagcgtgctgctgctgcacctgtgcggcgagagcgaggccagcaacttcgactgctgcctgggctacaccgacagaatcctgcaccccaagttcatcgtgggcttcaccagacagctggccaacgagggctgcgacatcaacgccatcatcttccacaccaagaagaagctgagcgtgtgcgccaaccccaagcagacctgggtgaagtacatcgtgagactgctgagcaagaaggtgaagaacatgtag

SEQ ID NO: 76408 - DNA, 405 bp, synthetic construct
  misc_feature 1..405: note = Description of Artificial Sequence: Synthetic coding sequence
  source 1..405: mol_type = other DNA
atggcccagagcctggccctgagcctgctgatcctggtgctggccttcggcatccccagaacccagggcagcgacggcggcgcccaggactgctgcctgaagtacagccagagaaagatccccgccaaggtggtgagaagctacagaaagcaggagcccagcctgggctgcagcatccccgccatcctgttcctgcccagaaagagaagccaggccgagctgtgcgccgaccccaaggagctgtgggtgcagcagctgatgcagcacctggacaagacccccagcccccagaagcccgcccagggctgcagaaaggacagaggcgccagcaagaccggcaagaagggcaagggcagcaagggctgcaagagaaccgagagaagccagacccccaagggcccctag

SEQ ID NO: 76409 - DNA, 375 bp, synthetic construct
  misc_feature 1..375: note = Description of Artificial Sequence: Synthetic coding sequence
  source 1..375: mol_type = other DNA
atggcccagagcctggccctgagcctgctgatcctggtgctggccttcggcatccccagaacccagggcagcgacggcggcgcccaggactgctgcctgaagtacagccagagaaagatccccgccaaggtggtgagaagctacagaaagcaggagcccagcctgggctgcagcatccccgccatcctgttcctgcccagaaagagaagccaggccgagctgtgcgccgaccccaaggagctgtgggtgcagcagctgatgcagcacctggacaagacccccagcccccagaagcccgcccagggctgcagaaaggacagaggcgccagcaagaccggcaagaagggcaagggcagcaagggctgcaagagatag

SEQ ID NO: 76410 - DNA, 549 bp, synthetic construct
  misc_feature 1..549: note = Description of Artificial Sequence: Synthetic coding sequence
  source 1..549: mol_type = other DNA
atggccgagttccccagcaaggtgagcaccagaaccagcagccccgcccagggcgccgaggccagcgtgagcgccctgagacccgacctgggcttcgtgagaagcagactgggcgccctgatgctgctgcagctggtgctgggcctgctggtgtgggccctgatcgccgacaccccctaccacctgtaccccgcctacggctgggtgatgttcgtggccgtgttcctgtggctggtgaccatcgtgctgttcaacctgtacctgttccagctgcacatgaagctgtacatggtgccctggcccctggtgctgatgatcttcaacatcagcgccaccgtgctgtacatcaccgccttcatcgcctgcagcgccgccgtggacctgaccagcctgagaggcaccagaccctacaaccagagagccgccgccagcttcttcgcctgcctggtgatgatcgcctacggcgtgagcgccttcttcagctaccaggcctggagaggcgtgggcagcaacgccgccaccagccagatggccggcggctacgcctag

SEQ ID NO: 76411 - DNA, 414 bp, synthetic construct
  misc_feature 1..414: note = Description of Artificial Sequence: Synthetic coding sequence
  source 1..414: mol_type = other DNA
atgaaggtgagcgtggccgccctgagctgcctgatgctggtgaccgccctgggcagccaggccagagtgaccaaggacgccgagaccgagttcatgatgagcaagctgcccctggagaaccccgtgctgctggacatgctgtggagaagaaagatcggcccccagatgaccctgagccacgccgccggcttccacgccaccagcgccgactgctgcatcagctacacccccagaagcatcccctgcagcctgctggagagctacttcgagaccaacagcgagtgcagcaagcccggcgtgatcttcctgaccaagaagggcagaagattctgcgccaaccccagcgacaagcaggtgcaggtgtgcgtgagaatgctgaagctggacaccagaatcaagaccagaaagaactag

SEQ ID NO: 76412 - DNA, 363 bp, synthetic construct
  misc_feature 1..363: note = Description of Artificial Sequence: Synthetic coding sequence
  source 1..363: mol_type = other DNA
atgaaggtgagcgtggccgccctgagctgcctgatgctggtgaccgccctgggcagccaggccagagtgaccaaggacgccgagaccgagttcatgatgagcaagctgcccctggagaaccccgtgctgctggacagattccacgccaccagcgccgactgctgcatcagctacacccccagaagcatcccctgcagcctgctggagagctacttcgagaccaacagcgagtgcagcaagcccggcgtgatcttcctgaccaagaagggcagaagattctgcgccaaccccagcgacaagcaggtgcaggtgtgcgtgagaatgctgaagctggacaccagaatcaagaccagaaagaactag

SEQ ID NO: 76413 - DNA, 2862 bp, synthetic construct
  misc_feature 1..2862: note = Description of Artificial Sequence: Synthetic coding sequence
  source 1..2862: mol_type = other DNA
atggaggagcagggccacagcgagatggagatcatccccagcgagagccacccccacatccagctgctgaagagcaacagagagctgctggtgacccacatcagaaacacccagtgcctggtggacaacctgctgaagaacgactacttcagcgccgaggacgccgagatcgtgtgcgcctgccccacccagcccgacaaggtgagaaagatcctggacctggtgcagagcaagggcgaggaggtgagcgagttcttcctgtacctgctgcagcagctggccgacgcctacgtggacctgagaccctggctgctggagatcggcttcagccccagcctgctgacccagagcaaggtggtggtgaacaccgaccccgtgagcagatacacccagcagctgagacaccacctgggcagagacagcaagttcgtgctgtgctacgcccagaaggaggagctgctgctggaggagatctacatggacaccatcatggagctggtgggcttcagcaacgagagcctgggcagcctgaacagcctggcctgcctgctggaccacaccaccggcatcctgaacgagcagggcgagaccatcttcatcctgggcgacgccggcgtgggcaagagcatgctgctgcagagactgcagagcctgtgggccaccggcagactggacgccggcgtgaagttcttcttccacttcagatgcagaatgttcagctgcttcaaggagagcgacagactgtgcctgcaggacctgctgttcaagcactactgctaccccgagagagaccccgaggaggtgttcgccttcctgctgagattcccccacgtggccctgttcaccttcgacggcctggacgagctgcacagcgacctggacctgagcagagtgcccgacagcagctgcccctgggagcccgcccaccccctggtgctgctggccaacctgctgagcggcaagctgctgaagggcgccagcaagctgctgaccgccagaaccggcatcgaggtgcccagacagttcctgagaaagaaggtgctgctgagaggcttcagccccagccacctgagagcctacgccagaagaatgttccccgagagagccctgcaggacagactgctgagccagctggaggccaaccccaacctgtgcagcctgtgcagcgtgcccctgttctgctggatcatcttcagatgcttccagcacttcagagccgccttcgagggcagcccccagctgcccgactgcaccatgaccctgaccgacgtgttcctgctggtgaccgaggtgcacctgaacagaatgcagcccagcagcctggtgcagagaaacaccagaagccccgtggagaccctgcacgccggcagagacaccctgtgcagcctgggccaggtggcccacagaggcatggagaagagcctgttcgtgttcacccaggaggaggtgcaggccagcggcctgcaggagagagacatgcagctgggcttcctgagagccctgcccgagctgggccccggcggcgaccagcagagctacgagttcttccacctgaccctgcaggccttcttcaccgccttcttcctggtgctggacgacagagtgggcacccaggagctgctgagattcttccaggagtggatgccccccgccggcgccgccaccaccagctgctacccccccttcctgcccttccagtgcctgcagggcagcggccccgccagagaggacctgttcaagaacaaggaccacttccagttcaccaacctgttcctgtgcggcctgctgagcaaggccaagcagaagctgctgagacacctggtgcccgccgccgccctgagaagaaagagaaaggccctgtgggcccacctgttcagcagcctgagaggctacctgaagagcctgcccagagtgcaggtggagagcttcaaccaggtgcaggccatgcccaccttcatctggatgctgagatgcatctacgagacccagagccagaaggtgggccagctggccgccagaggcatctgcgccaactacctgaagctgacctactgcaacgcctgcagcgccgactgcagcgccctgagcttcgtgctgcaccacttccccaagagactggccctggacctggacaacaacaacctgaacgactacggcgtgagagagctgcagccctgcttcagcagactgaccgtgctgagactgagcgtgaaccagatcaccgacggcggcgtgaaggtgctgagcgaggagctgaccaagtacaagatcgtgacctacctgggcctgtacaacaaccagatcaccgacgtgggcgccagatacgtgaccaagatcctggacgagtgcaagggcctgacccacctgaagctgggcaagaacaagatcaccagcgagggcggcaagtacctggccctggccgtgaagaacagcaagagcatcagcgaggtgggcatgtggggcaaccaggtgggcgacgagggcgccaaggccttcgccgaggccctgagaaaccaccccagcctgaccaccctgagcctggccagcaacggcatcagcaccgagggcggcaagagcctggccagagccctgcagcagaacaccagcctggagatcctgtggctgacccagaacgagctgaacgacgaggtggccgagagcctggccgagatgctgaaggtgaaccagaccctgaagcacctgtggctgatccagaaccagatcaccgccaagggcaccgcccagctggccgacgccctgcagagcaacaccggcatcaccgagatctgcctgaacggcaacctgatcaagcccgaggaggccaaggtgtacgaggacgagaagagaatcatctgcttctag

SEQ ID NO: 76414 - DNA, 360 bp, synthetic construct
  misc_feature 1..360: note = Description of Artificial Sequence: Synthetic coding sequence
  source 1..360: mol_type = other DNA
atggccggcctgatgaccatcgtgaccagcctgctgttcctgggcgtgtgcgcccaccacatcatccccaccggcagcgtggtgatccccagcccctgctgcatgttcttcgtgagcaagagaatccccgagaacagagtggtgagctaccagctgagcagcagaagcacctgcctgaaggccggcgtgatcttcaccaccaagaagggccagcagttctgcggcgaccccaagcaggagtgggtgcagagatacatgaagaacctggacgccaagcagaagaaggccagccccagagccagagccgtggccgtgaagggccccgtgcagagataccccggcaaccagaccacctgctag

SEQ ID NO: 76415 - DNA, 450 bp, synthetic construct
  misc_feature 1..450: note = Description of Artificial Sequence: Synthetic coding sequence
  source 1..450: mol_type = other DNA
atgaacctgtggctgctggcctgcctggtggccggcttcctgggcgcctgggcccccgccgtgcacacccagggcgtgttcgaggactgctgcctggcctaccactaccccatcggctgggccgtgctgagaagagcctggacctacagaatccaggaggtgagcggcagctgcaacctgcccgccgccatcttctacctgcccaagagacacagaaaggtgtgcggcaaccccaagagcagagaggtgcagagagccatgaagctgctggacgccagaaacaaggtgttcgccaagctgcaccacaacacccagaccttccagggcccccacgccgtgaagaagctgagcagcggcaacagcaagctgagcagcagcaagttcagcaaccccatcagcagcagcaagagaaacgtgagcctgctgatcagcgccaacagcggcctgtag

SEQ ID NO: 76416 - DNA, 255 bp, synthetic construct
  misc_feature 1..255: note = Description of Artificial Sequence: Synthetic coding sequence
  source 1..255: mol_type = other DNA
atgaacctgtggctgctggcctgcctggtggccggcttcctgggcgcctgggcccccgccgtgcacacccagggcgtgttcgaggactgctgcctggcctaccactaccccatcggctgggccgtgctgagaagagcctggacctacagaatccaggaggtgagcggcagctgcaacctgcccgccgccatcagacccagctgctgcaaggaggtggagttctggaagctgcaggtgatcatcgtgcaggtgtag

SEQ ID NO: 76417 - DNA, 453 bp, synthetic construct
  misc_feature 1..453: note = Description of Artificial Sequence: Synthetic coding sequence
  source 1..453: mol_type = other DNA
atgaacctgtggctgctggcctgcctggtggccggcttcctgggcgcctgggcccccgccgtgcacacccagggcgtgttcgaggactgctgcctggcctaccactaccccatcggctgggccgtgctgagaagagcctggacctacagaatccaggaggtgagcggcagctgcaacctgcccgccgccatcttctacctgcccaagagacacagaaaggtgtgcggcaaccccaagagcagagaggtgcagagagccatgaagctgctggacgccagaaacaaggtgttcgccaagctgcaccacaacacccagaccttccaggccggcccccacgccgtgaagaagctgagcagcggcaacagcaagctgagcagcagcaagttcagcaaccccatcagcagcagcaagagaaacgtgagcctgctgatcagcgccaacagcggcctgtag

SEQ ID NO: 76418 - DNA, 285 bp, synthetic construct
  misc_feature 1..285: note = Description of Artificial Sequence: Synthetic coding sequence
  source 1..285: mol_type = other DNA
atgatgggcctgagcctggccagcgccgtgctgctggccagcctgctgagcctgcacctgggcaccgccaccagaggcagcgacatcagcaagacctgctgcttccagtacagccacaagcccctgccctggacctgggtgagaagctacgagttcaccagcaacagctgcagccagagagccgtgatcttcaccaccaagagaggcaagaaggtgtgcacccaccccagaaagaagtgggtgcagaagtacatcagcctgctgaagacccccaagcagctgtag

SEQ ID NO: 76419 - DNA, 285 bp, synthetic construct; identical to SEQ ID NO: 76418
  misc_feature 1..285: note = Description of Artificial Sequence: Synthetic coding sequence
  source 1..285: mol_type = other DNA

SEQ ID NO: 76420 - DNA, 339 bp, synthetic construct
  misc_feature 1..339: note = Description of Artificial Sequence: Synthetic coding sequence
  source 1..339: mol_type = other DNA
atgaagggcccccccaccttctgcagcctgctgctgctgagcctgctgctgagccccgaccccaccgccgccttcctgctgccccccagcaccgcctgctgcacccagctgtacagaaagcccctgagcgacaagctgctgagaaaggtgatccaggtggagctgcaggaggccgacggcgactgccacctgcaggccttcgtgctgcacctggcccagagaagcatctgcatccacccccagaaccccagcctgagccagtggttcgagcaccaggagagaaagctgcacggcaccctgcccaagctgaacttcggcatgctgagaaagatgggctag

SEQ ID NO: 76421 - DNA, 384 bp, synthetic construct
  misc_feature 1..384: note = Description of Artificial Sequence: Synthetic coding sequence
  source 1..384: mol_type = other DNA
atgcagcagagaggcctggccatcgtggccctggccgtgtgcgccgccctgcacgccagcgaggccatcctgcccatcgccagcagctgctgcaccgaggtgagccaccacatcagcagaagactgctggagagagtgaacatgtgcagaatccagagagccgacggcgactgcgacctggccgccgtgatcctgcacgtgaagagaagaagaatctgcgtgagcccccacaaccacaccgtgaagcagtggatgaaggtgcaggccgccaagaagaacggcaagggcaacgtgtgccacagaaagaagcaccacggcaagagaaacagcaacagagcccaccagggcaagcacgagacctacggccacaagaccccctactag

SEQ ID NO: 76422 - DNA, 384 bp, synthetic construct; identical to SEQ ID NO: 76421
  misc_feature 1..384: note = Description of Artificial Sequence: Synthetic coding sequence
  source 1..384: mol_type = other DNA

SEQ ID NO: 76423 - DNA, 243 bp, synthetic construct
  misc_feature 1..243: note = Description of Artificial Sequence: Synthetic coding sequence
  source 1..243: mol_type = other DNA
atgtgcagaatccagagagccgacggcgactgcgacctggccgccgtgatcctgcacgtgaagagaagaagaatctgcgtgagcccccacaaccacaccgtgaagcagtggatgaaggtgcaggccgccaagaagaacggcaagggcaacgtgtgccacagaaagaagcaccacggcaagagaaacagcaacagagcccaccagggcaagcacgagacctacggccacaagaccccctactag

SEQ ID NO: 76424 - DNA, 354 bp, synthetic construct
  misc_feature 1..354: note = Description of Artificial Sequence: Synthetic coding sequence
  source 1..354: mol_type = other DNA
atgcagcagagaggcctggccatcgtggccctggccgtgtgcgccgccctgcacgccagcgaggccatcctgcccatcgccagcagctgctgcaccgaggtgagccaccacatcagcagaagactgctggagagagtgaacatgtgcagaatccagagagccgacggcgactgcgacctggccgccgtgatgctggagtgcagcgacatgatcagcgcccactacaacctgcacctgcccggcagcaacgacagccccaccagcgccttccaggtggccggcatcaccgccttcatgagcagcgccgaggagagcgtgagcgccagaaccaccatcctgctgagcagcggctag

SEQ ID NO: 76425 - DNA, 282 bp, synthetic construct
  misc_feature 1..282: note = Description of Artificial Sequence: Synthetic coding sequence
  source 1..282: mol_type = other DNA
atgcaggtgagcaccgccgccctggccgtgctgctgtgcaccatggccctgtgcaaccaggtgctgagcgcccccctggccgccgacacccccaccgcctgctgcttcagctacaccagcagacagatcccccagaacttcatcgccgactacttcgagaccagcagccagtgcagcaagcccagcgtgatcttcctgaccaagagaggcagacaggtgtgcgccgaccccagcgaggagtgggtgcagaagtacgtgagcgacctggagctgagcgcctag

SEQ ID NO: 76426 - DNA, 159 bp, synthetic construct
  misc_feature 1..159: note = Description of Artificial Sequence: Synthetic coding sequence
  source 1..159: mol_type = other DNA
atgcaggtgagcaccgccgccctggccgtgctgctgtgcaccatggccctgtgcaaccaggtgctgagcgcccccctgagcagacccagagaggccggcagaagcgtgctgacccccgtgagaagcggcagcagaaacaccagcgtgacctggagctag

SEQ ID NO: 76427 - DNA, 144 bp, synthetic construct
  misc_feature 1..144: note = Description of Artificial Sequence: Synthetic coding sequence
  source 1..144: mol_type = other DNA
atgcaggtgagcaccgccgccctggccgtgctgctgtgcaccatggccctgtgcaaccaggtgctgagcgccccccaggccggcagaagcgtgctgacccccgtgagaagcggcagcagaaacaccagcgtgacctggagctag

SEQ ID NO: 76428 - DNA, 279 bp, synthetic construct
  misc_feature 1..279: note = Description of Artificial Sequence: Synthetic coding sequence
  source 1..279: mol_type = other DNA
atgaagctgtgcgtgaccgtgctgagcctgctgatgctggtggccgccttctgcagccccgccctgagcgcccccatgggcagcgacccccccaccgcctgctgcttcagctacaccgccagaaagctgcccagaaacttcgtggtggactactacgagaccagcagcctgtgcagccagcccgccgtggtgttccagaccaagagaagcaagcaggtgtgcgccgaccccagcgagagctgggtgcaggagtacgtgtacgacctggagctgaactag

SEQ ID NO: 76429 - DNA, 159 bp, synthetic construct
  misc_feature 1..159: note = Description of Artificial Sequence: Synthetic coding sequence
  source 1..159: mol_type = other DNA
atgaagctgtgcgtgaccgtgctgagcctgctgatgctggtggccgccttctgcagccccgccctgagcgcccccaacagcaagcccaaggaggccagcaagagcgtgctgatccccgtgaaccccggcagcagaagcacctgcatgacctggaactag

SEQ ID NO: 76430 - DNA, 159 bp, synthetic construct
  misc_feature 1..159: note = Description of Artificial Sequence: Synthetic coding sequence
  source 1..159: mol_type = other DNA
atgaagctgtgcgtgaccgtgctgagcctgctggtgctggtggccgccttctgcagcctggccctgagcgcccccaacagcaagcccaaggaggccagcaagagcgccctgacccccgtgagccccggcagcagaagcacctgcatgacctggaactag

SEQ ID NO: 76431 - DNA, 207 bp, synthetic construct
  misc_feature 1..207: note = Description of Artificial Sequence: Synthetic coding sequence
  source 1..207: mol_type = other DNA
atgaagctgtgcgtgaccgtgctgagcctgctggtgctggtggccgccttctgcagcctggccctgagcgcccccaccaagagcagcgagtggaagctgcagggcgtgtgcttccagtgctgcagcagaaaggaccccatccaccagagctgccccacctggaccatggtgagacagagaaagatgcccaccaccggcaagggctag

SEQ ID NO: 76432 - DNA, 261 bp, synthetic construct
  misc_feature 1..261: note = Description of Artificial Sequence: Synthetic coding sequence
  source 1..261: mol_type = other DNA
atgaagctgtgcgtgaccgtgctgagcctgctggtgctggtggccgccttctgcagcctggccctgagcgcccccatgggcagcgacccccccaccgcctgctgcttcagctacaccgccagaaagctgcccagaaacttcgtggtggactactacgagaccagcagcctgtgcagccagcccgccgtggtggccgccccccacggcccctggagcggcagaggcagatgcctgccccaggccagagacaaggccagatag

SEQ ID NO: 76433 - DNA, 279 bp, synthetic construct
  misc_feature 1..279: note = Description of Artificial Sequence: Synthetic coding sequence
  source 1..279: mol_type = other DNA
atgaagctgtgcgtgaccgtgctgagcctgctggtgctggtggccgccttctgcagcctggccctgagcgcccccatgggcagcgacccccccaccgcctgctgcttcagctacaccgccagaaagctgcccagaaacttcgtggtggactactacgagaccagcagcctgtgcagccagcccgccgtggtgttccagaccaagagaggcaagcaggtgtgcgccgaccccagcgagagctgggtgcaggagtacgtgtacgacctggagctgaactag

SEQ ID NO: 76434 - DNA, 300 bp, synthetic construct
  misc_feature 1..300: note = Description of Artificial Sequence: Synthetic coding sequence
  source 1..300: mol_type = other DNA
atgaaggtgagcgccgccctgctgtgcctgctgctgatcgccgccaccttcatcccccagggcctggcccagcccgacgccatcaacgcccccgtgacctgctgctacaacttcaccaacagaaagatcagcgtgcagagactggccagctacagaagaatcaccagcagcaagtgccccaaggaggccgtgatcttcaagaccatcgtggccaaggagatctgcgccgaccccaagcagaagtgggtgcaggacagcatggaccacctggacaagcagacccagacccccaagacctag

SEQ ID NO: 76435 - DNA, 330 bp, synthetic construct
  misc_feature 1..330: note = Description of Artificial Sequence: Synthetic coding sequence
  source 1..330: mol_type = other DNA
atgctgaagctgacccccctgcccagcaagatgaaggtgagcgccgccctgctgtgcctgctgctgatggccgccaccttcagcccccagggcctggcccagcccgacagcgtgagcatccccatcacctgctgcttcaacgtgatcaacagaaagatccccatccagagactggagagctacaccagaatcaccaacatccagtgccccaaggaggccgtgatcttcaagaccaagagaggcaaggaggtgtgcgccgaccccaaggagagatgggtgagagacagcatgaagcacctggaccagatcttccagaacctgaagccctag

SEQ ID NO: 76436 - DNA, 1068 bp, synthetic construct
  misc_feature 1..1068: note = Description of Artificial Sequence: Synthetic coding sequence
  source 1..1068: mol_type = other DNA
atggagacccccaacaccaccgaggactacgacaccaccaccgagttcgactacggcgacgccaccccctgccagaaggtgaacgagagagccttcggcgcccagctgctgccccccctgtacagcctggtgttcgtgatcggcctggtgggcaacatcctggtggtgctggtgctggtgcagtacaagagactgaagaacatgaccagcatctacctgctgaacctggccatcagcgacctgctgttcctgttcaccctgcccttctggatcgactacaagctgaaggacgactgggtgttcggcgacgccatgtgcaagatcctgagcggcttctactacaccggcctgtacagcgagatcttcttcatcatcctgctgaccatcgacagatacctggccatcgtgcacgccgtgttcgccctgagagccagaaccgtgaccttcggcgtgatcaccagcatcatcatctgggccctggccatcctggccagcatgcccggcctgtacttcagcaagacccagtgggagttcacccaccacacctgcagcctgcacttcccccacgagagcctgagagagtggaagctgttccaggccctgaagctgaacctgttcggcctggtgctgcccctgctggtgatgatcatctgctacaccggcatcatcaagatcctgctgagaagacccaacgagaagaagagcaaggccgtgagactgatcttcgtgatcatgatcatcttcttcctgttctggaccccctacaacctgaccatcctgatcagcgtgttccaggacttcctgttcacccacgagtgcgagcagagcagacacctggacctggccgtgcaggtgaccgaggtgatcgcctacacccactgctgcgtgaaccccgtgatctacgccttcgtgggcgagagattcagaaagtacctgagacagctgttccacagaagagtggccgtgcacctggtgaagtggctgcccttcctgagcgtggacagactggagagagtgagcagcaccagccccagcaccggcgagcacgagctgagcgccggcttctag

SEQ ID NO: 76437 - DNA, 1089 bp, synthetic construct
  misc_feature 1..1089: note = Description of Artificial Sequence: Synthetic coding sequence
  source 1..1089: mol_type = other DNA
atgggcaccgaggccaccgagcaggtgagctggggccactacagcggcgacgaggaggacgcctacagcgccgagcccctgcccgagctgtgctacaaggccgacgtgcaggccttcagcagagccttccagcccagcgtgagcctgaccgtggccgccctgggcctggccggcaacggcctggtgctggccacccacctggccgccagaagagccgccagaagccccaccagcgcccacctgctgcagctggccctggccgacctgctgctggccctgaccctgcccttcgccgccgccggcgccctgcagggctggagcctgggcagcgccacctgcagaaccatcagcggcctgtacagcgccagcttccacgccggcttcctgttcctggcctgcatcagcgccgacagatacgtggccatcgccagagccctgcccgccggccccagacccagcacccccggcagagcccacctggtgagcgtgatcgtgtggctgctgagcctgctgctggccctgcccgccctgctgttcagccaggacggccagagagagggccagagaagatgcagactgatcttccccgagggcctgacccagaccgtgaagggcgccagcgccgtggcccaggtggccctgggcttcgccctgcccctgggcgtgatggtggcctgctacgccctgctgggcagaaccctgctggccgccagaggccccgagagaagaagagccctgagagtggtggtggccctggtggccgccttcgtggtgctgcagctgccctacagcctggccctgctgctggacaccgccgacctgctggccgccagagagagaagctgccccgccagcaagagaaaggacgtggccctgctggtgaccagcggcctggccctggccagatgcggcctgaaccccgtgctgtacgccttcctgggcctgagattcagacaggacctgagaagactgctgagaggcggcagctgccccagcggcccccagcccagaagaggctgccccagaagacccagactgagcagctgcagcgcccccaccgagacccacagcctgagctgggacaactag

SEQ ID NO: 76438 - DNA, 1125 bp, synthetic construct
  misc_feature 1..1125: note = Description of Artificial Sequence: Synthetic coding sequence
  source 1..1125: mol_type = other DNA
atgctgagcaccagcagaagcagattcatcagaaacaccaacgagagcggcgaggaggtgaccaccttcttcgactacgactacggcgccccctgccacaagttcgacgtgaagcagatcggcgcccagctgctgccccccctgtacagcctggtgttcatcttcggcttcgtgggcaacatgctggtggtgctgatcctgatcaactgcaagaagctgaagtgcctgaccgacatctacctgctgaacctggccatcagcgacctgctgttcctgatcaccctgcccctgtgggcccacagcgccgccaacgagtgggtgttcggcaacgccatgtgcaagctgttcaccggcctgtaccacatcggctacttcggcggcatcttcttcatcatcctgctgaccatcgacagatacctggccatcgtgcacgccgtgttcgccctgaaggccagaaccgtgaccttcggcgtggtgaccagcgtgatcacctggctggtggccgtgttcgccagcgtgcccggcatcatcttcaccaagtgccagaaggaggacagcgtgtacgtgtgcggcccctacttccccagaggctggaacaacttccacaccatcatgagaaacatcctgggcctggtgctgcccctgctgatcatggtgatctgctacagcggcatcctgaagaccctgctgagatgcagaaacgagaagaagagacacagagccgtgagagtgatcttcaccatcatgatcgtgtacttcctgttctggaccccctacaacatcgtgatcctgctgaacaccttccaggagttcttcggcctgagcaactgcgagagcaccagccagctggaccaggccacccaggtgaccgagaccctgggcatgacccactgctgcatcaaccccatcatctacgccttcgtgggcgagaagttcagaagcctgttccacatcgccctgggctgcagaatcgcccccctgcagaagcccgtgtgcggcggccccggcgtgagacccggcaagaacgtgaaggtgaccacccagggcctgctggacggcagaggcaagggcaagagcatcggcagagcccccgaggccagcctgcaggacaaggagggcgcctag

SEQ ID NO: 76439 - DNA, 1125 bp, synthetic construct; identical to SEQ ID NO: 76438
  misc_feature 1..1125: note = Description of Artificial Sequence: Synthetic coding sequence
  source 1..1125: mol_type = other DNA

SEQ ID NO: 76440 - DNA, 366 bp, synthetic construct
  misc_feature 1..366: note = Description of Artificial Sequence: Synthetic coding sequence
  source 1..366: mol_type = other DNA
atgctgagcaccagcagaagcagattcatcagaaacaccaacgagagcggcgaggaggtgaccaccttcttcgactacgactacggcgccccctgccacaagttcgacgtgaagcagatcggcgcccagctgctgccccccctgtacagcctggtgttcatcttcggcttcgtgggcaacatgctggtggtgctgatcctgatcaactgcaagaagctgaagtgcctgaccgacatctacctgctgaacctggccatcagcgacctgctgttcctgatcaccctgcccctgtgggcccacagcgccgccaacgagtgggtgttcggcaacgccatgtgcaagctgttcaccggcctgtaccactag

SEQ ID NO: 76441 - DNA, 1083 bp, synthetic construct
  misc_feature 1..1083: note = Description of Artificial Sequence: Synthetic coding sequence
  source 1..1083: mol_type = other DNA
atgctgagcaccagcagaagcagattcatcagaaacaccaacgagagcggcgaggaggtgaccaccttcttcgactacgactacggcgccccctgccacaagttcgacgtgaagcagatcggcgcccagctgctgccccccctgtacagcctggtgttcatcttcggcttcgtgggcaacatgctggtggtgctgatcctgatcaactgcaagaagctgaagtgcctgaccgacatctacctgctgaacctggccatcagcgacctgctgttcctgatcaccctgcccctgtgggcccacagcgccgccaacgagtgggtgttcggcaacgccatgtgcaagctgttcaccggcctgtaccacatcggctacttcggcggcatcttcttcatcatcctgctgaccatcgacagatacctggccatcgtgcacgccgtgttcgccctgaaggccagaaccgtgaccttcggcgtggtgaccagcgtgatcacctggctggtggccgtgttcgccagcgtgcccggcatcatcttcaccaagtgccagaaggaggacagcgtgtacgtgtgcggcccctacttccccagaggctggaacaacttccacaccatcatgagaaacatcctgggcctggtgctgcccctgctgatcatggtgatctgctacagcggcatcctgaagaccctgctgagatgcagaaacgagaagaagagacacagagccgtgagagtgatcttcaccatcatgatcgtgtacttcctgttctggaccccctacaacatcgtgatcctgctgaacaccttccaggagttcttcggcctgagcaactgcgagagcaccagccagctggaccaggccacccaggtgaccgagaccctgggcatgacccactgctgcatcaaccccatcatctacgccttcgtgggcgagaagttcagaagatacctgagcgtgttcttcagaaagcacatcaccaagagattctgcaagcagtgccccgtgttctacagagagaccgtggacggcgtgaccagcaccaacacccccagcaccggcgagcaggaggtgagcgccggcctgtag

SEQ ID NO: 76442 - DNA, 1068 bp, synthetic construct
  misc_feature 1..1068: note = Description of Artificial Sequence: Synthetic coding sequence
  source 1..1068: mol_type = other DNA
atgaccaccagcctggacaccgtggagaccttcggcaccaccagctactacgacgacgtgggcctgctgtgcgagaaggccgacaccagagccctgatggcccagttcgtgccccccctgtacagcctggtgttcaccgtgggcctgctgggcaacgtggtggtggtgatgatcctgatcaagtacagaagactgagaatcatgaccaacatctacctgctgaacctggccatcagcgacctgctgttcctggtgaccctgcccttctggatccactacgtgagaggccacaactgggtgttcggccacggcatgtgcaagctgctgagcggcttctaccacaccggcctgtacagcgagatcttcttcatcatcctgctgaccatcgacagatacctggccatcgtgcacgccgtgttcgccctgagagccagaaccgtgaccttcggcgtgatcaccagcatcgtgacctggggcctggccgtgctggccgccctgcccgagttcatcttctacgagaccgaggagctgttcgaggagaccctgtgcagcgccctgtaccccgaggacaccgtgtacagctggagacacttccacaccctgagaatgaccatcttctgcctggtgctgcccctgctggtgatggccatctgctacaccggcatcatcaagaccctgctgagatgccccagcaagaagaagtacaaggccatcagactgatcttcgtgatcatggccgtgttcttcatcttctggaccccctacaacgtggccatcctgctgagcagctaccagagcatcctgttcggcaacgactgcgagagaagcaagcacctggacctggtgatgctggtgaccgaggtgatcgcctacagccactgctgcatgaaccccgtgatctacgccttcgtgggcgagagattcagaaagtacctgagacacttcttccacagacacctgctgatgcacctgggcagatacatccccttcctgcccagcgagaagctggagagaaccagcagcgtgagccccagcaccgccgagcccgagctgagcatcgtgttctag

SEQ ID NO: 76443 - DNA, 1068 bp, synthetic construct; identical to SEQ ID NO: 76442
  misc_feature 1..1068: note = Description of Artificial Sequence: Synthetic coding sequence
  source 1..1068: mol_type = other DNA

SEQ ID NO: 76444 - DNA, 1068 bp, synthetic construct; identical to SEQ ID NO: 76442
  misc_feature 1..1068: note = Description of Artificial Sequence: Synthetic coding sequence
  source 1..1068: mol_type = other DNA

SEQ ID NO: 76445 - DNA, 243 bp, synthetic construct
  misc_feature 1..243: note = Description of Artificial Sequence: Synthetic coding sequence
  source 1..243: mol_type = other DNA
atgaccaccagcctggacaccgtggagaccttcggcaccaccagctactacgacgacgtgggcctgctgtgcgagaaggccgacaccagagccctgatggcccagttcgtgccccccctgtacagcctggtgttcaccgtgggcctgctgggcaacgtggtggtggtgatgatcctgatcaagtacagaagactgagaatcatgaccaacatctacctgctgaacctggccatcagcgactag

SEQ ID NO: 76446 - DNA, 66 bp, synthetic construct
  misc_feature 1..66: note = Description of Artificial Sequence: Synthetic coding sequence
  source 1..66: mol_type = other DNA
atgaccaccagcctggacaccgtggagaccttcggcaccaccagctactacgacgacgtgggctag

SEQ ID NO: 76447 - DNA, 1068 bp, synthetic construct; identical to SEQ ID NO: 76442
  misc_feature 1..1068: note = Description of Artificial Sequence: Synthetic coding sequence
  source 1..1068: mol_type = other DNA

SEQ ID NO: 76448 - DNA, 1131 bp, synthetic construct
  misc_feature 1..1131: note = Description of Artificial Sequence: Synthetic coding sequence
  source 1..1131: mol_type = other DNA
atgcccttcggcatcagaatgctgctgagagcccacaagcccggcagcagcagaagaagcgagatgaccaccagcctggacaccgtggagaccttcggcaccaccagctactacgacgacgtgggcctgctgtgcgagaaggccgacaccagagccctgatggcccagttcgtgccccccctgtacagcctggtgttcaccgtgggcctgctgggcaacgtggtggtggtgatgatcctgatcaagtacagaagactgagaatcatgaccaacatctacctgctgaacctggccatcagcgacctgctgttcctggtgaccctgcccttctggatccactacgtgagaggccacaactgggtgttcggccacggcatgtgcaagctgctgagcggcttctaccacaccggcctgtacagcgagatcttcttcatcatcctgctgaccatcgacagatacctggccatcgtgcacgccgtgttcgccctgagagccagaaccgtgaccttcggcgtgatcaccagcatcgtgacctggggcctggccgtgctggccgccctgcccgagttcatcttctacgagaccgaggagctgttcgaggagaccctgtgcagcgccctgtaccccgaggacaccgtgtacagctggagacacttccacaccctgagaatgaccatcttctgcctggtgctgcccctgctggtgatggccatctgctacaccggcatcatcaagaccctgctgagatgccccagcaagaagaagtacaaggccatcagactgatcttcgtgatcatggccgtgttcttcatcttctggaccccctacaacgtggccatcctgctgagcagctaccagagcatcctgttcggcaacgactgcgagagaagcaagcacctggacctggtgatgctggtgaccgaggtgatcgcctacagccactgctgcatgaaccccgtgatctacgccttcgtgggcgagagattcagaaagtacctgagacacttcttccacagacacctgctgatgcacctgggcagatacatccccttcctgcccagcgagaagctggagagaaccagcagcgtgagccccagcaccgccgagcccgagctgagcatcgtgttctag

SEQ ID NO: 76449 - DNA, 1083 bp, synthetic construct
  misc_feature 1..1083: note = Description of Artificial Sequence: Synthetic coding sequence
  source 1..1083: mol_type = other DNA
atgaaccccaccgacatcgccgacaccaccctggacgagagcatctacagcaactactacctgtacgagagcatccccaagccctgcaccaaggagggcatcaaggccttcggcgagctgttcctgccccccctgtacagcctggtgttcgtgttcggcctgctgggcaacagcgtggtggtgctggtgctgttcaagtacaagagactgagaagcatgaccgacgtgtacctgctgaacctggccatcagcgacctgctgttcgtgttcagcctgcccttctggggctactacgccgccgaccagtgggtgttcggcctgggcctgtgcaagatgatcagctggatgtacctggtgggcttctacagcggcatcttcttcgtgatgctgatgagcatcgacagatacctggccatcgtgcacgccgtgttcagcctgagagccagaaccctgacctacggcgtgatcaccagcctggccacctggagcgtggccgtgttcgccagcctgcccggcttcctgttcagcacctgctacaccgagagaaaccacacctactgcaagaccaagtacagcctgaacagcaccacctggaaggtgctgagcagcctggagatcaacatcctgggcctggtgatccccctgggcatcatgctgttctgctacagcatgatcatcagaaccctgcagcactgcaagaacgagaagaagaacaaggccgtgaagatgatcttcgccgtggtggtgctgttcctgggcttctggaccccctacaacatcgtgctgttcctggagaccctggtggagctggaggtgctgcaggactgcaccttcgagagatacctggactacgccatccaggccaccgagaccctggccttcgtgcactgctgcctgaaccccatcatctacttcttcctgggcgagaagttcagaaagtacatcctgcagctgttcaagacctgcagaggcctgttcgtgctgtgccagtactgcggcctgctgcagatctacagcgccgacacccccagcagcagctacacccagagcaccatggaccacgacctgcacgacgccctgtag

SEQ ID NO: 76450 - DNA, 1059 bp, synthetic construct
  misc_feature 1..1059: note = Description of Artificial Sequence: Synthetic coding sequence
  source 1..1059: mol_type = other DNA
atggactaccaggtgagcagccccatctacgacatcaactactacaccagcgagccctgccagaagatcaacgtgaagcagatcgccgccagactgctgccccccctgtacagcctggtgttcatcttcggcttcgtgggcaacatgctggtgatcctgatcctgatcaactgcaagagactgaagagcatgaccgacatctacctgctgaacctggccatcagcgacctgttcttcctgctgaccgtgcccttctgggcccactacgccgccgcccagtgggacttcggcaacaccatgtgccagctgctgaccggcctgtacttcatcggcttcttcagcggcatcttcttcatcatcctgctgaccatcgacagatacctggccgtggtgcacgccgtgttcgccctgaaggccagaaccgtgaccttcggcgtggtgaccagcgtgatcacctgggtggtggccgtgttcgccagcctgcccggcatcatcttcaccagaagccagaaggagggcctgcactacacctgcagcagccacttcccctacagccagtaccagttctggaagaacttccagaccctgaagatcgtgatcctgggcctggtgctgcccctgctggtgatggtgatctgctacagcggcatcctgaagaccctgctgagatgcagaaacgagaagaagagacacagagccgtgagactgatcttcaccatcatgatcgtgtacttcctgttctgggccccctacaacatcgtgctgctgctgaacaccttccaggagttcttcggcctgaacaactgcagcagcagcaacagactggaccaggccatgcaggtgaccgagaccctgggcatgacccactgctgcatcaaccccatcatctacgccttcgtgggcgagaagttcagaaactacctgctggtgttcttccagaagcacatcgccaagagattctgcaagtgctgcagcatcttccagcaggaggcccccgagagagccagcagcgtgtacaccagaagcaccggcgagcaggagatcagcgtgggcctgtag

SEQ ID NO: 76451 - DNA, 1059 bp, synthetic construct; identical to SEQ ID NO: 76450
  misc_feature 1..1059: note = Description of Artificial Sequence: Synthetic coding sequence
  source 1..1059: mol_type = other DNA

SEQ ID NO: 76452 - DNA, 999 bp, synthetic construct
  misc_feature 1..999: note = Description of Artificial Sequence: Synthetic coding sequence
  source 1..999: mol_type = other DNA
ctgcccaagaaccagtgcgaggccaacagaagccccccccccgccagcgccctgctgaccggcgtgcacctgtggttctgcaacatgctggtgatcctgatcctgatcaactgcaagagactgaagagcatgaccgacatctacctgctgaacctggccatcagcgacctgttcttcctgctgaccgtgcccttctgggcccactacgccgccgcccagtgggacttcggcaacaccatgtgccagctgctgaccggcctgtacttcatcggcttcttcagcggcatcttcttcatcatcctgctgaccatcgacagatacctggccgtggtgcacgccgtgttcgccctgaaggccagaaccgtgaccttcggcgtggtgaccagcgtgatcacctgggtggtggccgtgttcgccagcctgcccggcatcatcttcaccagaagccagaaggagggcctgcactacacctgcagcagccacttcccctacagccagtaccagttctggaagaacttccagaccctgaagatcgtgatcctgggcctggtgctgcccctgctggtgatggtgatctgctacagcggcatcctgaagaccctgctgagatgcagaaacgagaagaagagacacagagccgtgagactgatcttcaccatcatgatcgtgtacttcctgttctgggccccctacaacatcgtgctgctgctgaacaccttccaggagttcttcggcctgaacaactgcagcagcagcaacagactggaccaggccatgcaggtgaccgagaccctgggcatgacccactgctgcatcaaccccatcatctacgccttcgtgggcgagaagttcagaaactacctgctggtgttcttccagaagcacatcgccaagagattctgcaagtgctgcagcatcttccagcaggaggcccccgagagagccagcagcgtgtacaccagaagcaccggcgagcaggagatcagcgtgggcctgtag

SEQ ID NO: 76453 - DNA, 1059 bp, synthetic construct; identical to SEQ ID NO: 76450
  misc_feature 1..1059: note = Description of Artificial Sequence: Synthetic coding sequence
  source 1..1059: mol_type = other DNA

SEQ ID NO: 76454 - DNA, 1125 bp, synthetic construct
  misc_feature 1..1125: note = Description of Artificial Sequence: Synthetic coding sequence
  source 1..1125: mol_type = other DNA
atgagcggcgagagcatgaacttcagcgacgtgttcgacagcagcgaggactacttcgtgagcgtgaacaccagctactacagcgtggacagcgagatgctgctgtgcagcctgcaggaggtgagacagttcagcagactgttcgtgcccatcgcctacagcctgatctgcgtgttcggcctgctgggcaacatcctggtggtgatcaccttcgccttctacaagaaggccagaagcatgaccgacgtgtacctgctgaacatggccatcgccgacatcctgttcgtgctgaccctgcccttctgggccgtgagccacgccaccggcgcctgggtgttcagcaacgccacctgcaagctgctgaagggcatctacgccatcaacttcaactgcggcatgctgctgctgacctgcatcagcatggacagatacatcgccatcgtgcaggccaccaagagcttcagactgagaagcagaaccctgcccagaagcaagatcatctgcctggtggtgtggggcctgagcgtgatcatcagcagcagcaccttcgtgttcaaccagaagtacaacacccagggcagcgacgtgtgcgagcccaagtaccagaccgtgagcgagcccatcagatggaagctgctgatgctgggcctggagctgctgttcggcttcttcatccccctgatgttcatgatcttctgctacaccttcatcgtgaagaccctggtgcaggcccagaacagcaagagacacaaggccatcagagtgatcatcgccgtggtgctggtgttcctggcctgccagatcccccacaacatggtgctgctggtgaccgccgccaacctgggcaagatgaacagaagctgccagagcgagaagctgatcggctacaccaagaccgtgaccgaggtgctggccttcctgcactgctgcctgaaccccgtgctgtacgccttcatcggccagaagttcagaaactacttcctgaagatcctgaaggacctgtggtgcgtgagaagaaagtacaagagcagcggcttcagctgcgccggcagatacagcgagaacatcagcagacagaccagcgagaccgccgacaacgacaacgccagcagcttcaccatgtag

SEQ ID NO: 76455 - DNA, 1125 bp, synthetic construct; identical to SEQ ID NO: 76454
  misc_feature 1..1125: note = Description of Artificial Sequence: Synthetic coding sequence
  source 1..1125: mol_type = other DNA

SEQ ID NO: 76456 - DNA, 1125 bp, synthetic construct; identical to SEQ ID NO: 76454
  misc_feature 1..1125: note = Description of Artificial Sequence: Synthetic coding sequence
  source 1..1125: mol_type = other DNA

SEQ ID NO: 76457 - DNA, 1137 bp, synthetic construct
  misc_feature 1..1137: note = Description of Artificial Sequence: Synthetic coding sequence
  source 1..1137: mol_type = other DNA
atggacctgggcaagcccatgaagagcgtgctggtggtggccctgctggtgatcttccaggtgtgcctgtgccaggacgaggtgaccgacgactacatcggcgacaacaccaccgtggactacaccctgttcgagagcctgtgcagcaagaaggacgtgagaaacttcaaggcctggttcctgcccatcatgtacagcatcatctgcttcgtgggcctgctgggcaacggcctggtggtgctgacctacatctacttcaagagactgaagaccatgaccgacacctacctgctgaacctggccgtggccgacatcctgttcctgctgaccctgcccttctgggcctacagcgccgccaagagctgggtgttcggcgtgcacttctgcaagctgatcttcgccatctacaagatgagcttcttcagcggcatgctgctgctgctgtgcatcagcatcgacagatacgtggccatcgtgcaggccgtgagcgcccacagacacagagccagagtgctgctgatcagcaagctgagctgcgtgggcatctggatcctggccaccgtgctgagcatccccgagctgctgtacagcgacctgcagagaagcagcagcgagcaggccatgagatgcagcctgatcaccgagcacgtggaggccttcatcaccatccaggtggcccagatggtgatcggcttcctggtgcccctgctggccatgagcttctgctacctggtgatcatcagaaccctgctgcaggccagaaacttcgagagaaacaaggccatcaaggtgatcatcgccgtggtggtggtgttcatcgtgttccagctgccctacaacggcgtggtgctggcccagaccgtggccaacttcaacatcaccagcagcacctgcgagctgagcaagcagctgaacatcgcctacgacgtgacctacagcctggcctgcgtgagatgctgcgtgaaccccttcctgtacgccttcatcggcgtgaagttcagaaacgacctgttcaagctgttcaaggacctgggctgcctgagccaggagcagctgagacagtggagcagctgcagacacatcagaagaagcagcatgagcgtggaggccgagaccaccaccaccttcagcccctag

SEQ ID NO: 76458 - DNA, 1068 bp, synthetic construct
  misc_feature 1..1068: note = Description of Artificial Sequence: Synthetic coding sequence
  source 1..1068: mol_type = other DNA
atggactacaccctggacctgagcgtgaccaccgtgaccgactactactaccccgacatcttcagcagcccctgcgacgccgagctgatccagaccaacggcaagctgctgctggccgtgttctactgcctgctgttcgtgttcagcctgctgggcaacagcctggtgatcctggtgctggtggtgtgcaagaagctgagaagcatcaccgacgtgtacctgctgaacctggccctgagcgacctgctgttcgtgttcagcttccccttccagacctactacctgctggaccagtgggtgttcggcaccgtgatgtgcaaggtggtgagcggcttctactacatcggcttctacagcagcatgttcttcatcaccctgatgagcgtggacagatacctggccgtggtgcacgccgtgtacgccctgaaggtgagaaccatcagaatgggcaccaccctgtgcctggccgtgtggctgaccgccatcatggccaccatccccctgctggtgttctaccaggtggccagcgaggacggcgtgctgcagtgctacagcttctacaaccagcagaccctgaagtggaagatcttcaccaacttcaagatgaacatcctgggcctgctgatccccttcaccatcttcatgttctgctacatcaagatcctgcaccagctgaagagatgccagaaccacaacaagaccaaggccatcagactggtgctgatcgtggtgatcgccagcctgctgttctgggtgcccttcaacgtggtgctgttcctgaccagcctgcacagcatgcacatcctggacggctgcagcatcagccagcagctgacctacgccacccacgtgaccgagatcatcagcttcacccactgctgcgtgaaccccgtgatctacgccttcgtgggcgagaagttcaagaagcacctgagcgagatcttccagaagagctgcagccagatcttcaactacctgggcagacagatgcccagagagagctgcgagaagagcagcagctgccagcagcacagcagcagaagcagcagcgtggactacatcctgtag

SEQ ID NO: 76459 - DNA, 819 bp, synthetic construct
  misc_feature 1..819: note = Description of Artificial Sequence: Synthetic coding sequence
  source 1..819: mol_type = other DNA
atgagaaacctgttcagacagatgacctactacctgctggaccagtgggtgttcggcaccgtgatgtgcaaggtggtgagcggcttctactacatcggcttctacagcagcatgttcttcatcaccctgatgagcgtggacagatacctggccgtggtgcacgccgtgtacgccctgaaggtgagaaccatcagaatgggcaccaccctgtgcctggccgtgtggctgaccgccatcatggccaccatccccctgctggtgttctaccaggtggccagcgaggacggcgtgctgcagtgctacagcttctacaaccagcagaccctgaagtggaagatcttcaccaacttcaagatgaacatcctgggcctgctgatccccttcaccatcttcatgttctgctacatcaagatcctgcaccagctgaagagatgccagaaccacaacaagaccaaggccatcagactggtgctgatcgtggtgatcgccagcctgctgttctgggtgcccttcaacgtggtgctgttcctgaccagcctgcacagcatgcacatcctggacggctgcagcatcagccagcagctgacctacgccacccacgtgaccgagatcatcagcttcacccactgctgcgtgaaccccgtgatctacgccttcgtgggcgagaagttcaagaagcacctgagcgagatcttccagaagagctgcagccagatcttcaactacctgggcagacagatgcccagagagagctgcgagaagagcagcagctgccagcagcacagcagcagaagcagcagcgtggactacatcctgtag

SEQ ID NO: 76460 - DNA, 1074 bp, synthetic construct
  misc_feature 1..1074: note = Description of Artificial Sequence: Synthetic coding sequence
  source 1..1074: mol_type = other DNA
atggccgacgactacggcagcgagagcaccagcagcatggaggactacgtgaacttcaacttcaccgacttctactgcgagaagaacaacgtgagacagttcgccagccacttcctgccccccctgtactggctggtgttcatcgtgggcgccctgggcaacagcctggtgatcctggtgtactggtactgcaccagagtgaagaccatgaccgacatgttcctgctgaacctggccatcgccgacctgctgttcctggtgaccctgcccttctgggccatcgccgccgccgaccagtggaagttccagaccttcatgtgcaaggtggtgaacagcatgtacaagatgaacttctacagctgcgtgctgctgatcatgtgcatcagcgtggacagatacatcgccatcgcccaggccatgagagcccacacctggagagagaagagactgctgtacagcaagatggtgtgcttcaccatctgggtgctggccgccgccctgtgcatccccgagatcctgtacagccagatcaaggaggagagcggcatcgccatctgcaccatggtgtaccccagcgacgagagcaccaagctgaagagcgccgtgctgaccctgaaggtgatcctgggcttcttcctgcccttcgtggtgatggcctgctgctacaccatcatcatccacaccctgatccaggccaagaagagcagcaagcacaaggccctgaaggtgaccatcaccgtgctgaccgtgttcgtgctgagccagttcccctacaactgcatcctgctggtgcagaccatcgacgcctacgccatgttcatcagcaactgcgccgtgagcaccaacatcgacatctgcttccaggtgacccagaccatcgccttcttccacagctgcctgaaccccgtgctgtacgtgttcgtgggcgagagattcagaagagacctggtgaagaccctgaagaacctgggctgcatcagccaggcccagtgggtgagcttcaccagaagagagggcagcctgaagctgagcagcatgctgctggagaccaccagcggcgccctgagcctgtag

SEQ ID NO: 76461 - DNA, 1110 bp, synthetic construct
  misc_feature 1..1110: note = Description of Artificial Sequence: Synthetic coding sequence
  source 1..1110: mol_type = other DNA
atgacccccaccgacttcaccagccccatccccaacatggccgacgactacggcagcgagagcaccagcagcatggaggactacgtgaacttcaacttcaccgacttctactgcgagaagaacaacgtgagacagttcgccagccacttcctgccccccctgtactggctggtgttcatcgtgggcgccctgggcaacagcctggtgatcctggtgtactggtactgcaccagagtgaagaccatgaccgacatgttcctgctgaacctggccatcgccgacctgctgttcctggtgaccctgcccttctgggccatcgccgccgccgaccagtggaagttccagaccttcatgtgcaaggtggtgaacagcatgtacaagatgaacttctacagctgcgtgctgctgatcatgtgcatcagcgtggacagatacatcgccatcgcccaggccatgagagcccacacctggagagagaagagactgctgtacagcaagatggtgtgcttcaccatctgggtgctggccgccgccctgtgcatccccgagatcctgtacagccagatcaaggaggagagcggcatcgccatctgcaccatggtgtaccccagcgacgagagcaccaagctgaagagcgccgtgctgaccctgaaggtgatcctgggcttcttcctgcccttcgtggtgatggcctgctgctacaccatcatcatccacaccctgatccaggccaagaagagcagcaagcacaaggccctgaaggtgaccatcaccgtgctgaccgtgttcgtgctgagccagttcccctacaactgcatcctgctggtgcagaccatcgacgcctacgccatgttcatcagcaactgcgccgtgagcaccaacatcgacatctgcttccaggtgacccagaccatcgccttcttccacagctgcctgaaccccgtgctgtacgtgttcgtgggcgagagattcagaagagacctggtgaagaccctgaagaacctgggctgcatcagccaggcccagtgggtgagcttcaccagaagagagggcagcctgaagctgagcagcatgctgctggagaccaccagcggcgccctgagcctgtag

SEQ ID NO: 76462 - DNA, 1074 bp, synthetic construct; identical to SEQ ID NO: 76460
  misc_feature 1..1074: note = Description of Artificial Sequence: Synthetic coding sequence
  source 1..1074: mol_type = other DNA

SEQ ID NO: 76463 - DNA, 1053 bp, synthetic construct
  misc_feature 1..1053: note = Description of Artificial Sequence: Synthetic coding sequence
  source 1..1053: mol_type = other DNA
atggccctggagcagaaccagagcaccgactactactacgaggagaacgagatgaacggcacctacgactacagccagtacgagctgatctgcatcaaggaggacgtgagagagttcgccaaggtgttcctgcccgtgttcctgaccatcgtgttcgtgatcggcctggccggcaacagcatggtggtggccatctacgcctactacaagaagcagagaaccaagaccgacgtgtacatcctgaacctggccgtggccgacctgctgctgctgttcaccctgcccttctgggccgtgaacgccgtgcacggctgggtgctgggcaagatcatgtgcaagatcaccagcgccctgtacaccctgaacttcgtgagcggcatgcagttcctggcctgcatcagcatcgacagatacgtggccgtgaccaaggtgcccagccagagcggcgtgggcaagccctgctggatcatctgcttctgcgtgtggatggccgccatcctgctgagcatcccccagctggtgttctacaccgtgaacgacaacgccagatgcatccccatcttccccagatacctgggcaccagcatgaaggccctgatccagatgctggagatctgcatcggcttcgtggtgcccttcctgatcatgggcgtgtgctacttcatcaccgccagaaccctgatgaagatgcccaacatcaagatcagcagacccctgaaggtgctgctgaccgtggtgatcgtgttcatcgtgacccagctgccctacaacatcgtgaagttctgcagagccatcgacatcatctacagcctgatcaccagctgcaacatgagcaagagaatggacatcgccatccaggtgaccgagagcatcgccctgttccacagctgcctgaaccccatcctgtacgtgttcatgggcgccagcttcaagaactacgtgatgaaggtggccaagaagtacggcagctggagaagacagagacagagcgtggaggagttccccttcgacagcgagggccccaccgagcccaccagcaccttcagcatctag

SEQ ID NO: 76464 - DNA, 825 bp, synthetic construct
  misc_feature 1..825: note = Description of Artificial Sequence: Synthetic coding sequence
  source 1..825: mol_type = other DNA
atggccctggagcagaaccagagcaccgactactactacgaggagaacgagatgaacggcacctacgactacagccagtacgagctgatctgcatcaaggaggacgtgagagagttcgccaaggtgttcctgcccgtgttcctgaccatcgtgttcgtgatcggcctggccggcaacagcatggtggtggccatctacgcctactacaagaagcagagaaccaagaccgacgtgtacatcctgaacctggccgtggccgacctgctgctgctgttcaccctgcccttctgggccgtgaacgccgtgcacggctgggtgctgggcaagatcatgtgcaagatcaccagcgccctgtacaccctgaacttcgtgagcggcatgcagttcctggcctgcatcagcatcgacagatacgtggccgtgaccaaggtgcccagccagagcggcgtgggcaagccctgctggatcatctgcttctgcgtgtggatggccgccatcctgctgagcatcccccagctggtgttctacaccgtgaacgacaacgccagatgcatccccatcttccccagatacctgggcaccagcatgaaggccctgatccagatgctggagatctgcatcggcttcgtggtgcccttcctgatcatgggcgtgtgctacttcatcaccgccagaaccctgatgaagatgcccaacatcaagatcagcagacccctgaaggtgctgctgaccgtggtgatcgtgttcatcgtgacccagctgcccttcgcctggatccacatgaacgacgccttccccagcaacaagaccagcgccctgttctag

SEQ ID NO: 76465 - DNA, 1071 bp, synthetic construct
  misc_feature 1..1071: note = Description of Artificial Sequence: Synthetic coding sequence
  source 1..1071: mol_type = other DNA
atgatctacaccagattcctgaagggcagcctgaagatggccaactacaccctggcccccgaggacgagtacgacgtgctgatcgagggcgagctggagagcgacgaggccgagcagtgcgacaagtacgacgcccaggccctgagcgcccagctggtgcccagcctgtgcagcgccgtgttcgtgatcggcgtgctggacaacctgctggtggtgctgatcctggtgaagtacaagggcctgaagagagtggagaacatctacctgctgaacctggccgtgagcaacctgtgcttcctgctgaccctgcccttctgggcccacgccggcggcgaccccatgtgcaagatcctgatcggcctgtacttcgtgggcctgtacagcgagaccttcttcaactgcctgctgaccgtgcagagatacctggtgttcctgcacaagggcaacttcttcagcgccagaagaagagtgccctgcggcatcatcaccagcgtgctggcctgggtgaccgccatcctggccaccctgcccgagttcgtggtgtacaagccccagatggaggaccagaagtacaagtgcgccttcagcagaacccccttcctgcccgccgacgagaccttctggaagcacttcctgaccctgaagatgaacatcagcgtgctggtgctgcccctgttcatcttcaccttcctgtacgtgcagatgagaaagaccctgagattcagagagcagagatacagcctgttcaagctggtgttcgccatcatggtggtgttcctgctgatgtgggccccctacaacatcgccttcttcctgagcaccttcaaggagcacttcagcctgagcgactgcaagagcagctacaacctggacaagagcgtgcacatcaccaagctgatcgccaccacccactgctgcatcaaccccctgctgtacgccttcctggacggcaccttcagcaagtacctgtgcagatgcttccacctgagaagcaacacccccctgcagcccagaggccagagcgcccagggcaccagcagagaggagcccgaccacagcaccgaggtgtag

SEQ ID NO: 76466 - DNA, 1035 bp, synthetic construct
  misc_feature 1..1035: note = Description of Artificial Sequence: Synthetic coding sequence
  source 1..1035: mol_type = other DNA
atggccaactacaccctggcccccgaggacgagtacgacgtgctgatcgagggcgagctggagagcgacgaggccgagcagtgcgacaagtacgacgcccaggccctgagcgcccagctggtgcccagcctgtgcagcgccgtgttcgtgatcggcgtgctggacaacctgctggtggtgctgatcctggtgaagtacaagggcctgaagagagtggagaacatctacctgctgaacctggccgtgagcaacctgtgcttcctgctgaccctgcccttctgggcccacgccggcggcgaccccatgtgcaagatcctgatcggcctgtacttcgtgggcctgtacagcgagaccttcttcaactgcctgctgaccgtgcagagatacctggtgttcctgcacaagggcaacttcttcagcgccagaagaagagtgccctgcggcatcatcaccagcgtgctggcctgggtgaccgccatcctggccaccctgcccgagttcgtggtgtacaagccccagatggaggaccagaagtacaagtgcgccttcagcagaacccccttcctgcccgccgacgagaccttctggaagcacttcctgaccctgaagatgaacatcagcgtgctggtgctgcccctgttcatcttcaccttcctgtacgtgcagatgagaaagaccctgagattcagagagcagagatacagcctgttcaagctggtgttcgccatcatggtggtgttcctgctgatgtgggccccctacaacatcgccttcttcctgagcaccttcaaggagcacttcagcctgagcgactgcaagagcagctacaacctggacaagagcgtgcacatcaccaagctgatcgccaccacccactgctgcatcaaccccctgctgtacgccttcctggacggcaccttcagcaagtacctgtgcagatgcttccacctgagaagcaacacccccctgcagcccagaggccagagcgcccagggcaccagcagagaggagcccgaccacagcaccgaggtgtag

SEQ ID NO: 76467 - DNA, 1035 bp, synthetic construct; identical to SEQ ID NO: 76466
  misc_feature 1..1035: note = Description of Artificial Sequence: Synthetic coding sequence
  source 1..1035: mol_type = other DNA

SEQ ID NO: 76468 - DNA, 1035 bp, synthetic construct; identical to SEQ ID NO: 76466
  misc_feature 1..1035: note = Description of Artificial Sequence: Synthetic coding sequence
  source 1..1035: mol_type = other DNA

SEQ ID NO: 76469 - DNA, 654 bp, synthetic construct
  misc_feature 1..654: note = Description of Artificial Sequence: Synthetic coding sequence
  source 1..654: mol_type = other DNA
atggccaactacaccctggcccccgaggacgagtacgacgtgctgatcgagggcgagctggagagcgacgaggccgagcagtgcgacaagtacgacgcccaggccctgagcgcccagctggtgcccagcctgtgcagcgccgtgttcgtgatcggcgtgctggacaacctgctggtggtgctgatcctggtgaagtacaagggcctgaagagagtggagaacatctacctgctgaacctggccgtgagcaacctgtgcttcctgctgaccctgcccttctgggcccacgccggcggcgaccccatgtgcaagatcctgatcggcctgtacttcgtgggcctgtacagcgagaccttcttcaactgcctgctgaccgtgcagagatacctggtgttcctgcacaagggcaacttcttcagcgccagaagaagagtgccctgcggcatcatcaccagcgtgctggcctgggtgaccgccatcctggccaccctgcccgagttcgtggtgtacaagccccagatggaggaccagaagtacaagtgcgccttcagcagaacccccttcctgcccgccgacgagaccttctggaagcacttcctgaccctgaagatgaacatcagcgtgctggtgctgcccctgttcatcttcacctag

SEQ ID NO: 76470 - DNA, 1194 bp, synthetic construct
  misc_feature 1..1194: note = Description of Artificial Sequence: Synthetic coding sequence
  source 1..1194: mol_type = other DNA
atggcccccatcagcctgagctggctgctgagactggccaccttctgccacctgaccgtgctgctggccggccagcaccacggcgtgaccaagtgcaacatcacctgcagcaagatgaccagcaagatccccgtggccctgctgatccactaccagcagaaccaggccagctgcggcaagagagccatcatcctggagaccagacagcacagactgttctgcgccgaccccaaggagcagtgggtgaaggacgccatgcagcacctggacagacaggccgccgccctgaccagaaacggcggcaccttcgagaagcagatcggcgaggtgaagcccagaaccacccccgccgccggcggcatggacgagagcgtggtgctggagcccgaggccaccggcgagagcagcagcctggagcccacccccagcagccaggaggcccagagagccctgggcaccagccccgagctgcccaccggcgtgaccggcagcagcggcaccagactgccccccacccccaaggcccaggacggcggccccgtgggcaccgagctgttcagagtgccccccgtgagcaccgccgccacctggcagagcagcgccccccaccagcccggccccagcctgtgggccgaggccaagaccagcgaggcccccagcacccaggaccccagcacccaggccagcaccgccagcagccccgcccccgaggagaacgcccccagcgagggccagagagtgtggggccagggccagagccccagacccgagaacagcctggagagagaggagatgggccccgtgcccgcccacaccgacgccttccaggactggggccccggcagcatggcccacgtgagcgtggtgcccgtgagcagcgagggcacccccagcagagagcccgtggccagcggcagctggacccccaaggccgaggagcccatccacgccaccatggacccccagagactgggcgtgctgatcacccccgtgcccgacgcccaggccgccaccagaagacaggccgtgggcctgctggccttcctgggcctgctgttctgcctgggcgtggccatgttcacctaccagagcctgcagggctgccccagaaagatggccggcgagatggccgagggcctgagatacatccccagaagctgcggcagcaacagctacgtgctggtgcccgtgtag

SEQ ID NO: 76471 - DNA, 1164 bp, synthetic construct
  misc_feature 1..1164: note = Description of Artificial Sequence: Synthetic coding sequence
  source 1..1164: mol_type = other DNA
atgagagagcccctggaggccttcaagctggccgacctggacttcagaaagagcagcctggccagcggctggagaatggccagcggcgccttcaccatggaccagttccccgagagcgtgaccgagaacttcgagtacgacgacctggccgaggcctgctacatcggcgacatcgtggtgttcggcaccgtgttcctgagcatcttctacagcgtgatcttcgccatcggcctggtgggcaacctgctggtggtgttcgccctgaccaacagcaagaagcccaagagcgtgaccgacatctacctgctgaacctggccctgagcgacctgctgttcgtggccaccctgcccttctggacccactacctgatcaacgagaagggcctgcacaacgccatgtgcaagttcaccaccgccttcttcttcatcggcttcttcggcagcatcttcttcatcaccgtgatcagcatcgacagatacctggccatcgtgctggccgccaacagcatgaacaacagaaccgtgcagcacggcgtgaccatcagcctgggcgtgtgggccgccgccatcctggtggccgccccccagttcatgttcaccaagcagaaggagaacgagtgcctgggcgactaccccgaggtgctgcaggagatctggcccgtgctgagaaacgtggagaccaacttcctgggcttcctgctgcccctgctgatcatgagctactgctacttcagaatcatccagaccctgttcagctgcaagaaccacaagaaggccaaggccatcaagctgatcctgctggtggtgatcgtgttcttcctgttctggaccccctacaacgtgatgatcttcctggagaccctgaagctgtacgacttcttccccagctgcgacatgagaaaggacctgagactggccctgagcgtgaccgagaccgtggccttcagccactgctgcctgaaccccctgatctacgccttcgccggcgagaagttcagaagatacctgtaccacctgtacggcaagtgcctggccgtgctgtgcggcagaagcgtgcacgtggacttcagcagcagcgagagccagagaagcagacacggcagcgtgctgagcagcaacttcacctaccacaccagcgacggcgacgccctgctgctgctgtag

SEQ ID NO: 76472 - DNA, 1068 bp, synthetic construct
  misc_feature 1..1068: note = Description of Artificial Sequence: Synthetic coding sequence
  source 1..1068: mol_type = other DNA
atggaccagttccccgagagcgtgaccgagaacttcgagtacgacgacctggccgaggcctgctacatcggcgacatcgtggtgttcggcaccgtgttcctgagcatcttctacagcgtgatcttcgccatcggcctggtgggcaacctgctggtggtgttcgccctgaccaacagcaagaagcccaagagcgtgaccgacatctacctgctgaacctggccctgagcgacctgctgttcgtggccaccctgcccttctggacccactacctgatcaacgagaagggcctgcacaacgccatgtgcaagttcaccaccgccttcttcttcatcggcttcttcggcagcatcttcttcatcaccgtgatcagcatcgacagatacctggccatcgtgctggccgccaacagcatgaacaacagaaccgtgcagcacggcgtgaccatcagcctgggcgtgtgggccgccgccatcctggtggccgccccccagttcatgttcaccaagcagaaggagaacgagtgcctgggcgactaccccgaggtgctgcaggagatctggcccgtgctgagaaacgtggagaccaacttcctgggcttcctgctgcccctgctgatcatgagctactgctacttcagaatcatccagaccctgttcagctgcaagaaccacaagaaggccaaggccatcaagctgatcctgctggtggtgatcgtgttcttcctgttctggaccccctacaacgtgatgatcttcctggagaccctgaagctgtacgacttcttccccagctgcgacatgagaaaggacctgagactggccctgagcgtgaccgagaccgtggccttcagccactgctgcctgaaccccctgatctacgccttcgccggcgagaagttcagaagatacctgtaccacctgtacggcaagtgcctggccgtgctgtgcggcagaagcgtgcacgtggacttcagcagcagcgagagccagagaagcagacacggcagcgtgctgagcagcaacttcacctaccacaccagcgacggcgacgccctgctgctgctgtag

SEQ ID NO: 76473 - DNA, 321 bp, synthetic construct
  misc_feature 1..321: note = Description of Artificial Sequence: Synthetic coding sequence
  source 1..321: mol_type = other DNA
atggaccagttccccgagagcgtgaccgagaacttcgagtacgacgacctggccgaggcctgctacatcggcgacatcgtggtgttcggcaccgtgttcctgagcatcttctacagcgtgatcttcgccatcggcctggtgggcaacctgctggtggtgttcgccctgaccaacagcaagaagcccaagagcgtgaccgacatctacctgctgaacctggccctgagcgacctgctgttcgtggccaccctgcccttctggacccactacctgatcaacgagaagggcctgcacaacgccatgtgcaagttcaccacctag

SEQ ID NO: 76474 - DNA, 501 bp, synthetic construct
  misc_feature 1..501: note = Description of Artificial Sequence: Synthetic coding sequence
  source 1..501: mol_type = other DNA
atggaccagttccccgagagcgtgaccgagaacttcgagtacgacgacctggccgaggcctgctacatcggcgacatcgtggtgttcggcaccgtgttcctgagcatcttctacagcgtgatcttcgccatcggcctggtgggcaacctgctggtggtgttcgccctgaccaacagcaagaagcccaagagcgtgaccgacatctacctgctgaacctggccctgagcgacctgctgttcgtggccaccctgcccttctggacccactacctgatcaacgagaagggcctgcacaacgccatgtgcaagttcaccaccgccttcttcttcatcggcttcttcggcagcatcttcttcatcaccgtgatcagcatcgacagatacctggccatcgtgctggccgccaacagcatgaacaacagaaccgtgcagcacggcgtgaccatcagcctgggcgtgtgggccgccgccatcctggtggccgccccccagttcatgtag

SEQ ID NO: 76475 - DNA, 1092 bp, synthetic construct
  misc_feature 1..1092: note = Description of Artificial Sequence: Synthetic coding sequence
  source 1..1092: mol_type = other DNA
atggccagcggcaaggccttcaccatggaccagttccccgagagcgtgaccgagaacttcgagtacgacgacctggccgaggcctgctacatcggcgacatcgtggtgttcggcaccgtgttcctgagcatcttctacagcgtgatcttcgccatcggcctggtgggcaacctgctggtggtgttcgccctgaccaacagcaagaagcccaagagcgtgaccgacatctacctgctgaacctggccctgagcgacctgctgttcgtggccaccctgcccttctggacccactacctgatcaacgagaagggcctgcacaacgccatgtgcaagttcaccaccgccttcttcttcatcggcttcttcggcagcatcttcttcatcaccgtgatcagcatcgacagatacctggccatcgtgctggccgccaacagcatgaacaacagaaccgtgcagcacggcgtgaccatcagcctgggcgtgtgggccgccgccatcctggtggccgccccccagttcatgttcaccaagcagaaggagaacgagtgcctgggcgactaccccgaggtgctgcaggagatctggcccgtgctgagaaacgtggagaccaacttcctgggcttcctgctgcccctgctgatcatgagctactgctacttcagaatcatccagaccctgttcagctgcaagaaccacaagaaggccaaggccatcaagctgatcctgctggtggtgatcgtgttcttcctgttctggaccccctacaacgtgatgatcttcctggagaccctgaagctgtacgacttcttccccagctgcgacatgagaaaggacctgagactggccctgagcgtgaccgagaccgtggccttcagccactgctgcctgaaccccctgatctacgccttcgccggcgagaagttcagaagatacctgtaccacctgtacggcaagtgcctggccgtgctgtgcggcagaagcgtgcacgtggacttcagcagcagcgagagccagagaagcagacacggcagcgtgctgagcagcaacttcacctaccacaccagcgacggcgacgccctgctgctgctgtag

SEQ ID NO: 76476 - DNA, 1068 bp, synthetic construct; identical to SEQ ID NO: 76472
  misc_feature 1..1068: note = Description of Artificial Sequence: Synthetic coding sequence
  source 1..1068: mol_type = other DNA

SEQ ID NO: 76477 - DNA, 1068 bp, synthetic construct; identical to SEQ ID NO: 76472
  misc_feature 1..1068: note = Description of Artificial Sequence: Synthetic coding sequence
  source 1..1068: mol_type = other DNA

SEQ ID NO: 76478 - DNA, 324 bp, synthetic construct
  misc_feature 1..324: note = Description of Artificial Sequence: Synthetic coding sequence
  source 1..324: mol_type = other DNA
atggccagagccgccctgagcgccgcccccagcaaccccagactgctgagagtggccctgctgctgctgctgctggtggccgccggcagaagagccgccggcgccagcgtggccaccgagctgagatgccagtgcctgcagaccctgcagggcatccaccccaagaacatccagagcgtgaacgtgaagagccccggcccccactgcgcccagaccgaggtgatcgccaccctgaagaacggcagaaaggcctgcctgaaccccgccagccccatcgtgaagaagatcatcgagaagatgctgaacagcgacaagagcaactag

SEQ ID NO: 76479 - DNA, 285 bp, synthetic construct
  misc_feature 1..285: note = Description of Artificial Sequence: Synthetic coding sequence
  source 1..285: mol_type = other DNA
atgagcgtgaagggcatggccatcgccctggccgtgatcctgtgcgccaccgtggtgcagggcttccccatgttcaagagaggcagatgcctgtgcatcggccccggcgtgaaggccgtgaaggtggccgacatcgagaaggccagcatcatgtaccccagcaacaactgcgacaagatcgaggtgatcatcaccctgaaggagaacaagggccagagatgcctgaaccccaagagcaagcaggccagactgatcatcaagaaggtggagagaaagaacttctag

SEQ ID NO: 76480 - DNA, 285 bp, synthetic construct; identical to SEQ ID NO: 76479
  misc_feature 1..285: note = Description of Artificial Sequence: Synthetic coding sequence
  source 1..285: mol_type = other DNA

SEQ ID NO: 76481 - DNA, 336 bp, synthetic construct
  misc_feature 1..336: note = Description of Artificial Sequence: Synthetic coding sequence
  source 1..336: mol_type = other DNA
atgagcctgctgcccagaagagccccccccgtgagcatgagactgctggccgccgccctgctgctgctgctgctggccctgtacaccgccagagtggacggcagcaagtgcaagtgcagcagaaagggccccaagatcagatacagcgacgtgaagaagctggagatgaagcccaagtacccccactgcgaggagaagatggtgatcatcaccaccaagagcgtgagcagatacagaggccaggagcactgcctgcaccccaagctgcagagcaccaagagattcatcaagtggtacaacgcctggaacgagaagagaagagtgtacgaggagtag

SEQ ID NO: 76482 - DNA, 300 bp, synthetic construct
  misc_feature 1..300: note = Description of Artificial Sequence: Synthetic coding sequence
  source 1..300: mol_type = other DNA
atgagactgctggccgccgccctgctgctgctgctgctggccctgtacaccgccagagtggacggcagcaagtgcaagtgcagcagaaagggccccaagatcagatacagcgacgtgaagaagctggagatgaagcccaagtacccccactgcgaggagaagatggtgatcatcaccaccaagagcgtgagcagatacagaggccaggagcactgcctgcaccccaagctgcagagcaccaagagattcatcaagtggtacaacgcctggaacgagaagagaagagtgtacgaggagtag

SEQ ID NO: 76483 - DNA, 822 bp, synthetic construct
  misc_feature 1..822: note = Description of Artificial Sequence: Synthetic coding sequence
  source 1..822: mol_type = other DNA
atgagcggcagccagagcgaggtggcccccagcccccagagccccagaagccccgagatgggcagagacctgagacccggcagcagagtgctgctgctgctgctgctgctgctgctggtgtacctgacccagcccggcaacggcaacgagggcagcgtgaccggcagctgctactgcggcaagagaatcagcagcgacagcccccccagcgtgcagttcatgaacagactgagaaagcacctgagagcctaccacagatgcctgtactacaccagattccagctgctgagctggagcgtgtgcggcggcaacaaggacccctgggtgcaggagctgatgagctgcctggacctgaaggagtgcggccacgcctacagcggcatcgtggcccaccagaagcacctgctgcccaccagcccccccatcagccaggccagcgagggcgccagcagcgacatccacacccccgcccagatgctgctgagcaccctgcagagcacccagagacccaccctgcccgtgggcagcctgagcagcgacaaggagctgaccagacccaacgagaccaccatccacaccgccggccacagcctggccgccggccccgaggccggcgagaaccagaagcagcccgagaagaacgccggccccaccgccagaaccagcgccaccgtgcccgtgctgtgcctgctggccatcatcttcatcctgaccgccgccctgagctacgtgctgtgcaagagaagaagaggccagagcccccagagcagccccgacctgcccgtgcactacatccccgtggcccccgacagcaacacctag

SEQ ID NO: 76484 - DNA, 822 bp, synthetic construct; identical to SEQ ID NO: 76483
  misc_feature 1..822: note = Description of Artificial Sequence: Synthetic coding sequence
  source 1..822: mol_type = other DNA

SEQ ID NO: 76485 - DNA, 360 bp, synthetic construct
  misc_feature 1..360: note = Description of Artificial Sequence: Synthetic coding sequence
  source 1..360: mol_type = other DNA
atgaaggtgctgatcagcagcctgctgctgctgctgcccctgatgctgatgagcatggtgagcagcagcctgaaccccggcgtggccagaggccacagagacagaggccaggccagcagaagatggctgcaggagggcggccaggagtgcgagtgcaaggactggttcctgagagcccccagaagaaagttcatgaccgtgagcggcctgcccaagaagcagtgcccctgcgaccacttcaagggcaacgtgaagaagaccagacaccagagacaccacagaaagcccaacaagcacagcagagcctgccagcagttcctgaagcagtgccagctgagaagcttcgccctgcccctgtag

SEQ ID NO: 76486 - DNA, 360 bp, synthetic construct; identical to SEQ ID NO: 76485
  misc_feature 1..360: note = Description of Artificial Sequence: Synthetic coding sequence
  source 1..360: mol_type = other DNA

SEQ ID NO: 76487 - DNA, 324 bp, synthetic construct
  misc_feature 1..324: note = Description of Artificial Sequence: Synthetic coding sequence
  source 1..324: mol_type = other DNA
atggccagagccaccctgagcgccgcccccagcaaccccagactgctgagagtggccctgctgctgctgctgctggtggccgccagcagaagagccgccggcgcccccctggccaccgagctgagatgccagtgcctgcagaccctgcagggcatccacctgaagaacatccagagcgtgaaggtgaagagccccggcccccactgcgcccagaccgaggtgatcgccaccctgaagaacggccagaaggcctgcctgaaccccgccagccccatggtgaagaagatcatcgagaagatgctgaagaacggcaagagcaactag

SEQ ID NO: 76488 - DNA, 324 bp, synthetic construct
  misc_feature 1..324: note = Description of Artificial Sequence: Synthetic coding sequence
  source 1..324: mol_type = other DNA
atggcccacgccaccctgagcgccgcccccagcaaccccagactgctgagagtggccctgctgctgctgctgctggtggccgccagcagaagagccgccggcgccagcgtggtgaccgagctgagatgccagtgcctgcagaccctgcagggcatccacctgaagaacatccagagcgtgaacgtgagaagccccggcccccactgcgcccagaccgaggtgatcgccaccctgaagaacggcaagaaggcctgcctgaaccccgccagccccatggtgcagaagatcatcgagaagatcctgaacaagggcagcaccaactag

SEQ ID NO: 76489 - DNA, 345 bp, synthetic construct
  misc_feature 1..345: note = Description of Artificial Sequence: Synthetic coding sequence
  source 1..345: mol_type = other DNA
atgagcctgctgagcagcagagccgccagagtgcccggccccagcagcagcctgtgcgccctgctggtgctgctgctgctgctgacccagcccggccccatcgccagcgccggccccgccgccgccgtgctgagagagctgagatgcgtgtgcctgcagaccacccagggcgtgcaccccaagatgatcagcaacctgcaggtgttcgccatcggcccccagtgcagcaaggtggaggtggtggccagcctgaagaacggcaaggagatctgcctggaccccgaggcccccttcctgaagaaggtgatccagaagatcctggacggcggcaacaaggagaactag

SEQ ID NO: 76490 - DNA, 1053 bp, synthetic construct
  misc_feature 1..1053: note = Description of Artificial Sequence: Synthetic coding sequence
  source 1..1053: mol_type = other DNA
atgagcaacatcaccgacccccagatgtgggacttcgacgacctgaacttcaccggcatgccccccgccgacgaggactacagcccctgcatgctggagaccgagaccctgaacaagtacgtggtgatcatcgcctacgccctggtgttcctgctgagcctgctgggcaacagcctggtgatgctggtgatcctgtacagcagagtgggcagaagcgtgaccgacgtgtacctgctgaacctggccctggccgacctgctgttcgccctgaccctgcccatctgggccgccagcaaggtgaacggctggatcttcggcaccttcctgtgcaaggtggtgagcctgctgaaggaggtgaacttctacagcggcatcctgctgctggcctgcatcagcgtggacagatacctggccatcgtgcacgccaccagaaccctgacccagaagagacacctggtgaagttcgtgtgcctgggctgctggggcctgagcatgaacctgagcctgcccttcttcctgttcagacaggcctaccaccccaacaacagcagccccgtgtgctacgaggtgctgggcaacgacaccgccaagtggagaatggtgctgagaatcctgccccacaccttcggcttcatcgtgcccctgttcgtgatgctgttctgctacggcttcaccctgagaaccctgttcaaggcccacatgggccagaagcacagagccatgagagtgatcttcgccgtggtgctgatcttcctgctgtgctggctgccctacaacctggtgctgctggccgacaccctgatgagaacccaggtgatccaggagagctgcgagagaagaaacaacatcggcagagccctggacgccaccgagatcctgggcttcctgcacagctgcctgaaccccatcatctacgccttcatcggccagaacttcagacacggcttcctgaagatcctggccatgcacggcctggtgagcaaggagttcctggccagacacagagtgaccagctacaccagcagcagcgtgaacgtgagcagcaacctgtag

SEQ ID NO: 76491 - DNA, 885 bp, synthetic construct
  misc_feature 1..885: note = Description of Artificial Sequence: Synthetic coding sequence
  source 1..885: mol_type = other DNA
atgagcaacatcaccgacccccagatgtgggacttcgacgacctgaacttcaccggcatgccccccgccgacgaggactacagcccctgcatgctggagaccgagaccctgaacaagtacgtggtgatcatcgcctacgccctggtgttcctgctgagcctgctgggcaacagcctggtgatgctggtgatcctgtacagcagagtgggcagaagcgtgaccgacgtgtacctgctgaacctggccatcgtgcacgccaccagaaccctgacccagaagagacacctggtgaagttcgtgtgcctgggctgctggggcctgagcatgaacctgagcctgcccttcttcctgttcagacaggcctaccaccccaacaacagcagccccgtgtgctacgaggtgctgggcaacgacaccgccaagtggagaatggtgctgagaatcctgccccacaccttcggcttcatcgtgcccctgttcgtgatgctgttctgctacggcttcaccctgagaaccctgttcaaggcccacatgggccagaagcacagagccatgagagtgatcttcgccgtggtgctgatcttcctgctgtgctggctgccctacaacctggtgctgctggccgacaccctgatgagaacccaggtgatccaggagagctgcgagagaagaaacaacatcggcagagccctggacgccaccgagatcctgggcttcctgcacagctgcctgaaccccatcatctacgccttcatcggccagaacttcagacacggcttcctgaagatcctggccatgcacggcctggtgagcaaggagttcctggccagacacagagtgaccagctacaccagcagcagcgtgaacgtgagcagcaacctgtag

SEQ ID NO: 76492 - DNA, 804 bp, synthetic construct
  misc_feature 1..804: note = Description of Artificial Sequence: Synthetic coding sequence
  source 1..804: mol_type = other DNA
atggtgctggaggtgagcgaccaccaggtgctgaacgacgccgaggtggccgccctgctggagaacttcagcagcagctacgactacggcgagaacgagagcgacagctgctgcaccagccccccctgcccccaggacttcagcctgaacttcgacagagccttcctgcccgccctgtacagcctgctgttcctgctgggcctgctgggcaacggcgccgtggccgccgtgctgctgagcagaagaaccgccctgagcagcaccgacaccttcctgctgcacctggccgtggccgacaccctgctggtgctgaccctgcccctgtgggccgtggacgccgccgtgcagtgggtgttcggcagcggcctgtgcaaggtggccggcgccctgttcaacatcaacttctacgccggcgccctgctgctggcctgcatcagcttcgacagatacctgaacatcgtgcacgccacccagctgtacagaagaggcccccccgccagagtgaccctgacctgcctggccgtgtggggcctgtgcctgctgttcgccctgcccgacttcatcttcctgagcgcccaccacgacgagagactgaacgccacccactgccagtacaacttcccccagggcagcagcagcggcagcggctgcggctgctgcagctgcgcctgggccgcccccaccagagagggcagcagaggcagccacagactgcccgccggcatccaccccggcctgagaccccagagaccccccaccagagcctgcgaggccggcatcagagcccccctgagccccacctag

SEQ ID NO: 76493 - DNA, 1248 bp, synthetic construct
  misc_feature 1..1248: note = Description of Artificial Sequence: Synthetic coding sequence
  source 1..1248: mol_type = other DNA
atggagctgagaaagtacggccccggcagactggccggcaccgtgatcggcggcgccgcccagagcaagagccagaccaagagcgacagcatcaccaaggagttcctgcccggcctgtacaccgcccccagcagccccttcccccccagccaggtgagcgaccaccaggtgctgaacgacgccgaggtggccgccctgctggagaacttcagcagcagctacgactacggcgagaacgagagcgacagctgctgcaccagccccccctgcccccaggacttcagcctgaacttcgacagagccttcctgcccgccctgtacagcctgctgttcctgctgggcctgctgggcaacggcgccgtggccgccgtgctgctgagcagaagaaccgccctgagcagcaccgacaccttcctgctgcacctggccgtggccgacaccctgctggtgctgaccctgcccctgtgggccgtggacgccgccgtgcagtgggtgttcggcagcggcctgtgcaaggtggccggcgccctgttcaacatcaacttctacgccggcgccctgctgctggcctgcatcagcttcgacagatacctgaacatcgtgcacgccacccagctgtacagaagaggcccccccgccagagtgaccctgacctgcctggccgtgtggggcctgtgcctgctgttcgccctgcccgacttcatcttcctgagcgcccaccacgacgagagactgaacgccacccactgccagtacaacttcccccaggtgggcagaaccgccctgagagtgctgcagctggtggccggcttcctgctgcccctgctggtgatggcctactgctacgcccacatcctggccgtgctgctggtgagcagaggccagagaagactgagagccatgagactggtggtggtggtggtggtggccttcgccctgtgctggaccccctaccacctggtggtgctggtggacatcctgatggacctgggcgccctggccagaaactgcggcagagagagcagagtggacgtggccaagagcgtgaccagcggcctgggctacatgcactgctgcctgaaccccctgctgtacgccttcgtgggcgtgaagttcagagagagaatgtggatgctgctgctgagactgggctgccccaaccagagaggcctgcagagacagcccagcagcagcagaagagacagcagctggagcgagaccagcgaggccagctacagcggcctgtag

SEQ ID NO: 76494 - DNA, 1107 bp, synthetic construct
  misc_feature 1..1107: note = Description of Artificial Sequence: Synthetic coding sequence
  source 1..1107: mol_type = other DNA
atggtgctggaggtgagcgaccaccaggtgctgaacgacgccgaggtggccgccctgctggagaacttcagcagcagctacgactacggcgagaacgagagcgacagctgctgcaccagccccccctgcccccaggacttcagcctgaacttcgacagagccttcctgcccgccctgtacagcctgctgttcctgctgggcctgctgggcaacggcgccgtggccgccgtgctgctgagcagaagaaccgccctgagcagcaccgacaccttcctgctgcacctggccgtggccgacaccctgctggtgctgaccctgcccctgtgggccgtggacgccgccgtgcagtgggtgttcggcagcggcctgtgcaaggtggccggcgccctgttcaacatcaacttctacgccggcgccctgctgctggcctgcatcagcttcgacagatacctgaacatcgtgcacgccacccagctgtacagaagaggcccccccgccagagtgaccctgacctgcctggccgtgtggggcctgtgcctgctgttcgccctgcccgacttcatcttcctgagcgcccaccacgacgagagactgaacgccacccactgccagtacaacttcccccaggtgggcagaaccgccctgagagtgctgcagctggtggccggcttcctgctgcccctgctggtgatggcctactgctacgcccacatcctggccgtgctgctggtgagcagaggccagagaagactgagagccatgagactggtggtggtggtggtggtggccttcgccctgtgctggaccccctaccacctggtggtgctggtggacatcctgatggacctgggcgccctggccagaaactgcggcagagagagcagagtggacgtggccaagagcgtgaccagcggcctgggctacatgcactgctgcctgaaccccctgctgtacgccttcgtgggcgtgaagttcagagagagaatgtggatgctgctgctgagactgggctgccccaaccagagaggcctgcagagacagcccagcagcagcagaagagacagcagctggagcgagaccagcgaggccagctacagcggcctgtag

SEQ ID NO: 76495 - DNA, 1119 bp, synthetic construct
  misc_feature 1..1119: note = Description of Artificial Sequence: Synthetic coding sequence
  source 1..1119: mol_type = other DNA
atgaactaccccctgaccctggagatggacctggagaacctggaggacctgttctgggagctggacagactggacaactacaacgacaccagcctggtggagaaccacctgtgccccgccaccgagggccccctgatggccagcttcaaggccgtgttcgtgcccgtggcctacagcctgatcttcctgctgggcgtgatcggcaacgtgctggtgctggtgatcctggagagacacagacagaccagaagcagcaccgagaccttcctgttccacctggccgtggccgacctgctgctggtgttcatcctgcccttcgccgtggccgagggcagcgtgggctgggtgctgggcaccttcctgtgcaagaccgtgatcgccctgcacaaggtgaacttctactgcagcagcctgctgctggcctgcatcgccgtggacagatacctggccatcgtgcacgccgtgcacgcctacagacacagaagactgctgagcatccacatcacctgcggcaccatctggctggtgggcttcctgctggccctgcccgagatcctgttcgccaaggtgagccagggccaccacaacaacagcctgcccagatgcaccttcagccaggagaaccaggccgagacccacgcctggttcaccagcagattcctgtaccacgtggccggcttcctgctgcccatgctggtgatgggctggtgctacgtgggcgtggtgcacagactgagacaggcccagagaagaccccagagacagaaggccgtgagagtggccatcctggtgaccagcatcttcttcctgtgctggagcccctaccacatcgtgatcttcctggacaccctggccagactgaaggccgtggacaacacctgcaagctgaacggcagcctgcccgtggccatcaccatgtgcgagttcctgggcctggcccactgctgcctgaaccccatgctgtacaccttcgccggcgtgaagttcagaagcgacctgagcagactgctgaccaagctgggctgcaccggccccgccagcctgtgccagctgttccccagctggagaagaagcagcctgagcgagagcgagaacgccaccagcctgaccaccttctag

SEQ ID NO: 76496 - DNA, 1029 bp, synthetic construct
  misc_feature 1..1029: note = Description of Artificial Sequence: Synthetic coding sequence
  source 1..1029: mol_type = other DNA
atggccgagcacgactaccacgaggactacggcttcagcagcttcaacgacagcagccaggaggagcaccaggacttcctgcagttcagcaaggtgttcctgccctgcatgtacctggtggtgttcgtgtgcggcctggtgggcaacagcctggtgctggtgatcagcatcttctaccacaagctgcagagcctgaccgacgtgttcctggtgaacctgcccctggccgacctggtgttcgtgtgcaccctgcccttctgggcctacgccggcatccacgagtgggtgttcggccaggtgatgtgcaagagcctgctgggcatctacaccatcaacttctacaccagcatgctgatcctgacctgcatcaccgtggacagattcatcgtggtggtgaaggccaccaaggcctacaaccagcaggccaagagaatgacctggggcaaggtgaccagcctgctgatctgggtgatcagcctgctggtgagcctgccccagatcatctacggcaacgtgttcaacctggacaagctgatctgcggctaccacgacgaggccatcagcaccgtggtgctggccacccagatgaccctgggcttcttcctgcccctgctgaccatgatcgtgtgctacagcgtgatcatcaagaccctgctgcacgccggcggcttccagaagcacagaagcctgaagatcatcttcctggtgatggccgtgttcctgctgacccagatgcccttcaacctgatgaagttcatcagaagcacccactgggagtactacgccatgaccagcttccactacaccatcatggtgaccgaggccatcgcctacctgagagcctgcctgaaccccgtgctgtacgccttcgtgagcctgaagttcagaaagaacttctggaagctggtgaaggacatcggctgcctgccctacctgggcgtgagccaccagtggaagagcagcgaggacaacagcaagaccttcagcgccagccacaacgtggaggccaccagcatgttccagctgtag

SEQ ID NO: 76497 - DNA, 1029 bp, synthetic construct; identical to SEQ ID NO: 76496
  misc_feature 1..1029: note = Description of Artificial Sequence: Synthetic coding sequence
  source 1..1029: mol_type = other DNA

SEQ ID NO: 76498 - DNA, 1029 bp, synthetic construct; identical to SEQ ID NO: 76496
  misc_feature 1..1029: note = Description of Artificial Sequence: Synthetic coding sequence
  source 1..1029: mol_type = other DNA

SEQ ID NO: 76499 - DNA, 1029 bp, synthetic construct; identical to SEQ ID NO: 76496
  misc_feature 1..1029: note = Description of Artificial Sequence: Synthetic coding sequence
  source 1..1029: mol_type = other DNA

SEQ ID NO: 76500 - DNA, 1089 bp, synthetic construct
  misc_feature 1..1089: note = Description of Artificial Sequence: Synthetic coding sequence
  source 1..1089: mol_type = other DNA
atggacctgcacctgttcgactacagcgagcccggcaacttcagcgacatcagctggccctgcaacagcagcgactgcatcgtggtggacaccgtgatgtgccccaacatgcccaacaagagcgtgctgctgtacaccctgagcttcatctacatcttcatcttcgtgatcggcatgatcgccaacagcgtggtggtgtgggtgaacatccaggccaagaccaccggctacgacacccactgctacatcctgaacctggccatcgccgacctgtgggtggtgctgaccatccccgtgtgggtggtgagcctggtgcagcacaaccagtggcccatgggcgagctgacctgcaaggtgacccacctgatcttcagcatcaacctgttcggcagcatcttcttcctgacctgcatgagcgtggacagatacctgagcatcacctacttcaccaacacccccagcagcagaaagaagatggtgagaagagtggtgtgcatcctggtgtggctgctggccttctgcgtgagcctgcccgacacctactacctgaagaccgtgaccagcgccagcaacaacgagacctactgcagaagcttctaccccgagcacagcatcaaggagtggctgatcggcatggagctggtgagcgtggtgctgggcttcgccgtgcccttcagcatcatcgccgtgttctacttcctgctggccagagccatcagcgccagcagcgaccaggagaagcacagcagcagaaagatcatcttcagctacgtggtggtgttcctggtgtgctggctgccctaccacgtggccgtgctgctggacatcttcagcatcctgcactacatccccttcacctgcagactggagcacgccctgttcaccgccctgcacgtgacccagtgcctgagcctggtgcactgctgcgtgaaccccgtgctgtacagcttcatcaacagaaactacagatacgagctgatgaaggccttcatcttcaagtacagcgccaagaccggcctgaccaagctgatcgacgccagcagagtgagcgagaccgagtacagcgccctggagcagagcaccaagtag

SEQ ID NO: 76501 - DNA, 636 bp, synthetic construct
  misc_feature 1..636: note = Description of Artificial Sequence: Synthetic coding sequence
  source 1..636: mol_type = other DNA
atggacctgcacctgttcgactacagcgagcccggcaacttcagcgacatcagctggccctgcaacagcagcgactgcatcgtggtggacaccgtgatgtgccccaacatgcccaacaagagcgtgctgctgtacaccctgagcttcatctacatcttcatcttcgtgatcggcatgatcgccaacagcgtggtggtgtgggtgaacatccaggccaagaccaccggctacgacacccactgctacatcctgaacctggccatcgccgacctgtgggtggtgctgaccatccccgtgtgggtggtgagcctggtgcagcacaaccagtggcccatgggcgagctgacctgcaaggtgacccacctgatcttcagcatcaacctgttcggcagcatcttcttcctgacctgcatgagcgtggacagatacctgagcatcacctacttcaccaacacccccagcagcagaaagaagatggtgagaagagtggtgtgcatcctggtgtggctgctggccttctgcgtgagcctgcccgacacctactacctgaagaccgtgaccagcgccagcaacaacgagacctactgcagaagcttctaccccgagcacagcatcaaggagtggctgatcggctag

SEQ ID NO: 76502 - DNA, 1155 bp, synthetic construct
  misc_feature 1..1155: note = Description of Artificial Sequence: Synthetic coding sequence
  source 1..1155: mol_type = other DNA
atggccgccaccgccagcccccagcccctggccaccgaggacgccgacagcgagaacagcagcttctactactacgactacctggacgaggtggccttcatgctgtgcagaaaggacgccgtggtgagcttcggcaaggtgttcctgcccgtgttctacagcctgatcttcgtgctgggcctgagcggcaacctgctgctgctgatggtgctgctgagatacgtgcccagaagaagaatggtggagatctacctgctgaacctggccatcagcaacctgctgttcctggtgaccctgcccttctggggcatcagcgtggcctggcactgggtgttcggcagcttcctgtgcaagatggtgagcaccctgtacaccatcaacttctacagcggcatcttcttcatcagctgcatgagcctggacaagtacctggagatcgtgcacgcccagccctaccacagactgagaaccagagccaagagcctgctgctggccaccatcgtgtgggccgtgagcctggccgtgagcatccccgacatggtgttcgtgcagacccacgagaaccccaagggcgtgtggaactgccacgccgacttcggcggccacggcaccatctggaagctgttcctgagattccagcagaacctgctgggcttcctgctgcccctgctggccatgatcttcttctacagcagaatcggctgcgtgctggtgagactgagacccgccggccagggcagagccctgaagatcgccgccgccctggtggtggccttcttcgtgctgtggttcccctacaacctgaccctgttcctgcacaccctgctggacctgcaggtgttcggcaactgcgaggtgagccagcacctggactacgccctgcaggtgaccgagagcatcgccttcctgcactgctgcttcagccccatcctgtacgccttcagcagccacagattcagacagtacctgaaggccttcctggccgccgtgctgggctggcacctggcccccggcaccgcccaggccagcctgagcagctgcagcgagagcagcatcctgaccgcccaggaggagatgaccggcatgaacgacctgggcgagagacagagcgagaactaccccaacaaggaggacgtgggcaacaagagcgcctag

SEQ ID NO: 76503 - DNA, 1155 bp, synthetic construct; identical to SEQ ID NO: 76502
  misc_feature 1..1155: note = Description of Artificial Sequence: Synthetic coding sequence
  source 1..1155: mol_type = other DNA

SEQ ID NO: 76504 - DNA, 1155 bp, synthetic construct; identical to SEQ ID NO: 76502
  misc_feature 1..1155: note = Description of Artificial Sequence: Synthetic coding sequence
  source 1..1155: mol_type = other DNA

SEQ ID NO: 76505 - DNA, 1122 bp, synthetic construct
  misc_feature 1..1122: note = Description of Artificial Sequence: Synthetic coding sequence
  source 1..1122: mol_type = other DNA
atgagaatggaggacgaggactacaacaccagcatcagctacggcgacgagtaccccgactacctggacagcatcgtggtgctggaggacctgagccccctggaggccagagtgaccagaatcttcctggtggtggtgtacagcatcgtgtgcttcctgggcatcctgggcaacggcctggtgatcatcatcgccaccttcaagatgaagaagaccgtgaacatggtgtggttcctgaacctggccgtggccgacttcctgttcaacgtgttcctgcccatccacatcacctacgccgccatggactaccactgggtgttcggcaccgccatgtgcaagatcagcaacttcctgctgatccacaacatgttcaccagcgtgttcctgctgaccatcatcagcagcgacagatgcatcagcgtgctgctgcccgtgtggagccagaaccacagaagcgtgagactggcctacatggcctgcatggtgatctgggtgctggccttcttcctgagcagccccagcctggtgttcagagacaccgccaacctgcacggcaagatcagctgcttcaacaacttcagcctgagcacccccggcagcagcagctggcccacccacagccagatggaccccgtgggctacagcagacacatggtggtgaccgtgaccagattcctgtgcggcttcctggtgcccgtgctgatcatcaccgcctgctacctgaccatcgtgtgcaagctgcagagaaacagactggccaagaccaagaagcccttcaagatcatcgtgaccatcatcatcaccttcttcctgtgctggtgcccctaccacaccctgaacctgctggagctgcaccacaccgccatgcccggcagcgtgttcagcctgggcctgcccctggccaccgccctggccatcgccaacagctgcatgaaccccatcctgtacgtgttcatgggccaggacttcaagaagttcaaggtggccctgttcagcagactggtgaacgccctgagcgaggacaccggccacagcagctaccccagccacagaagcttcaccaagatgagcagcatgaacgagagaaccagcatgaacgagagagagaccggcatgctgtag

SEQ ID NO: 76506 - DNA, 1116 bp, synthetic construct
  misc_feature 1..1116: note = Description of Artificial Sequence: Synthetic coding sequence
  source 1..1116: mol_type = other DNA
atggaggacgaggactacaacaccagcatcagctacggcgacgagtaccccgactacctggacagcatcgtggtgctggaggacctgagccccctggaggccagagtgaccagaatcttcctggtggtggtgtacagcatcgtgtgcttcctgggcatcctgggcaacggcctggtgatcatcatcgccaccttcaagatgaagaagaccgtgaacatggtgtggttcctgaacctggccgtggccgacttcctgttcaacgtgttcctgcccatccacatcacctacgccgccatggactaccactgggtgttcggcaccgccatgtgcaagatcagcaacttcctgctgatccacaacatgttcaccagcgtgttcctgctgaccatcatcagcagcgacagatgcatcagcgtgctgctgcccgtgtggagccagaaccacagaagcgtgagactggcctacatggcctgcatggtgatctgggtgctggccttcttcctgagcagccccagcctggtgttcagagacaccgccaacctgcacggcaagatcagctgcttcaacaacttcagcctgagcacccccggcagcagcagctggcccacccacagccagatggaccccgtgggctacagcagacacatggtggtgaccgtgaccagattcctgtgcggcttcctggtgcccgtgctgatcatcaccgcctgctacctgaccatcgtgtgcaagctgcagagaaacagactggccaagaccaagaagcccttcaagatcatcgtgaccatcatcatcaccttcttcctgtgctggtgcccctaccacaccctgaacctgctggagctgcaccacaccgccatgcccggcagcgtgttcagcctgggcctgcccctggccaccgccctggccatcgccaacagctgcatgaaccccatcctgtacgtgttcatgggccaggacttcaagaagttcaaggtggccctgttcagcagactggtgaacgccctgagcgaggacaccggccacagcagctaccccagccacagaagcttcaccaagatgagcagcatgaacgagagaaccagcatgaacgagagagagaccggcatgctgtag

SEQ ID NO: 76507 - DNA, 1122 bp, synthetic construct; identical to SEQ ID NO: 76505
  misc_feature 1..1122: note = Description of Artificial Sequence: Synthetic coding sequence
  source 1..1122: mol_type = other DNA

SEQ ID NO: 76508 - DNA, 432 bp, synthetic construct
  misc_feature 1..432: note = Description of Artificial Sequence: Synthetic coding sequence
  source 1..432: mol_type = other DNA
atgagaatggaggacgaggactacaacaccagcatcagctacggcgacgagtaccccgactacctggacagcatcgtggtgctggaggacctgagccccctggaggccagagtgaccagaatcttcctggtggtggtgtacagcatcgtgtgcttcctgggcatcctgggcaacggcctggtgatcatcatcgccaccttcaagatgaagaagaccgtgaacatggtgtggttcctgaacctggccgtggccgacttcctgttcaacgtgttcctgcccatccacatcacctacgccgccatggactaccactgggtgttcggcaccgccatgtgcaagatcagcaacttcctgctgatccacaacatgttcaccagcgtgttcctgctgaccatcatcagcagcgacagatgcatcagcgtgctgctgtag

SEQ ID NO: 76509 - DNA, 1122 bp, synthetic construct; identical to SEQ ID NO: 76505
  misc_feature 1..1122: note = Description of Artificial Sequence: Synthetic coding sequence
  source 1..1122: mol_type = other DNA

SEQ ID NO: 76510 - DNA, 444 bp, synthetic construct
  misc_feature 1..444: note = Description of Artificial Sequence: Synthetic coding sequence
  source 1..444: mol_type = other DNA
atgagaatggaggacgaggactacaacaccagcatcagctacggcgacgagtaccccgactacctggacagcatcgtggtgctggaggacctgagccccctggaggccagagtgaccagaatcttcctggtggtggtgtacagcatcgtgtgcttcctgggcatcctgggcaacggcctggtgatcatcatcgccaccttcaagatgaagaagaccgtgaacatggtgtggttcctgaacctggccgtggccgacttcctgttcaacgtgttcctgcccatccacatcacctacgccgccatggactaccactgggtgttcggcaccgccatgtgcaagatcagcaacttcctgctgatccacaacatgttcaccagcgtgttcctgctgaccatcatcagcagcgacagatgcatcagcgtgctgctgcccgtgtggagctag

SEQ ID NO: 76511 - DNA, 1116 bp, synthetic construct; identical to SEQ ID NO: 76506
  misc_feature 1..1116: note = Description of Artificial Sequence: Synthetic coding sequence
  source 1..1116: mol_type = other DNA

SEQ ID NO: 76512 - DNA, 1005 bp, synthetic construct
  misc_feature 1..1005: note = Description of Artificial Sequence: Synthetic coding sequence
  source 1..1005: mol_type = other DNA
atgcccagcaaggagagctggagcggcagaaagaccaacagagccgccgtgcacaagagcaagcaggagggcagacagcaggacctgctgatcgccgccctgggcatgaagctgggcagccccaagagcagcgtgaccatctggcagcccctgaagctgttcgcctacagccagctgaccagcctggtgagaagagccaccctgaaggagaacgagcagatccccaagtacgagaagatccacaacttcaaggtgcacaccttcagaggcccccactggtgcgagtactgcgccaacttcatgtggggcctgatcgcccagggcgtgaagtgcgccgactgcggcctgaacgtgcacaagcagtgcagcaagatggtgcccaacgactgcaagcccgacctgaagcacgtgaagaaggtgtacagctgcgacctgaccaccctggtgaaggcccacaccaccaagagacccatggtggtggacatgtgcatcagagagatcgagagcagaggcctgaacagcgagggcctgtacagagtgagcggcttcagcgacctgatcgaggacgtgaagatggccttcgacagagacggcgagaaggccgacatcagcgtgaacatgtacgaggacatcaacatcatcaccggcgccctgaagctgtacttcagagacctgcccatccccctgatcacctacgacgcctaccccaagttcatcgagagcgccaagatcatggaccccgacgagcagctggagaccctgcacgaggccctgaagctgctgccccccgcccactgcgagaccctgagatacctgatggcccacctgaagagagtgaccctgcacgagaaggagaacctgatgaacgccgagaacctgggcatcgtgttcggccccaccctgatgagaagccccgagctggacgccatggccgccctgaacgacatcagataccagagactggtggtggagctgctgatcaagaacgaggacatcctgttctag

SEQ ID NO: 76513 - DNA, 1302 bp, synthetic construct
  misc_feature 1..1302: note = Description of Artificial Sequence: Synthetic coding sequence
  source 1..1302: mol_type = other DNA
atggccctgaccctgttcgacaccgacgagtacagaccccccgtgtggaagagctacctgtaccagctgcagcaggaggccccccaccccagaagaatcacctgcacctgcgaggtggagaacagacccaagtactacggcagagagttccacggcatgatcagcagagaggccgccgaccagctgctgatcgtggccgagggcagctacctgatcagagagagccagagacagcccggcacctacaccctggccctgagattcggcagccagaccagaaacttcagactgtactacgacggcaagcacttcgtgggcgagaagagattcgagagcatccacgacctggtgaccgacggcctgatcaccctgtacatcgagaccaaggccgccgagtacatcgccaagatgaccatcaaccccatctacgagcacgtgggctacaccaccctgaacagagagcccgcctacaagaagcacatgcccgtgctgaaggagacccacgacgagagagacagcaccggccaggacggcgtgagcgagaagagagtgcacaccttcagaggcccccactggtgcgagtactgcgccaacttcatgtggggcctgatcgcccagggcgtgaagtgcgccgactgcggcctgaacgtgcacaagcagtgcagcaagatggtgcccaacgactgcaagcccgacctgaagcacgtgaagaaggtgtacagctgcgacctgaccaccctggtgaaggcccacaccaccaagagacccatggtggtggacatgtgcatcagagagatcgagagcagaggcctgaacagcgagggcctgtacagagtgagcggcttcagcgacctgatcgaggacgtgaagatggccttcgacagagacggcgagaaggccgacatcagcgtgaacatgtacgaggacatcaacatcatcaccggcgccctgaagctgtacttcagagacctgcccatccccctgatcacctacgacgcctaccccaagttcatcgagagcgccaagatcatggaccccgacgagcagctggagaccctgcacgaggccctgaagctgctgccccccgcccactgcgagaccctgagatacctgatggcccacctgaagagagtgaccctgcacgagaaggagaacctgatgaacgccgagaacctgggcatcgtgttcggccccaccctgatgagaagccccgagctggacgccatggccgccctgaacgacatcagataccagagactggtggtggagctgctgatcaagaacgaggacatcctgttctag

SEQ ID NO: 76514 - DNA, 1380 bp, synthetic construct
  misc_feature 1..1380: note = Description of Artificial Sequence: Synthetic coding sequence
  source 1..1380: mol_type = other DNA
atggccctgaccctgttcgacaccgacgagtacagaccccccgtgtggaagagctacctgtaccagctgcagcaggaggccccccaccccagaagaatcacctgcacctgcgaggtggagaacagacccaagtactacggcagagagttccacggcatgatcagcagagaggccgccgaccagctgctgatcgtggccgagggcagctacctgatcagagagagccagagacagcccggcacctacaccctggccctgagattcggcagccagaccagaaacttcagactgtactacgacggcaagcacttcgtgggcgagaagagattcgagagcatccacgacctggtgaccgacggcctgatcaccctgtacatcgagaccaaggccgccgagtacatcgccaagatgaccatcaaccccatctacgagcacgtgggctacaccaccctgaacagagagcccgcctacaagaagcacatgcccgtgctgaaggagacccacgacgagagagacagcaccggccaggacggcgtgagcgagaagagactgaccagcctggtgagaagagccaccctgaaggagaacgagcagatccccaagtacgagaagatccacaacttcaaggtgcacaccttcagaggcccccactggtgcgagtactgcgccaacttcatgtggggcctgatcgcccagggcgtgaagtgcgccgactgcggcctgaacgtgcacaagcagtgcagcaagatggtgcccaacgactgcaagcccgacctgaagcacgtgaagaaggtgtacagctgcgacctgaccaccctggtgaaggcccacaccaccaagagacccatggtggtggacatgtgcatcagagagatcgagagcagaggcctgaacagcgagggcctgtacagagtgagcggcttcagcgacctgatcgaggacgtgaagatggccttcgacagagacggcgagaaggccgacatcagcgtgaacatgtacgaggacatcaacatcatcaccggcgccctgaagctgtacttcagagacctgcccatccccctgatcacctacgacgcctaccccaagttcatcgagagcgccaagatcatggaccccgacgagcagctggagaccctgcacgaggccctgaagctgctgccccccgcccactgcgagaccctgagatacctgatggcccacctgaagagagtgaccctgcacgagaaggagaacctgatgaacgccgagaacctgggcatcgtgttcggccccaccctgatgagaagccccgagctggacgccatggccgccctgaacgacatcagataccagagactggtggtggagctgctgatcaagaacgaggacatcctgttctag

SEQ ID NO: 76515 - DNA, 1167 bp, synthetic construct
  misc_feature 1..1167: note = Description of Artificial Sequence: Synthetic coding sequence
  source 1..1167: mol_type = other DNA
atgaccgccagcgtgctgctgcaccccagatggatcgagcccaccgtgatgttcctgtacgacaacggcggcggcctggtggccgacgagctgaacaagaacatggagggcgccgccgccgccgccgccgccgccgccgccgccgccgccgccggcgccggcggcggcggcttcccccaccccgccgccgccgccgccggcggcaacttcagcgtggccgccgccgccgccgccgccgccgccgccgccgccaaccagtgcagaaacctgatggcccaccccgcccccctggcccccggcgccgccagcgcctacagcagcgcccccggcgaggccccccccagcgccgccgccgccgccgccgccgccgccgccgccgccgccgccgccgccgccgccagcagcagcggcggccccggccccgccggccccgccggcgccgaggccgccaagcagtgcagcccctgcagcgccgccgcccagagcagcagcggccccgccgccctgccctacggctacttcggcagcggctactacccctgcgccagaatgggcccccaccccaacgccatcaagagctgcgcccagcccgccagcgccgccgccgccgccgccttcgccgacaagtacatggacaccgccggccccgccgccgaggagttcagcagcagagccaaggagttcgccttctaccaccagggctacgccgccggcccctaccaccaccaccagcccatgcccggctacctggacatgcccgtggtgcccggcctgggcggccccggcgagagcagacacgagcccctgggcctgcccatggagagctaccagccctgggccctgcccaacggctggaacggccagatgtactgccccaaggagcaggcccagcccccccacctgtggaagagcaccctgcccgacgtggtgagccaccccagcgacgccagcagctacagaagaggcagaaagaagagagtgccctacaccaaggtgcagctgaaggagctggagagagagtacgccaccaacaagttcatcaccaaggacaagagaagaagaatcagcgccaccaccaacctgagcgagagacaggtgaccatctggttccagaacagaagagtgaaggagaagaaggtgatcaacaagctgaagaccaccagctag

SEQ ID NO: 76516 - DNA, 999 bp, synthetic construct
  misc_feature 1..999: note = Description of Artificial Sequence: Synthetic coding sequence
  source 1..999: mol_type = other DNA
atgttcagcgaggagctgtggctggagaacgagaagaagtgcgccgtggtgagaaagagcaagcagggcagaaagagacaggagctgctggccgtggccttcggcgtgaaggtgggcgtgaagggcggcttcctgtggccccccctgaagctgttcgcctgcagccagatcagcagcctggtgagaagagccgccctgacccacaacgacaaccacttcaactacgagaagacccacaacttcaaggtgcacaccttcagaggcccccactggtgcgagtactgcgccaacttcatgtggggcctgatcgcccagggcgtgagatgcagcgactgcggcctgaacgtgcacaagcagtgcagcaagcacgtgcccaacgactgccagcccgacctgaagagaatcaagaaggtgtactgctgcgacctgaccaccctggtgaaggcccacaacacccagagacccatggtggtggacatctgcatcagagagatcgaggccagaggcctgaagagcgagggcctgtacagagtgagcggcttcaccgagcacatcgaggacgtgaagatggccttcgacagagacggcgagaaggccgacatcagcgccaacgtgtaccccgacatcaacatcatcaccggcgccctgaagctgtacttcagagacctgcccatccccgtgatcacctacgacacctacagcaagttcatcgacgccgccaagatcagcaacgccgacgagagactggaggccgtgcacgaggtgctgatgctgctgccccccgcccactacgagaccctgagatacctgatgatccacctgaagaaggtgaccatgaacgagaaggacaacttcatgaacgccgagaacctgggcatcgtgttcggccccaccctgatgagaccccccgaggacagcaccctgaccaccctgcacgacatgagataccagaagctgatcgtgcagatcctgatcgagaacgaggacgtgctgttctag

SEQ ID NO: 76517 - DNA, 525 bp, synthetic construct
  misc_feature 1..525: note = Description of Artificial Sequence: Synthetic coding sequence
  source 1..525: mol_type = other DNA
atggccgccagcagcaacagcagcctgagcggcagcagcgtgagcagcgtgtacagcgagcccagaagccccagagagctgcccaagtacgccgaggagtaccagccccccatctggaagagctacctgtaccagctgcagcaggaggcccccagacccaagagaatcatctgccccagagaggtggagaacagacccaagtactacggcagagagttccacggcatcatcagcagagagcaggccgacgagctgctgggcggcgtggagggcgcctacatcctgagagagagccagagacagcccggctgctacaccctggccctgagattcggcaaccagaccctgaactacagactgttccacgacggcaagcacttcgtgggcgagaagagattcgagagcatccacgacctggtgaccgacggcctgatcaccctgtacatcgagaccaaggccgccgagtacatcagcaagatgaccaccaaccccatctacgagcacatcggctacgccaccctgtag

SEQ ID NO: 76518 - DNA, 825 bp, synthetic construct
  misc_feature 1..825: note = Description of Artificial Sequence: Synthetic coding sequence
  source 1..825: mol_type = other DNA
atgttcagcgaggagctgtggctggagaacgagaagaagtgcgccgtggtgagaaagagcaagcagggcagaaagagacaggagctgctggccgtggccttcggcgtgaaggtgggcgtgaagggcggcttcctgtggccccccctgaagctgttcgcctgcagccagatcagcagcctggtgagaagagccgccctgacccacaacgacaaccacttcaactacgagaagacccacaacttcaaggtgcacaccttcagaggcccccactggtgcgagtactgcgccaacttcatgtggggcctgatcgcccagggcgtgagatgcagcggcctgaagagcgagggcctgtacagagtgagcggcttcaccgagcacatcgaggacgtgaagatggccttcgacagagacggcgagaaggccgacatcagcgccaacgtgtaccccgacatcaacatcatcaccggcgccctgaagctgtacttcagagacctgcccatccccgtgatcacctacgacacctacagcaagttcatcgacgccgccaagatcagcaacgccgacgagagactggaggccgtgcacgaggtgctgatgctgctgccccccgcccactacgagaccctgagatacctgatgatccacctgaagaaggtgaccatgaacgagaaggacaacttcatgaacgccgagaacctgggcatcgtgttcggccccaccctgatgagaccccccgaggacagcaccctgaccaccctgcacgacatgagataccagaagctgatcgtgcagatcctgatcgagaacgaggacgtgctgttctag

SEQ ID NO: 76519 - DNA, 864 bp, synthetic construct
  misc_feature 1..864: note = Description of Artificial Sequence: Synthetic coding sequence
  source 1..864: mol_type = other DNA
atgttcagcgaggagctgtggctggagaacgagaagaagtgcgccgtggtgagaaagagcaagcagggcagaaagagacaggagctgctggccgtggccttcggcgtgaaggtgcacaccttcagaggcccccactggtgcgagtactgcgccaacttcatgtggggcctgatcgcccagggcgtgagatgcagcgactgcggcctgaacgtgcacaagcagtgcagcaagcacgtgcccaacgactgccagcccgacctgaagagaatcaagaaggtgtactgctgcgacctgaccaccctggtgaaggcccacaacacccagagacccatggtggtggacatctgcatcagagagatcgaggccagaggcctgaagagcgagggcctgtacagagtgagcggcttcaccgagcacatcgaggacgtgaagatggccttcgacagagacggcgagaaggccgacatcagcgccaacgtgtaccccgacatcaacatcatcaccggcgccctgaagctgtacttcagagacctgcccatccccgtgatcacctacgacacctacagcaagttcatcgacgccgccaagatcagcaacgccgacgagagactggaggccgtgcacgaggtgctgatgctgctgccccccgcccactacgagaccctgagatacctgatgatccacctgaagaaggtgaccatgaacgagaaggacaacttcatgaacgccgagaacctgggcatcgtgttcggccccaccctgatgagaccccccgaggacagcaccctgaccaccctgcacgacatgagataccagaagctgatcgtgcagatcctgatcgagaacgaggacgtgctgttctag

SEQ ID NO: 76520 - DNA, 579 bp, synthetic construct
  misc_feature 1..579: note = Description of Artificial Sequence: Synthetic coding sequence
  source 1..579: mol_type = other DNA
atggccgccagcagcaacagcagcctgagcggcagcagcgtgagcagcgacgccgaggagtaccagccccccatctggaagagctacctgtaccagctgcagcaggaggcccccagacccaagagaatcatctgccccagagaggtggagaacagacccaagtactacggcagagagttccacggcatcatcagcagagagcaggccgacgagctgctgggcggcgtggagggcgcctacatcctgagagagagccagagacagcccggctgctacaccctggccctgagaaaccccaccaagatcagcaacgccgacgagagactggaggccgtgcacgaggtgctgatgctgctgccccccgcccactacgagaccctgagatacctgatgatccacctgaagaaggtgaccatgaacgagaaggacaacttcatgaacgccgagaacctgggcatcgtgttcggccccaccctgatgagaccccccgaggacagcaccctgaccaccctgcacgacatgagataccagaagctgatcgtgcagatcctgatcgagaacgaggacgtgctgttctag

SEQ ID NO: 76521 - DNA, 861 bp, synthetic construct
  misc_feature 1..861: note = Description of Artificial Sequence: Synthetic coding sequence
  source 1..861: mol_type = other DNA
atgttcagcgaggagctgtggctggagaacgagaagaagtgcgccgtggtgagaaagagcaagcagggcagaaagagacaggagctgctggccgtggccttcggcgtgaaggtgggcgtgaagggcggcttcctgtggccccccctgaagctgttcgcctgcagccagatcagcagcctggtgagaagagccgccctgacccacaacgacaaccacttcaactacgagaagacccacaacttcaaggtgcacaccttcagaggcccccactggtgcgagtactgcgccaacttcatgtggggcctgatcgcccagggcgtgagatgcagcgactgcggcctgaacgtgcacaagcagtgcagcaagcacgtgcccaacgactgccagcccgacctgaagagaatcaagaaggtgtactgctgcgacctgaccaccctggtgaaggcccacaacacccagagacccatggtggtggacatctgcatcagagagatcgaggccagaggcctgaagagcgagggcctgtacagagtgagcggcttcaccgagcacatcgaggacgtgaagatggccttcgacagagagatcagcaacgccgacgagagactggaggccgtgcacgaggtgctgatgctgctgccccccgcccactacgagaccctgagatacctgatgatccacctgaagaaggtgaccatgaacgagaaggacaacttcatgaacgccgagaacctgggcatcgtgttcggccccaccctgatgagaccccccgaggacagcaccctgaccaccctgcacgacatgagataccagaagctgatcgtgcagatcctgatcgagaacgaggacgtgctgttctag

SEQ ID NO: 76522 - DNA, 1446 bp, synthetic construct
  misc_feature 1..1446: note = Description of Artificial Sequence: Synthetic coding sequence
  source 1..1446: mol_type = other DNA
atggccgccagcagcaacagcagcctgagcggcagcagcgtgagcagcgtgtacagcgagcccagaagccccagagagctgcccaagtacgccgaggagtaccagccccccatctggaagagctacctgtaccagctgcagcaggaggcccccagacccaagagaatcatctgccccagagaggtggagaacagacccaagtactacggcagagagttccacggcatcatcagcagagagcaggccgacgagctgctgggcggcgtggagggcgcctacatcctgagagagagccagagacagcccggctgctacaccctggccctgagattcggcaaccagaccctgaactacagactgttccacgacggcaagcacttcgtgggcgagaagagattcgagagcatccacgacctggtgaccgacggcctgatcaccctgtacatcgagaccaaggccgccgagtacatcagcaagatgaccaccaaccccatctacgagcacatcggctacgccaccctgctgagagagaaggtgagcagaagactgagcagaagcaagaacgagcccagaaagaccaacgtgacccacgaggagcacaccgccgtggagaagatcagcagcctggtgagaagagccgccctgacccacaacgacaaccacttcaactacgagaagacccacaacttcaaggtgcacaccttcagaggcccccactggtgcgagtactgcgccaacttcatgtggggcctgatcgcccagggcgtgagatgcagcgactgcggcctgaacgtgcacaagcagtgcagcaagcacgtgcccaacgactgccagcccgacctgaagagaatcaagaaggtgtactgctgcgacctgaccaccctggtgaaggcccacaacacccagagacccatggtggtggacatctgcatcagagagatcgaggccagaggcctgaagagcgagggcctgtacagagtgagcggcttcaccgagcacatcgaggacgtgaagatggccttcgacagagacggcgagaaggccgacatcagcgccaacgtgtaccccgacatcaacatcatcaccggcgccctgaagctgtacttcagagacctgcccatccccgtgatcacctacgacacctacagcaagttcatcgacgccgccaagatcagcaacgccgacgagagactggaggccgtgcacgaggtgctgatgctgctgccccccgcccactacgagaccctgagatacctgatgatccacctgaagaaggtgaccatgaacgagaaggacaacttcatgaacgccgagaacctgggcatcgtgttcggccccaccctgatgagaccccccgaggacagcaccctgaccaccctgcacgacatgagataccagaagctgatcgtgcagatcctgatcgagaacgaggacgtgctgttctag

SEQ ID NO: 76523 - DNA, 975 bp, synthetic construct
  misc_feature 1..975: note = Description of Artificial Sequence: Synthetic coding sequence
  source 1..975: mol_type = other DNA
atggccgccagcagcaacagcagcctgagcggcagcagcgtgagcagcgacgccgaggagtaccagccccccatctggaagagctacctgtaccagctgcagcaggaggcccccagacccaagagaatcatctgccccagagagatcagcagcctggtgagaagagccgccctgacccacaacgacaaccacttcaactacgagaagacccacaacttcaaggtgcacaccttcagaggcccccactggtgcgagtactgcgccaacttcatgtggggcctgatcgcccagggcgtgagatgcagcgactgcggcctgaacgtgcacaagcagtgcagcaagcacgtgcccaacgactgccagcccgacctgaagagaatcaagaaggtgtactgctgcgacctgaccaccctggtgaaggcccacaacacccagagacccatggtggtggacatctgcatcagagagatcgaggccagaggcctgaagagcgagggcctgtacagagtgagcggcttcaccgagcacatcgaggacgtgaagatggccttcgacagagacggcgagaaggccgacatcagcgccaacgtgtaccccgacatcaacatcatcaccggcgccctgaagctgtacttcagagacctgcccatccccgtgatcacctacgacacctacagcaagttcatcgacgccgccaagatcagcaacgccgacgagagactggaggccgtgcacgaggtgctgatgctgctgccccccgcccactacgagaccctgagatacctgatgatccacctgaagaaggtgaccatgaacgagaaggacaacttcatgaacgccgagaacctgggcatcgtgttcggccccaccctgatgagaccccccgaggacagcaccctgaccaccctgcacgacatgagataccagaagctgatcgtgcagatcctgatcgagaacgaggacgtgctgttctag

SEQ ID NO: 76524 - DNA, 1632 bp, synthetic construct
  misc_feature 1..1632: note = Description of Artificial Sequence: Synthetic coding sequence
  source 1..1632: mol_type = other DNA
atgacccagacccacagagccaagagcgccagcagctgccccaacctgctggtgcccgagacctggccccaccaggtgagcgccagccacgccggcagaagcaagcagccccagggcggcatcctgaagatcaacgaggagcacagaagaggcgccatccaggacctgctggccagccccggcttcaccttcggcaagagagtggtgttcgacagccactgcctgaagagacagcacaccttcgccgacggcctgcacagcagctgcaccagcaacgccgaggagtaccagccccccatctggaagagctacctgtaccagctgcagcaggaggcccccagacccaagagaatcatctgccccagagaggtggagaacagacccaagtactacggcagagagttccacggcatcatcagcagagagcaggccgacgagctgctgggcggcgtggagggcgcctacatcctgagagagagccagagacagcccggctgctacaccctggccctgagattcggcaaccagaccctgaactacagactgttccacgacggcaagcacttcgtgggcgagaagagattcgagagcatccacgacctggtgaccgacggcctgatcaccctgtacatcgagaccaaggccgccgagtacatcagcaagatgaccaccaaccccatctacgagcacatcggctacgccaccctgctgagagagaaggtgagcagaagactgagcagaagcaagaacgagcccagaaagaccaacgtgacccacgaggagcacaccgccgtggagaagatcagcagcctggtgagaagagccgccctgacccacaacgacaaccacttcaactacgagaagacccacaacttcaaggtgcacaccttcagaggcccccactggtgcgagtactgcgccaacttcatgtggggcctgatcgcccagggcgtgagatgcagcgactgcggcctgaacgtgcacaagcagtgcagcaagcacgtgcccaacgactgccagcccgacctgaagagaatcaagaaggtgtactgctgcgacctgaccaccctggtgaaggcccacaacacccagagacccatggtggtggacatctgcatcagagagatcgaggccagaggcctgaagagcgagggcctgtacagagtgagcggcttcaccgagcacatcgaggacgtgaagatggccttcgacagagacggcgagaaggccgacatcagcgccaacgtgtaccccgacatcaacatcatcaccggcgccctgaagctgtacttcagagacctgcccatccccgtgatcacctacgacacctacagcaagttcatcgacgccgccaagatcagcaacgccgacgagagactggaggccgtgcacgaggtgctgatgctgctgccccccgcccactacgagaccctgagatacctgatgatccacctgaagaaggtgaccatgaacgagaaggacaacttcatgaacgccgagaacctgggcatcgtgttcggccccaccctgatgagaccccccgaggacagcaccctgaccaccctgcacgacatgagataccagaagctgatcgtgcagatcctgatcgagaacgaggacgtgctgttctag

SEQ ID NO: 76525 - DNA, 1362 bp, synthetic construct
  misc_feature 1..1362: note = Description of Artificial Sequence: Synthetic coding sequence
  source 1..1362: mol_type = other DNA
atggacgccgaggagtaccagccccccatctggaagagctacctgtaccagctgcagcaggaggcccccagacccaagagaatcatctgccccagagaggtggagaacagacccaagtactacggcagagagttccacggcatcatcagcagagagcaggccgacgagctgctgggcggcgtggagggcgcctacatcctgagagagagccagagacagcccggctgctacaccctggccctgagattcggcaaccagaccctgaactacagactgttccacgacggcaagcacttcgtgggcgagaagagattcgagagcatccacgacctggtgaccgacggcctgatcaccctgtacatcgagaccaaggccgccgagtacatcagcaagatgaccaccaaccccatctacgagcacatcggctacgccaccctgctgagagagaaggtgagcagaagactgagcagaagcaagaacgagcccagaaagaccaacgtgacccacgaggagcacaccgccgtggagaagatcagcagcctggtgagaagagccgccctgacccacaacgacaaccacttcaactacgagaagacccacaacttcaaggtgcacaccttcagaggcccccactggtgcgagtactgcgccaacttcatgtggggcctgatcgcccagggcgtgagatgcagcgactgcggcctgaacgtgcacaagcagtgcagcaagcacgtgcccaacgactgccagcccgacctgaagagaatcaagaaggtgtactgctgcgacctgaccaccctggtgaaggcccacaacacccagagacccatggtggtggacatctgcatcagagagatcgaggccagaggcctgaagagcgagggcctgtacagagtgagcggcttcaccgagcacatcgaggacgtgaagatggccttcgacagagacggcgagaaggccgacatcagcgccaacgtgtaccccgacatcaacatcatcaccggcgccctgaagctgtacttcagagacctgcccatccccgtgatcacctacgacacctacagcaagttcatcgacgccgccaagatcagcaacgccgacgagagactggaggccgtgcacgaggtgctgatgctgctgccccccgcccactacgagaccctgagatacctgatgatccacctgaagaaggtgaccatgaacgagaaggacaacttcatgaacgccgagaacctgggcatcgtgttcggccccaccctgatgagaccccccgaggacagcaccctgaccaccctgcacgacatgagataccagaagctgatcgtgcagatcctgatcgagaacgaggacgtgctgttctag

SEQ ID NO: 76526 - DNA, 1152 bp, synthetic construct
  misc_feature 1..1152: note = Description of Artificial Sequence: Synthetic coding sequence
  source 1..1152: mol_type = other DNA
atgggcgtgaaggccagccagaccggcttcgtggtgctggtgctgctgcagtgctgcagcgcctacaagctggtgtgctactacaccagctggagccagtacagagagggcgacggcagctgcttccccgacgccctggacagattcctgtgcacccacatcatctacagcttcgccaacatcagcaacgaccacatcgacacctgggagtggaacgacgtgaccctgtacggcatgctgaacaccctgaagaacagaaaccccaacctgaagaccctgctgagcgtgggcggctggaacttcggcagccagagattcagcaagatcgccagcaacacccagagcagaagaaccttcatcaagagcgtgccccccttcctgagaacccacggcttcgacggcctggacctggcctggctgtaccccggcagaagagacaagcagcacttcaccaccctgatcaaggagatgaaggccgagttcatcaaggaggcccagcccggcaagaagcagctgctgctgagcgccgccctgagcgccggcaaggtgaccatcgacagcagctacgacatcgccaagatcagccagcacctggacttcatcagcatcatgacctacgacttccacggcgcctggagaggcaccaccggccaccacagccccctgttcagaggccaggaggacgccagccccgacagattcagcaacaccgactacgccgtgggctacatgctgagactgggcgcccccgccagcaagctggtgatgggcatccccaccttcggcagaagcttcaccctggccagcagcgagaccggcgtgggcgcccccatcagcggccccggcatccccggcagattcaccaaggaggccggcaccctggcctactacgagatctgcgacttcctgagaggcgccaccgtgcacagaatcctgggccagcaggtgccctacgccaccaagggcaaccagtgggtgggctacgacgaccaggagagcgtgaagagcaaggtgcagtacctgaaggacagacagctggccggcgccatggtgtgggccctggacctggacgacttccagggcagcttctgcggccaggacctgagattccccctgaccaacgccatcaaggacgccctggccgccacctag

SEQ ID NO: 76527 - DNA, 459 bp, synthetic construct
  misc_feature 1..459: note = Description of Artificial Sequence: Synthetic coding sequence
  source 1..459: mol_type = other DNA
tgactgctgctgagcgccgccctgagcgccggcaaggtgaccatcgacagcagctacgacatcgccaagatcagccagcacctggacttcatcagcatcatgacctacgacttccacggcgcctggagaggcaccaccggccaccacagccccctgttcagaggccaggaggacgccagccccgacagattcagcaacaccatctgcgacttcctgagaggcgccaccgtgcacagaatcctgggccagcaggtgccctacgccaccaagggcaaccagtgggtgggctacgacgaccaggagagcgtgaagagcaaggtgcagtacctgaaggacagacagctggccggcgccatggtgtgggccctggacctggacgacttccagggcagcttctgcggccaggacctgagattccccctgaccaacgccatcaaggacgccctggccgccacctag

SEQ ID NO: 76528 - DNA, 306 bp, synthetic construct
  misc_feature 1..306: note = Description of Artificial Sequence: Synthetic coding sequence
  source 1..306: mol_type = other DNA
atggtgagcacccccgagaacagacagaccttcatcaccagcgtgatcaagttcctgagacagtacgagttcgacggcctggacttcgactgggagtaccccggcagcagaggcagccccccccaggacaagcacctgttcaccgtgctggtgcagatgagaaagctgaagtacagagaggacctgagcaacctgcccaagatcacccagctggtgggcatcatcaccagcagcgccgtgtggccccagagccccctgctgctgagcatcaccctgggctgccccctgctgctgagaaacgcctag

SEQ ID NO: 76529 - DNA, 1431 bp, synthetic construct
  misc_feature 1..1431: note = Description of Artificial Sequence: Synthetic coding sequence
  source 1..1431: mol_type = other DNA
atgaccaagctgatcctgctgaccggcctggtgctgatcctgaacctgcagctgggcagcgcctaccagctgacctgctacttcaccaactgggcccagtacagacccggcctgggcagattcatgcccgacaacatcgacccctgcctgtgcacccacctgatctacgccttcgccggcagacagaacaacgagatcaccaccatcgagtggaacgacgtgaccctgtaccaggccttcaacggcctgaagaacaagaacagccagctgaagaccctgctggccatcggcggctggaacttcggcaccgcccccttcaccgccatggtgagcacccccgagaacagacagaccttcatcaccagcgtgatcaagttcctgagacagtacgagttcgacggcctggacttcgactgggagtaccccggcagcagaggcagccccccccaggacaagcacctgttcaccgtgctggtgcaggagatgagagaggccttcgagcaggaggccaagcagatcaacaagcccagactgatggtgaccgccgccgtggccgccggcatcagcaacatccagagcggctacgagatcccccagctgagccagtacctggactacatccacgtgatgacctacgacctgcacggcagctgggagggctacaccggcgagaacagccccctgtacaagtaccccaccgacaccggcagcaacgcctacctgaacgtggactacgtgatgaactactggaaggacaacggcgcccccgccgagaagctgatcgtgggcttccccacctacggccacaacttcatcctgagcaaccccagcaacaccggcatcggcgcccccaccagcggcgccggccccgccggcccctacgccaaggagagcggcatctgggcctactacgagatctgcaccttcctgaagaacggcgccacccagggctgggacgccccccaggaggtgccctacgcctaccagggcaacgtgtgggtgggctacgacaacatcaagagcttcgacatcaaggcccagtggctgaagcacaacaagttcggcggcgccatggtgtgggccatcgacctggacgacttcaccggcaccttctgcaaccagggcaagttccccctgatcagcaccctgaagaaggccctgggcctgcagagcgccagctgcaccgcccccgcccagcccatcgagcccatcaccgccgcccccagcggcagcggcaacggcagcggcagcagcagcagcggcggcagcagcggcggcagcggcttctgcgccgtgagagccaacggcctgtaccccgtggccaacaacagaaacgccttctggcactgcgtgaacggcgtgacctaccagcagaactgccaggccggcctggtgttcgacaccagctgcgactgctgcaactgggcctag

SEQ ID NO: 76530 - DNA, 948 bp, synthetic construct
  misc_feature 1..948: note = Description of Artificial Sequence: Synthetic coding sequence
  source 1..948: mol_type = other DNA
atgagagaggccttcgagcaggaggccaagcagatcaacaagcccagactgatggtgaccgccgccgtggccgccggcatcagcaacatccagagcggctacgagatcccccagctgagccagtacctggactacatccacgtgatgacctacgacctgcacggcagctgggagggctacaccggcgagaacagccccctgtacaagtaccccaccgacaccggcagcaacgcctacctgaacgtggactacgtgatgaactactggaaggacaacggcgcccccgccgagaagctgatcgtgggcttccccacctacggccacaacttcatcctgagcaaccccagcaacaccggcatcggcgcccccaccagcggcgccggccccgccggcccctacgccaaggagagcggcatctgggcctactacgagatctgcaccttcctgaagaacggcgccacccagggctgggacgccccccaggaggtgccctacgcctaccagggcaacgtgtgggtgggctacgacaacatcaagagcttcgacatcaaggcccagtggctgaagcacaacaagttcggcggcgccatggtgtgggccatcgacctggacgacttcaccggcaccttctgcaaccagggcaagttccccctgatcagcaccctgaagaaggccctgggcctgcagagcgccagctgcaccgcccccgcccagcccatcgagcccatcaccgccgcccccagcggcagcggcaacggcagcggcagcagcagcagcggcggcagcagcggcggcagcggcttctgcgccgtgagagccaacggcctgtaccccgtggccaacaacagaaacgccttctggcactgcgtgaacggcgtgacctaccagcagaactgccaggccggcctggtgttcgacaccagctgcgactgctgcaactgggcctag

SEQ ID NO: 76531 - DNA, 1431 bp, synthetic construct; identical to SEQ ID NO: 76529
  misc_feature 1..1431: note = Description of Artificial Sequence: Synthetic coding sequence
  source 1..1431: mol_type = other DNA

SEQ ID NO: 76532 - DNA, 1263 bp, synthetic construct
  misc_feature 1..1263: note = Description of Artificial Sequence: Synthetic coding sequence
  source 1..1263: mol_type = other DNA
gagaccagcagcagcgtgcacgagcaggtggccgacagcggcgcccaggccgtggccttccagagcggcggcgagagcagcatcgtgtggaacagccagctgaagaccctgctggccatcggcggctggaacttcggcaccgcccccttcaccgccatggtgagcacccccgagaacagacagaccttcatcaccagcgtgatcaagttcctgagacagtacgagttcgacggcctggacttcgactgggagtaccccggcagcagaggcagccccccccaggacaagcacctgttcaccgtgctggtgcaggagatgagagaggccttcgagcaggaggccaagcagatcaacaagcccagactgatggtgaccgccgccgtggccgccggcatcagcaacatccagagcggctacgagatcccccagctgagccagtacctggactacatccacgtgatgacctacgacctgcacggcagctgggagggctacaccggcgagaacagccccctgtacaagtaccccaccgacaccggcagcaacgcctacctgaacgtggactacgtgatgaactactggaaggacaacggcgcccccgccgagaagctgatcgtgggcttccccacctacggccacaacttcatcctgagcaaccccagcaacaccggcatcggcgcccccaccagcggcgccggccccgccggcccctacgccaaggagagcggcatctgggcctactacgagatctgcaccttcctgaagaacggcgccacccagggctgggacgccccccaggaggtgccctacgcctaccagggcaacgtgtgggtgggctacgacaacatcaagagcttcgacatcaaggcccagtggctgaagcacaacaagttcggcggcgccatggtgtgggccatcgacctggacgacttcaccggcaccttctgcaaccagggcaagttccccctgatcagcaccctgaagaaggccctgggcctgcagagcgccagctgcaccgcccccgcccagcccatcgagcccatcaccgccgcccccagcggcagcggcaacggcagcggcagcagcagcagcggcggcagcagcggcggcagcggcttctgcgccgtgagagccaacggcctgtaccccgtggccaacaacagaaacgccttctggcactgcgtgaacggcgtgacctaccagcagaactgccaggccggcctggtgttcgacaccagctgcgactgctgcaactgggcctag

SEQ ID NO: 76533 - DNA, 1107 bp, synthetic construct
  misc_feature 1..1107: note = Description of Artificial Sequence: Synthetic coding sequence
  source 1..1107: mol_type = other DNA
atggtgagcacccccgagaacagacagaccttcatcaccagcgtgatcaagttcctgagacagtacgagttcgacggcctggacttcgactgggagtaccccggcagcagaggcagccccccccaggacaagcacctgttcaccgtgctggtgcaggagatgagagaggccttcgagcaggaggccaagcagatcaacaagcccagactgatggtgaccgccgccgtggccgccggcatcagcaacatccagagcggctacgagatcccccagctgagccagtacctggactacatccacgtgatgacctacgacctgcacggcagctgggagggctacaccggcgagaacagccccctgtacaagtaccccaccgacaccggcagcaacgcctacctgaacgtggactacgtgatgaactactggaaggacaacggcgcccccgccgagaagctgatcgtgggcttccccacctacggccacaacttcatcctgagcaaccccagcaacaccggcatcggcgcccccaccagcggcgccggccccgccggcccctacgccaaggagagcggcatctgggcctactacgagatctgcaccttcctgaagaacggcgccacccagggctgggacgccccccaggaggtgccctacgcctaccagggcaacgtgtgggtgggctacgacaacatcaagagcttcgacatcaaggcccagtggctgaagcacaacaagttcggcggcgccatggtgtgggccatcgacctggacgacttcaccggcaccttctgcaaccagggcaagttccccctgatcagcaccctgaagaaggccctgggcctgcagagcgccagctgcaccgcccccgcccagcccatcgagcccatcaccgccgcccccagcggcagcggcaacggcagcggcagcagcagcagcggcggcagcagcggcggcagcggcttctgcgccgtgagagccaacggcctgtaccccgtggccaacaacagaaacgccttctggcactgcgtgaacggcgtgacctaccagcagaactgccaggccggcctggtgttcgacaccagctgcgactgctgcaactgggcctag

SEQ ID NO: 76534 - DNA, 948 bp, synthetic construct; identical to SEQ ID NO: 76530
  misc_feature 1..948: note = Description of Artificial Sequence: Synthetic coding sequence
  source 1..948: mol_type = other DNA

SEQ ID NO: 76535 - DNA, 948 bp, synthetic construct; identical to SEQ ID NO: 76530
  misc_feature 1..948: note = Description of Artificial Sequence: Synthetic coding sequence
  source 1..948: mol_type = other DNA

SEQ ID NO: 76536 - DNA, 864 bp, synthetic construct
  misc_feature 1..864: note = Description of Artificial Sequence: Synthetic coding sequence
  source 1..864: mol_type = other DNA
atgagagaggccttcgagcaggaggccaagcagatcaacaagcccagactgatggtgaccgccgccgtggccgccggcatcagcaacatccagagcggctacgagatcccccagctgagccagtacctggactacatccacgtgatgacctacgacctgcacggcagctgggagggctacaccggcgagaacagccccctgtacaagtaccccaccgacaccggcagcaacgcctacctgaacgtggactacgtgatgaactactggaaggacaacggcgcccccgccgagaagctgatcgtgggcttccccacctacggccacaacttcatcctgagcaaccccagcaacaccggcatcggcgcccccaccagcggcgccggccccgccggcccctacgccaaggagagcggcatctgggcctactacgagatctgcaccttcctgaagaacggcgccacccagggctgggacgccccccaggaggtgccctacgcctaccagggcaacgtgtgggtgggctacgacaacatcaagagcttcgacatcaaggcccagtggctgaagcacaacaagttcggcggcgccatggtgtgggccatcgacctggacgacttcaccggcaccttctgcaaccagggcaagttccccctgatcagcaccctgaagaaggccctgggcctgcagagcgccagctgcaccgcccccgcccagcccatcgagcccatcaccgccgcccccagcggcagcggcaacggcagcggcagcagcagcagcggcggcagcagcggcggcagcggcttctgcgccgtgagagccaacggcctgtaccccgtggccaacaacagaaacgccttctggtag

SEQ ID NO: 76537 - DNA, 1158 bp, synthetic construct
  misc_feature 1..1158: note = Description of Artificial Sequence: Synthetic coding sequence
  source 1..1158: mol_type = other DNA
atgagcagaccccagctgagaagatggagactggtgagcagcccccccagcggcgtgcccggcctggccctgctggccctgctggccctgctggccctgagactggccgccggcaccgactgcccctgccccgagcccgagctgtgcagacccatcagacaccaccccgacttcgaggtgttcgtgttcgacgtgggccagaagacctggaagagctacgactggagccagatcaccaccgtggccaccttcggcaagtacgacagcgagctgatgtgctacgcccacagcaagggcgccagagtggtgctgaagggcgacgtgagcctgaaggacatcatcgaccccgccttcagagccagctggatcgcccagaagctgaacctggccaagacccagtacatggacggcatcaacatcgacatcgagcaggaggtgaactgcctgagccccgagtacgacgccctgaccgccctggtgaaggagaccaccgacagcttccacagagagatcgagggcagccaggtgaccttcgacgtggcctggagccccaagaacatcgacagaagatgctacaactacaccggcatcgccgacgcctgcgacttcctgttcgtgatgagctacgacgagcagagccagatctggagcgagtgcatcgccgccgccaacgccccctacaaccagaccctgaccggctacaacgactacatcaagatgagcatcaaccccaagaagctggtgatgggcgtgccctggtacggctacgactacacctgcctgaacctgagcgaggaccacgtgtgcaccatcgccaaggtgcccttcagaggcgccccctgcagcgacgccgccggcagacaggtgccctacaagaccatcatgaagcagatcaacagcagcatcagcggcaacctgtgggacaaggaccagagagccccctactacaactacaaggaccccgccggccacttccaccaggtgtggtacgacaacccccagagcatcagcctgaaggccacctacatccagaactacagactgagaggcatcggcatgtggaacgccaactgcctggactacagcggcgacgccgtggccaagcagcagaccgaggagatgtgggaggtgctgaagcccaagctgctgcagagatag

SEQ ID NO: 76538 - DNA, 2967 bp, synthetic construct
  misc_feature 1..2967: note = Description of Artificial Sequence: Synthetic coding sequence
  source 1..2967: mol_type = other DNA
atggagcagagcagaagccagcagagaggcggcgagcagagctggtggggcagcgacccccagtaccagtacatgcccttcgagcactgcaccagctacggcctgcccagcgagaacggcggcctgcagcacagactgagaaaggacgccggccccagacacaacgtgcaccccacccagatctacggccaccacaaggagcagttcagcgacagagagcaggacatcggcatgcccaagaagaccggcagcagcagcaccgtggacagcaaggacgaggaccactacagcaagtgccaggactgcatccacagactgggccaggtggtgagaagaaagctgggcgaggacggcatcttcctggtgctgctgggcctgctgatggccctggtgagctggagcatggactacgtgagcgccaagagcctgcaggcctacaagtggagctacgcccagatgcagcccagcctgcccctgcagttcctggtgtgggtgaccttccccctggtgctgatcctgttcagcgccctgttctgccacctgatcagcccccaggccgtgggcagcggcatccccgagatgaagaccatcctgagaggcgtggtgctgaaggagtacctgaccatgaaggccttcgtggccaaggtggtggccctgaccgccggcctgggcagcggcatccccgtgggcaaggagggccccttcgtgcacatcgccagcatctgcgccgccgtgctgagcaagttcatgagcgtgttctgcggcgtgtacgagcagccctactactacagcgacatcctgaccgtgggctgcgccgtgggcgtgggctgctgcttcggcacccccctgggcggcgtgctgttcagcatcgaggtgaccagcacctacttcgccgtgagaaactactggagaggcttcttcgccgccaccttcagcgccttcgtgttcagagtgctggccgtgtggaacaaggacgccgtgaccatcaccgccctgttcagaaccaacttcagaatggacttccccttcgacctgaaggagctgcccgccttcgccgccatcggcatctgctgcggcctgctgggcgccgtgttcgtgtacctgcacagacaggtgatgctgggcgtgagaaagcacaaggccctgagccagttcctggccaagcacagactgctgtaccccggcatcgtgaccttcgtgatcgccagcttcaccttcccccccggcatgggccagttcatggccggcgagctgatgcccagagaggccatcagcaccctgttcgacaacaacacctgggtgaagcacgccggcgaccccgagagcctgggccagagcgccgtgtggatccaccccagagtgaacgtggtgatcatcatcttcctgttcttcgtgatgaagttctggatgagcatcgtggccaccaccatgcccatcccctgcggcggcttcatgcccgtgttcgtgctgggcgccgccttcggcagactggtgggcgagatcatggccatgctgttccccgacggcatcctgttcgacgacatcatctacaagatcctgcccggcggctacgccgtgatcggcgccgccgccctgaccggcgccgtgagccacaccgtgagcaccgccgtgatctgcttcgagctgaccggccagatcgcccacatcctgcccatgatggtggccgtgatcctggccaacatggtggcccagagcctgcagcccagcctgtacgacagcatcatccaggtgaagaagctgccctacctgcccgacctgggctggaaccagctgagcaagtacaccatcttcgtggaggacatcatggtgagagacgtgaagttcgtgagcgccagctacacctacggcgagctgagaaccctgctgcagaccaccaccgtgaagaccctgcccctggtggacagcaaggacagcatgatcctgctgggcagcgtggagagaagcgagctgcaggccctgctgcagagacacctgtgccccgagagaagactgagagccgcccaggagatggccagaaagctgagcgagctgccctacgacggcaaggccagactggccggcgagggcctgcccggcgccccccccggcagacccgagagcttcgccttcgtggacgaggacgaggacgaggacctgagcggcaagagcgagctgccccccagcctggccctgcaccccagcaccaccgcccccctgagccccgaggagcccaacggccccctgcccggccacaagcagcagcccgaggcccccgagcccgccggccagagacccagcatcttccagagcctgctgcactgcctgctgggcagagccagacccaccaagaagaagaccacccaggacagcaccgacctggtggacaacatgagccccgaggagatcgaggcctgggagcaggagcagctgagccagcccgtgtgcttcgacagctgctgcatcgaccagagccccttccagctggtggagcagaccaccctgcacaagacccacaccctgttcagcctgctgggcctgcacctggcctacgtgaccagcatgggcaagctgagaggcgtgctggccctggaggagctgcagaaggccatcgagggccacaccaagagcggcgtgcagctgagaccccccctggccagcttcagaaacaccaccagcaccagaaagagcaccggcgccccccccagcagcgccgagaactggaacctgcccgaggacagacccggcgccaccggcaccggcgacgtgatcgccgccagccccgagacccccgtgcccagccccagccccgagccccccctgagcctggcccccggcaaggtggagggcgagctggaggagctggagctggtggagagccccggcctggaggaggagctggccgacatcctgcagggccccagcctgagaagcaccgacgaggaggacgaggacgagctgatcctgtag

SEQ ID NO: 76539 - DNA, 2697 bp, synthetic construct
  misc_feature 1..2697: note = Description of Artificial Sequence: Synthetic coding sequence
  source 1..2697: mol_type = other DNA
atggccgccgccgccgccgaggagggcatggagcccagagccctgcagtacgagcagaccctgatgtacggcagatacacccaggacctgggcgccttcgccaaggaggaggccgccagaatcagactgggcggccccgagccctggaagggcccccccagcagcagagccgcccccgagctgctggagtacggcagaagcagatgcgccagatgcagagtgtgcagcgtgagatgccacaagttcctggtgagcagagtgggcgaggactggatcttcctggtgctgctgggcctgctgatggccctggtgagctgggtgatggactacgccatcgccgcctgcctgcaggcccagcagtggatgagcagaggcctgaacaccagcatcctgctgcagtacctggcctgggtgacctaccccgtggtgctgatcaccttcagcgccggcttcacccagatcctggccccccaggccgtgggcagcggcatccccgagatgaagaccatcctgagaggcgtggtgctgaaggagtacctgaccctgaagaccttcatcgccaaggtgatcggcctgacctgcgccctgggcagcggcatgcccctgggcaaggagggccccttcgtgcacatcgccagcatgtgcgccgccctgctgagcaagttcctgagcctgttcggcggcatctacgagaacgagagcagaaacaccgagatgctggccgccgcctgcgccgtgggcgtgggctgctgcttcgccgcccccatcggcggcgtgctgttcagcatcgaggtgaccagcaccttcttcgccgtgagaaactactggagaggcttcttcgccgccaccttcagcgccttcatcttcagagtgctggccgtgtggaacagagacgaggagaccatcaccgccctgttcaagaccagattcagactggacttccccttcgacctgcaggagctgcccgccttcgccgtgatcggcatcgccagcggcttcggcggcgccctgttcgtgtacctgaacagaaagatcgtgcaggtgatgagaaagcagaagaccatcaacagattcctgatgagaaagagactgctgttccccgccctggtgaccctgctgatcagcaccctgaccttcccccccggcttcggccagttcatggccggccagctgagccagaaggagaccctggtgaccctgttcgacaacagaacctgggtgagacagggcctggtggaggagctggagccccccagcaccagccaggcctggaacccccccagagccaacgtgttcctgaccctggtgatcttcatcctgatgaagttctggatgagcgccctggccaccaccatccccgtgccctgcggcgccttcatgcccgtgttcgtgatcggcgccgccttcggcagactggtgggcgagagcatggccgcctggttccccgacggcatccacaccgacagcagcacctacagaatcgtgcccggcggctacgccgtggtgggcgccgccgccctggccggcgccgtgacccacaccgtgagcaccgccgtgatcgtgttcgagctgaccggccagatcgcccacatcctgcccgtgatgatcgccgtgatcctggccaacgccgtggcccagagcctgcagcccagcctgtacgacagcatcatcagaatcaagaagctgccctacctgcccgagctgggctggggcagacaccagcagtacagagtgagagtggaggacatcatggtgagagacgtgccccacgtggccctgagctgcaccttcagagacctgagactggccctgcacagaaccaagggcagaatgctggccctggtggagagccccgagagcatgatcctgctgggcagcatcgagagaagccaggtggtggccctgctgggcgcccagctgagccccgccagaagaagacagcacatgcaggagagaagagccacccagaccagccccctgagcgaccaggagggcccccccacccccgaggccagcgtgtgcttccaggtgaacaccgaggacagcgccttccccgccgccagaggcgagacccacaagcccctgaagcccgccctgaagagaggccccagcgtgaccagaaacctgggcgagagccccaccggcagcgccgagagcgccggcatcgccctgagaagcctgttctgcggcagccccccccccgaggccgccagcgagaagctggagagctgcgagaagagaaagctgaagagagtgagaatcagcctggccagcgacgccgacctggagggcgagatgagccccgaggagatcctggagtgggaggagcagcagctggacgagcccgtgaacttcagcgactgcaagatcgaccccgcccccttccagctggtggagagaaccagcctgcacaagacccacaccatcttcagcctgctgggcgtggaccacgcctacgtgaccagcatcggcagactgatcggcatcgtgaccctgaaggagctgagaaaggccatcgagggcagcgtgaccgcccagggcgtgaaggtgagaccccccctggccagcttcagagacagcgccaccagcagcagcgacaccgagaccaccgaggtgcacgccctgtggggcccccacagcagacacggcctgcccagagagggcagccccagcgacagcgacgacaagtgccagtag

SEQ ID NO: 76540 - DNA, 381 bp, synthetic construct
  misc_feature 1..381: note = Description of Artificial Sequence: Synthetic coding sequence
  source 1..381: mol_type = other DNA
atgagaaagagactgctgttccccgccctggtgaccctgctgatcagcaccctgaccttcccccccggcttcggccagttcatggccggccagctgagccagaaggagaccctggtgaccctgttcgacaacagaacctgggtgagacagggcctggtggaggagctggagccccccagcaccagccaggcctggaacccccccagagccaacgtgttcctgaccctggtgatcttcatcctgatgaagcacctgggcgtgtggtgggtgaaggcctggctgcccggcagccagatggagttcatcagaaccgccgcccccaccggcctgtgcctgggcgccaccctgtggagcggccagctgagatggcaggagagatag

SEQ ID NO: 76541 - DNA, 2601 bp, synthetic construct
  misc_feature 1..2601: note = Description of Artificial Sequence: Synthetic coding sequence
  source 1..2601: mol_type = other DNA
atggagagcgagcagctgttccacagaggctactacagaaacagctacaacagcatcaccagcgccagcagcgacgaggagctgctggacggcgccggcgtgatcatggacttccagaccagcgaggacgacaacctgctggacggcgacaccgccgtgggcacccactacaccatgaccaacggcggcagcatcaacagcagcacccacctgctggacctgctggacgagcccatccccggcgtgggcacctacgacgacttccacaccatcgactgggtgagagagaagtgcaaggacagagagagacacagaagaatcaacagcaagaagaaggagagcgcctgggagatgaccaagagcctgtacgacgcctggagcggctggctggtggtgaccctgaccggcctggccagcggcgccctggccggcctgatcgacatcgccgccgactggatgaccgacctgaaggagggcatctgcctgagcgccctgtggtacaaccacgagcagtgctgctggggcagcaacgagaccaccttcgaggagagagacaagtgcccccagtggaagacctgggccgagctgatcatcggccaggccgagggccccggcagctacatcatgaactacatcatgtacatcttctgggccctgagcttcgccttcctggccgtgagcctggtgaaggtgttcgccccctacgcctgcggcagcggcatccccgagatcaagaccatcctgagcggcttcatcatcagaggctacctgggcaagtggaccctgatgatcaagaccatcaccctggtgctggccgtggccagcggcctgagcctgggcaaggagggccccctggtgcacgtggcctgctgctgcggcaacatcttcagctacctgttccccaagtacagcaccaacgaggccaagaagagagaggtgctgagcgccgccagcgccgccggcgtgagcgtggccttcggcgcccccatcggcggcgtgctgttcagcctggaggaggtgagctactacttccccctgaagaccctgtggagaagcttcttcgccgccctggtggccgccttcgtgctgagaagcatcaaccccttcggcaacagcagactggtgctgttctacgtggagtaccacaccccctggtacctgttcgagctgttccccttcatcctgctgggcgtgttcggcggcctgtggggcgccttcttcatcagagccaacatcgcctggtgcagaagaagaaagagcaccaagttcggcaagtaccccgtgctggaggtgatcatcgtggccgccatcaccgccgtgatcgccttccccaacccctacaccagactgaacaccagcgagctgatcaaggagctgttcaccgactgcggccccctggagagcagcagcctgtgcgactacagaaacgacatgaacgccagcaagatcgtggacgacatccccgacagacccgccggcatcggcgtgtacagcgccatctggcagctgtgcctggccctgatcttcaagatcatcatgaccgtgttcaccttcggcatcaaggtgcccagcggcctgttcatccccagcatggccatcggcgccatcgccggcagaatcgtgggcatcgccgtggagcagctggcctactaccaccacgactggttcatcttcaaggagtggtgcgaggtgggcgccgactgcatcacccccggcctgtacgccatggtgggcgccgccgcctgcctgggcggcgtgaccagaatgaccgtgagcctggtggtgatcgtgttcgagctgaccggcggcctggagtacatcgtgcccctgatggccgccgtgatgaccagcaagtgggtgggcgacgccttcggcagagagggcatctacgaggcccacatcagactgaacggctaccccttcctggacgccaaggaggagttcacccacaccaccctggccgccgacgtgatgagacccagaagaaacgacccccccctggccgtgctgacccaggacaacatgaccgtggacgacatcgagaacatgatcaacgagaccagctacaacggcttccccgtgatcatgagcaaggagagccagagactggtgggcttcgccctgagaagagacctgaccatcgccatcgagagcgccagaaagaagcaggagggcatcgtgggcagcagcagagtgtgcttcgcccagcacacccccagcctgcccgccgagagccccagacccctgaagctgagaagcatcctggacatgagccccttcaccgtgaccgaccacacccccatggagatcgtggtggacatcttcagaaagctgggcctgagacagtgcctggtgacccacaacggcatcgtgctgggcatcatcaccaagaagaacatcctggagcacctggagcagctgaagcagcacgtggagcccctggcccccccctggcactacaacaagaagagatacccccccgcctacggccccgacggcaagcccagacccagattcaacaacgtgcagctgaacctgaccgacgaggagagagaggagaccgaggaggaggtgtacctgctgaacagcaccaccctgtag

SEQ ID NO: 76542 - DNA, 2376 bp, synthetic construct
  misc_feature 1..2376: note = Description of Artificial Sequence: Synthetic coding sequence
  source 1..2376: mol_type = other DNA
atggagagcgagcagctgttccacagaggctactacagaaacagctacaacagcatcaccagcgccagcagcgacgaggagctgctggacggcgccggcgtgatcatggacttccagaccagcgaggacgacaacctgctggacggcgacaccgccgtgggcacccactacaccatgaccaacggcggcagcatcaacagcagcacccacctgctggacctgctggacgagcccatccccggcgtgggcacctacgacgacttccacaccatcgactgggtgagagagaagtgcaaggacagagagagacacagaagaatcaacagcaagaagaaggagagcgcctgggagatgaccaagagcctgtacgacgcctggagcggctggctggtggtgaccctgaccggcctggccagcggcgccctggccggcctgatcgacatcgccgccgactggatgaccgacctgaaggagggcatctgcctgagcgccctgtggtacaaccacgagcagtgctgctggggcagcaacgagaccaccttcgaggagagagacaagtgcccccagtggaagacctgggccgagctgatcatcggccaggccgagggccccggcagctacatcatgaactacatcatgtacatcttctgggccctgagcttcgccttcctggccgtgagcctggtgaaggtgttcgccccctacgcctgcggcagcggcatccccgagatcaagaccatcctgagcggcttcatcatcagaggctacctgggcaagtggaccctgatgatcaagaccatcaccctggtgctggccgtggccagcggcctgagcctgggcaaggagggccccctggtgcacgtggcctgctgctgcggcaacatcttcagctacctgttccccaagtacagcaccaacgaggccaagaagagagaggtgagctactacttccccctgaagaccctgtggagaagcttcttcgccgccctggtggccgccttcgtgctgagaagcatcaaccccttcggcaacagcagactggtgctgttctacgtggagtaccacaccccctggtacctgttcgagctgttccccttcatcctgctgggcgtgttcggcggcctgtggggcgccttcttcatcagagccaacatcgcctggtgcagaagaagaaagagcaccaagttcggcaagtaccccgtgctggaggtgatcatcgtggccgccatcaccgccgtgatcgccttccccaacccctacaccagactgaacaccagcgagctgatcaaggagctgttcaccgactgcggccccctggagagcagcagcctgtgcgactacagaaacgacatgaacgccagcaagatcgtggacgacatccccgacagacccgccggcatcggcgtgtacagcgccatctggcagctgtgcctggccctgatcttcaagatcatcatgaccgtgttcaccttcggcatcaaggtgcccagcggcctgttcatccccagcatggccatcggcgccatcgccggcagaatcgtgggcatcgccgtggagcagctggcctactaccaccacgactggttcatcttcaaggagtggtgcgaggtgggcgccgactgcatcacccccggcctgtacgccatggtgggcgccgccgcctgcctgggcggcgtgaccagaatgaccgtgagcctggtggtgatcgtgttcgagctgaccggcggcctggagtacatcgtgcccctgatggccgccgtgatgaccagcaagtgggtgggcgacgccttcggcagagagggcatctacgaggcccacatcagactgaacggctaccccttcctggacgccaaggaggagttcacccacaccaccctggccgccgacgtgatgagacccagaagaaacgacccccccctggccgtgctgacccaggacaacatgaccgtggacgacatcgagaacatgatcaacgagaccagctacaacggcttccccgtgatcatgagcaaggagagccagagactggtgggcttcgccctgagaagagacctgaccatcgccatcgagagcgccagaaagaagcaggagggcatcgtgggcagcagcagagtgtgcttcgcccagcacacccccagcctgcccgccgagagccccagacccctgaagctgagaagcatcctggacatgagccccttcaccgtgaccgaccacacccccatggagatcgtggtggacatcttcagaaagctgggcctgagacagtgcctggtgacccacaacggcagactgctgggcatcatcaccaagaaggacatcctgagacacatggcccagaccgccaaccaggaccccgccagcatcatgttcaactag

SEQ ID NO: 76543 - DNA, 2406 bp, synthetic construct
  misc_feature 1..2406: note = Description of Artificial Sequence: Synthetic coding sequence
  source 1..2406: mol_type = other DNA
atggtgaccctgcagctgggcgagagccactacgtggtgcaggccggcctgcagctgctgggcagcagcaacccccccgccctggccagccaggtggccgagatcaccggcacccactacaccatgaccaacggcggcagcatcaacagcagcacccacctgctggacctgctggacgagcccatccccggcgtgggcacctacgacgacttccacaccatcgactgggtgagagagaagtgcaaggacagagagagacacagaagaatcaacagcaagaagaaggagagcgcctgggagatgaccaagagcctgtacgacgcctggagcggctggctggtggtgaccctgaccggcctggccagcggcgccctggccggcctgatcgacatcgccgccgactggatgaccgacctgaaggagggcatctgcctgagcgccctgtggtacaaccacgagcagtgctgctggggcagcaacgagaccaccttcgaggagagagacaagtgcccccagtggaagacctgggccgagctgatcatcggccaggccgagggccccggcagctacatcatgaactacatcatgtacatcttctgggccctgagcttcgccttcctggccgtgagcctggtgaaggtgttcgccccctacgcctgcggcagcggcatccccgagatcaagaccatcctgagcggcttcatcatcagaggctacctgggcaagtggaccctgatgatcaagaccatcaccctggtgctggccgtggccagcggcctgagcctgggcaaggagggccccctggtgcacgtggcctgctgctgcggcaacatcttcagctacctgttccccaagtacagcaccaacgaggccaagaagagagaggtgctgagcgccgccagcgccgccggcgtgagcgtggccttcggcgcccccatcggcggcgtgctgttcagcctggaggaggtgagctactacttccccctgaagaccctgtggagaagcttcttcgccgccctggtggccgccttcgtgctgagaagcatcaaccccttcggcaacagcagactggtgctgttctacgtggagtaccacaccccctggtacctgttcgagctgttccccttcatcctgctgggcgtgttcggcggcctgtggggcgccttcttcatcagagccaacatcgcctggtgcagaagaagaaagagcaccaagttcggcaagtaccccgtgctggaggtgatcatcgtggccgccatcaccgccgtgatcgccttccccaacccctacaccagactgaacaccagcgagctgatcaaggagctgttcaccgactgcggccccctggagagcagcagcctgtgcgactacagaaacgacatgaacgccagcaagatcgtggacgacatccccgacagacccgccggcatcggcgtgtacagcgccatctggcagctgtgcctggccctgatcttcaagatcatcatgaccgtgttcaccttcggcatcaaggtgcccagcggcctgttcatccccagcatggccatcggcgccatcgccggcagaatcgtgggcatcgccgtggagcagctggcctactaccaccacgactggttcatcttcaaggagtggtgcgaggtgggcgccgactgcatcacccccggcctgtacgccatggtgggcgccgccgcctgcctgggcggcgtgaccagaatgaccgtgagcctggtggtgatcgtgttcgagctgaccggcggcctggagtacatcgtgcccctgatggccgccgtgatgaccagcaagtgggtgggcgacgccttcggcagagagggcatctacgaggcccacatcagactgaacggctaccccttcctggacgccaaggaggagttcacccacaccaccctggccgccgacgtgatgagacccagaagaaacgacccccccctggccgtgctgacccaggacaacatgaccgtggacgacatcgagaacatgatcaacgagaccagctacaacggcttccccgtgatcatgagcaaggagagccagagactggtgggcttcgccctgagaagagacctgaccatcgccatcgagagcgccagaaagaagcaggagggcatcgtgggcagcagcagagtgtgcttcgcccagcacacccccagcctgcccgccgagagccccagacccctgaagctgagaagcatcctggacatgagccccttcaccgtgaccgaccacacccccatggagatcgtggtggacatcttcagaaagctgggcctgagacagtgcctggtgacccacaacggcagactgctgggcatcatcaccaagaaggacatcctgagacacatggcccagaccgccaaccaggaccccgccagcatcatgttcaactag

SEQ ID NO: 76544 - DNA, 522 bp, synthetic construct
  misc_feature 1..522: note = Description of Artificial Sequence: Synthetic coding sequence
  source 1..522: mol_type = other DNA
atggagagcgagcagctgttccacagaggctactacagaaacagctacaacagcatcaccagcgccagcagcgacgaggagctgctggacggcgccggcgtgatcatggacttccagaccagcgaggacgacaacctgctggacggcgacaccgccgtgggcacccactacaccatgaccaacggcggcagcatcaacagcagcacccacctgctggacctgctggacgagcccatccccggcgtgggcacctacgacgacttccacaccatcgactgggtgagagagaagtgcaaggacagagagagacacagaagaatcaacagcaagaagaaggagagcgcctgggagatgaccaagagcctgtacgacgcctggagcggctggctggtggtgaccctgaccggcctggccagcggcgccctggccggcctgatcgacatcgccgccgactggatgaccgacctgaaggagggcatctgcctgagcgccctgtggtacaaccacgagcagtgctgctag

SEQ ID NO: 76545 - DNA, 420 bp, synthetic construct
  misc_feature 1..420: note = Description of Artificial Sequence: Synthetic coding sequence
  source 1..420: mol_type = other DNA
atggagagcgagcagctgttccacagaggctactacagaaacagctacaacagcatcaccagcgccagcagcgacgaggagctgctggacggcgccggcgtgatcatggacttccagaccagcgaggacgacaacctgctggacggcgacaccgccgtgggcacccactacaccatgaccaacggcggcagcatcaacagcagcacccacctgctggacctgctggacgagcccatccccggcgtgggcacctacgacgacttccacaccatcgactgggtgagagagaagtgcaaggacagagagagacacagaagaatcaacagcaagaagaaggagagcgcctgggagatgaccaagagcctgtacgacgcctggagcggctggctggtggtgaccctgaccggcctggccagctag

SEQ ID NO: 76546 - DNA, 2457 bp, synthetic construct
  misc_feature 1..2457: note = Description of Artificial Sequence: Synthetic coding sequence
  source 1..2457: mol_type = other DNA
atggagagcgagcagctgttccacagaggctactacagaaacagctacaacagcatcaccagcgccagcagcgacgaggagctgctggacggcgccggcgtgatcatggacttccagaccagcgaggacgacaacctgctggacggcgacaccgccgtgggcacccactacaccatgaccaacggcggcagcatcaacagcagcacccacctgctggacctgctggacgagcccatccccggcgtgggcacctacgacgacttccacaccatcgactgggtgagagagaagtgcaaggacagagagagacacagaagaatcaacagcaagaagaaggagagcgcctgggagatgaccaagagcctgtacgacgcctggagcggctggctggtggtgaccctgaccggcctggccagcggcgccctggccggcctgatcgacatcgccgccgactggatgaccgacctgaaggagggcatctgcctgagcgccctgtggtacaaccacgagcagtgctgctggggcagcaacgagaccaccttcgaggagagagacaagtgcccccagtggaagacctgggccgagctgatcatcggccaggccgagggccccggcagctacatcatgaactacatcatgtacatcttctgggccctgagcttcgccttcctggccgtgagcctggtgaaggtgttcgccccctacgcctgcggcagcggcatccccgagatcaagaccatcctgagcggcttcatcatcagaggctacctgggcaagtggaccctgatgatcaagaccatcaccctggtgctggccgtggccagcggcctgagcctgggcaaggagggccccctggtgcacgtggcctgctgctgcggcaacatcttcagctacctgttccccaagtacagcaccaacgaggccaagaagagagaggtgctgagcgccgccagcgccgccggcgtgagcgtggccttcggcgcccccatcggcggcgtgctgttcagcctggaggaggtgagctactacttccccctgaagaccctgtggagaagcttcttcgccgccctggtggccgccttcgtgctgagaagcatcaaccccttcggcaacagcagactggtgctgttctacgtggagtaccacaccccctggtacctgttcgagctgttccccttcatcctgctgggcgtgttcggcggcctgtggggcgccttcttcatcagagccaacatcgcctggtgcagaagaagaaagagcaccaagttcggcaagtaccccgtgctggaggtgatcatcgtggccgccatcaccgccgtgatcgccttccccaacccctacaccagactgaacaccagcgagctgatcaaggagctgttcaccgactgcggccccctggagagcagcagcctgtgcgactacagaaacgacatgaacgccagcaagatcgtggacgacatccccgacagacccgccggcatcggcgtgtacagcgccatctggcagctgtgcctggccctgatcttcaagatcatcatgaccgtgttcaccttcggcatcaaggtgcccagcggcctgttcatccccagcatggccatcggcgccatcgccggcagaatcgtgggcatcgccgtggagcagctggcctactaccaccacgactggttcatcttcaaggagtggtgcgaggtgggcgccgactgcatcacccccggcctgtacgccatggtgggcgccgccgcctgcctgggcggcgtgaccagaatgaccgtgagcctggtggtgatcgtgttcgagctgaccggcggcctggagtacatcgtgcccctgatggccgccgtgatgaccagcaagtgggtgggcgacgccttcggcagagagggcatctacgaggcccacatcagactgaacggctaccccttcctggacgccaaggaggagttcacccacaccaccctggccgccgacgtgatgagacccagaagaaacgacccccccctggccgtgctgacccaggacaacatgaccgtggacgacatcgagaacatgatcaacgagaccagctacaacggcttccccgtgatcatgagcaaggagagccagagactggtgggcttcgccctgagaagagacctgaccatcgccatcgagagcgccagaaagaagcaggagggcatcgtgggcagcagcagagtgtgcttcgcccagcacacccccagcctgcccgccgagagccccagacccctgaagctgagaagcatcctggacatgagccccttcaccgtgaccgaccacacccccatggagatcgtggtggacatcttcagaaagctgggcctgagacagtgcctggtgacccacaacggcagactgctgggcatcatcaccaagaaggacatcctgagacacatggcccagaccgccaaccaggaccccgccagcatcatgttcaactag

SEQ ID NO: 76547 - DNA, 576 bp, synthetic construct
  misc_feature 1..576: note = Description of Artificial Sequence: Synthetic coding sequence
  source 1..576: mol_type = other DNA
atggagagcgagcagctgttccacagaggctactacagaaacagctacaacagcatcaccagcgccagcagcgacgaggagctgctggacggcgccggcgtgatcatggacttccagaccagcgaggacgacaacctgctggacggcgacaccgccgtgggcacccactacaccatgaccaacggcggcagcatcaacagcagcacccacctgctggacctgctggacgagcccatccccggcgtgggcacctacgacgacttccacaccatcgactgggtgagagagaagtgcaaggacagagagagacacagaagaatcaacagcaagaagaaggagagcgcctgggagatgaccaagagcctgtacgacgcctggagcggctggctggtggtgaccctgaccggcctggccagcggcgccctggccggcctgatcgacatcgccgccgactggatgaccgacctgaaggagggcatctgcctgagcgccctgtggtacaaccacgagcagtgctgctggggcagcaacgagaccaccttcgagaagaagaagaagaagaagaagaaggcctag

SEQ ID NO: 76548 - DNA, 2190 bp, synthetic construct
  misc_feature 1..2190: note = Description of Artificial Sequence: Synthetic coding sequence
  source 1..2190: mol_type = other DNA
atggtgaacgccggcgccatgagcggcagcggcaacctgatggacttcctggacgagcccttccccgacgtgggcacctacgaggacttccacaccatcgactggctgagagagaagagcagagacaccgacagacacagaaagatcaccagcaagagcaaggagagcatctgggagttcatcaagagcctgctggacgcctggagcggctgggtggtgatgctgctgatcggcctgctggccggcaccctggccggcgtgatcgacctggccgtggactggatgaccgacctgaaggagggcgtgtgcctgagcgccttctggtacagccacgagcagtgctgctggaccagcaacgagaccaccttcgaggacagagacaagtgccccctgtggcagaagtggagcgagctgctggtgaaccagagcgagggcgccagcgcctacatcctgaactacctgatgtacatcctgtgggccctgctgttcgccttcctggccgtgagcctggtgagagtgttcgccccctacgcctgcggcagcggcatccccgagatcaagaccatcctgagcggcttcatcatcagaggctacctgggcaagtggaccctgctgatcaagaccgtgaccctggtgctggtggtgagcagcggcctgagcctgggcaaggagggccccctggtgcacgtggcctgctgctgcggcaacttcttcagcagcctgttcagcaagtacagcaagaacgagggcaagagaagagaggtgctgagcgccgccgccgccgccggcgtgagcgtggccttcggcgcccccatcggcggcgtgctgttcagcctggaggaggtgagctactacttccccctgaagaccctgtggagaagcttcttcgccgccctggtggccgccttcaccctgagaagcatcaaccccttcggcaacagcagactggtgctgttctacgtggagtaccacaccccctggagaagaaagaccaccagactgggcaagtaccccgtgctggaggtgatcgtggtgaccgccatcaccgccatcatcgcctaccccaacccctacaccagacagagcaccagcgagctgatcagcgagctgttcaacgactgcggcgccctggagagcagccagctgtgcgactacatcaacgaccccaacatgaccagacccgtggacgacatccccgacagacccgccggcgtgggcgtgtacaccgccatgtggcagctggccctggccctgatcttcaagatcgtggtgaccatcttcaccttcggcatgaagatccccagcggcctgttcatccccagcatggccgtgggcgccatcgccggcagaatggtgggcatcggcgtggagcagctggcctaccaccaccacgactggatcatcttcagaaactggtgcagacccggcgccgactgcgtgacccccggcctgtacgccatggtgggcgccgccgcctgcctgggcggcgtgaccagaatgaccgtgagcctggtggtgatcatgttcgagctgaccggcggcctggagtacatcgtgcccctgatggccgccgccgtgaccagcaagtgggtggccgacgccttcggcaaggagggcatctacgaggcccacatccacctgaacggctaccccttcctggacgtgaaggacgagttcacccacagaaccctggccaccgacgtgatgagacccagaagaggcgagccccccctgagcgtgctgacccaggacagcatgaccgtggaggacgtggagaccctgatcaaggagaccgactacaacggcttccccgtggtggtgagcagagacagcgagagactgatcggcttcgcccagagaagagagctgatcctggccatcaagaacgccagacagagacaggagggcatcgtgagcaacagcatcatgtacttcaccgaggagccccccgagctgcccgccaacagcccccaccccctgaagctgagaagaatcctgaacctgagccccttcaccgtgaccgaccacacccccatggagaccgtggtggacatcttcagaaagctgggcctgagacagtgcctggtgaccagaagcggcagactgctgggcatcatcaccaagaaggacgtgctgagacacatggcccagatggccaaccaggaccccgagagcatcatgttcaactag

SEQ ID NO: 76549 - DNA, 2283 bp, synthetic construct
  misc_feature 1..2283: note = Description of Artificial Sequence: Synthetic coding sequence
  source 1..2283: mol_type = other DNA
atggtgaacgccggcgccatgagcggcagcggcaacctgatggacttcctggacgagcccttccccgacgtgggcacctacgaggacttccacaccatcgactggctgagagagaagagcagagacaccgacagacacagaaagatcaccagcaagagcaaggagagcatctgggagttcatcaagagcctgctggacgcctggagcggctgggtggtgatgctgctgatcggcctgctggccggcaccctggccggcgtgatcgacctggccgtggactggatgaccgacctgaaggagggcgtgtgcctgagcgccttctggtacagccacgagcagtgctgctggaccagcaacgagaccaccttcgaggacagagacaagtgccccctgtggcagaagtggagcgagctgctggtgaaccagagcgagggcgccagcgcctacatcctgaactacctgatgtacatcctgtgggccctgctgttcgccttcctggccgtgagcctggtgagagtgttcgccccctacgcctgcggcagcggcatccccgagatcaagaccatcctgagcggcttcatcatcagaggctacctgggcaagtggaccctgctgatcaagaccgtgaccctggtgctggtggtgagcagcggcctgagcctgggcaaggagggccccctggtgcacgtggcctgctgctgcggcaacttcttcagcagcctgttcagcaagtacagcaagaacgagggcaagagaagagaggtgctgagcgccgccgccgccgccggcgtgagcgtggccttcggcgcccccatcggcggcgtgctgttcagcctggaggaggtgagctactacttccccctgaagaccctgtggagaagcttcttcgccgccctggtggccgccttcaccctgagaagcatcaaccccttcggcaacagcagactggtgctgttctacgtggagtaccacaccccctggtacatggccgagctgttccccttcatcctgctgggcgtgttcggcggcctgtggggcaccctgttcatcagatgcaacatcgcctggtgcagaagaagaaagaccaccagactgggcaagtaccccgtgctggaggtgatcgtggtgaccgccatcaccgccatcatcgcctaccccaacccctacaccagacagagcaccagcgagctgatcagcgagctgttcaacgactgcggcgccctggagagcagccagctgtgcgactacatcaacgaccccaacatgaccagacccgtggacgacatccccgacagacccgccggcgtgggcgtgtacaccgccatgtggcagctggccctggccctgatcttcaagatcgtggtgaccatcttcaccttcggcatgaagatccccagcggcctgttcatccccagcatggccgtgggcgccatcgccggcagaatggtgggcatcggcgtggagcagctggcctaccaccaccacgactggatcatcttcagaaactggtgcagacccggcgccgactgcgtgacccccggcctgtacgccatggtgggcgccgccgcctgcctgggcggcgtgaccagaatgaccgtgagcctggtggtgatcatgttcgagctgaccggcggcctggagtacatcgtgcccctgatggccgccgccgtgaccagcaagtgggtggccgacgccttcggcaaggagggcatctacgaggcccacatccacctgaacggctaccccttcctggacgtgaaggacgagttcacccacagaaccctggccaccgacgtgatgagacccagaagaggcgagccccccctgagcgtgctgacccaggacagcatgaccgtggaggacgtggagaccctgatcaaggagaccgactacaacggcttccccgtggtggtgagcagagacagcgagagactgatcggcttcgcccagagaagagagctgatcctggccatcaagaacgccagacagagacaggagggcatcgtgagcaacagcatcatgtacttcaccgaggagccccccgagctgcccgccaacagcccccaccccctgaagctgagaagaatcctgaacctgagccccttcaccgtgaccgaccacacccccatggagaccgtggtggacatcttcagaaagctgggcctgagacagtgcctggtgaccagaagcggcagactgctgggcatcatcaccaagaaggacgtgctgagacacatggcccagatggccaaccaggaccccgagagcatcatgttcaactag

SEQ ID NO: 76550 - DNA, 2001 bp, synthetic construct
  misc_feature 1..2001: note = Description of Artificial Sequence: Synthetic coding sequence
  source 1..2001: mol_type = other DNA
atgaccgacctgaaggagggcgtgtgcctgagcgccttctggtacagccacgagcagtgctgctggaccagcaacgagaccaccttcgaggacagagacaagtgccccctgtggcagaagtggagcgagctgctggtgaaccagagcgagggcgccagcgcctacatcctgaactacctgatgtacatcctgtgggccctgctgttcgccttcctggccgtgagcctggtgagagtgttcgccccctacgcctgcggcagcggcatccccgagatcaagaccatcctgagcggcttcatcatcagaggctacctgggcaagtggaccctgctgatcaagaccgtgaccctggtgctggtggtgagcagcggcctgagcctgggcaaggagggccccctggtgcacgtggcctgctgctgcggcaacttcttcagcagcctgttcagcaagtacagcaagaacgagggcaagagaagagaggtgctgagcgccgccgccgccgccggcgtgagcgtggccttcggcgcccccatcggcggcgtgctgttcagcctggaggaggtgagctactacttccccctgaagaccctgtggagaagcttcttcgccgccctggtggccgccttcaccctgagaagcatcaaccccttcggcaacagcagactggtgctgttctacgtggagtaccacaccccctggtacatggccgagctgttccccttcatcctgctgggcgtgttcggcggcctgtggggcaccctgttcatcagatgcaacatcgcctggtgcagaagaagaaagaccaccagactgggcaagtaccccgtgctggaggtgatcgtggtgaccgccatcaccgccatcatcgcctaccccaacccctacaccagacagagcaccagcgagctgatcagcgagctgttcaacgactgcggcgccctggagagcagccagctgtgcgactacatcaacgaccccaacatgaccagacccgtggacgacatccccgacagacccgccggcgtgggcgtgtacaccgccatgtggcagctggccctggccctgatcttcaagatcgtggtgaccatcttcaccttcggcatgaagatccccagcggcctgttcatccccagcatggccgtgggcgccatcgccggcagaatggtgggcatcggcgtggagcagctggcctaccaccaccacgactggatcatcttcagaaactggtgcagacccggcgccgactgcgtgacccccggcctgtacgccatggtgggcgccgccgcctgcctgggcggcgtgaccagaatgaccgtgagcctggtggtgatcatgttcgagctgaccggcggcctggagtacatcgtgcccctgatggccgccgccgtgaccagcaagtgggtggccgacgccttcggcaaggagggcatctacgaggcccacatccacctgaacggctaccccttcctggacgtgaaggacgagttcacccacagaaccctggccaccgacgtgatgagacccagaagaggcgagccccccctgagcgtgctgacccaggacagcatgaccgtggaggacgtggagaccctgatcaaggagaccgactacaacggcttccccgtggtggtgagcagagacagcgagagactgatcggcttcgcccagagaagagagctgatcctggccatcaagaacgccagacagagacaggagggcatcgtgagcaacagcatcatgtacttcaccgaggagccccccgagctgcccgccaacagcccccaccccctgaagctgagaagaatcctgaacctgagccccttcaccgtgaccgaccacacccccatggagaccgtggtggacatcttcagaaagctgggcctgagacagtgcctggtgaccagaagcggcagactgctgggcatcatcaccaagaaggacgtgctgagacacatggcccagatggccaaccaggaccccgagagcatcatgttcaactag

SEQ ID NO: 76551 - DNA, 459 bp, synthetic construct
  misc_feature 1..459: note = Description of Artificial Sequence: Synthetic coding sequence
  source 1..459: mol_type = other DNA
atggtgaacgccggcgccatgagcggcagcggcaacctgatggacttcctggacgagcccttccccgacgtgggcacctacgaggacttccacaccatcgactggctgagagagaagagcagagacaccgacagacacagaaagatcaccagcaagagcaaggagagcatctgggagttcatcaagagcctgctggacgcctggagcggctgggtggtgatgctgctgatcggcctgctggccggcaccctggccggcgtgatcgacctggccgtggactggatgaccgacctgaaggagggcgtgtgcctgagcgccttctggtacagccacgagcagtgctgctggaccagcaacgagaccaccttcgaggacagagacaagtgccccctgtggcagaagtggagcgagctgctggtgaaccagagcgaggtgctgagcgccgccgccgccgcctag

SEQ ID NO: 76552 - DNA, 2241 bp, synthetic construct
  misc_feature 1..2241: note = Description of Artificial Sequence: Synthetic coding sequence
  source 1..2241: mol_type = other DNA
atggacttcctggaggagcccatccccggcgtgggcacctacgacgacttcaacaccatcgactgggtgagagagaagagcagagacagagacagacacagagagatcaccaacaagagcaaggagagcacctgggccctgatccacagcgtgagcgacgccttcagcggctggctgctgatgctgctgatcggcctgctgagcggcagcctggccggcctgatcgacatcagcgcccactggatgaccgacctgaaggagggcatctgcaccggcggcttctggttcaaccacgagcactgctgctggaacagcgagcacgtgaccttcgaggagagagacaagtgccccgagtggaacagctggagccagctgatcatcagcaccgacgagggcgccttcgcctacatcgtgaactacttcatgtacgtgctgtgggccctgctgttcgccttcctggccgtgagcctggtgaaggtgttcgccccctacgcctgcggcagcggcatccccgagatcaagaccatcctgagcggcttcatcatcagaggctacctgggcaagtggaccctggtgatcaagaccatcaccctggtgctggccgtgagcagcggcctgagcctgggcaaggagggccccctggtgcacgtggcctgctgctgcggcaacatcctgtgccactgcttcaacaagtacagaaagaacgaggccaagagaagagaggtgctgagcgccgccgccgccgccggcgtgagcgtggccttcggcgcccccatcggcggcgtgctgttcagcctggaggaggtgagctactacttccccctgaagaccctgtggagaagcttcttcgccgccctggtggccgccttcaccctgagaagcatcaaccccttcggcaacagcagactggtgctgttctacgtggagttccacaccccctggcacctgttcgagctggtgcccttcatcctgctgggcatcttcggcggcctgtggggcgccctgttcatcagaaccaacatcgcctggtgcagaaagagaaagaccacccagctgggcaagtaccccgtgatcgaggtgctggtggtgaccgccatcaccgccatcctggccttccccaacgagtacaccagaatgagcaccagcgagctgatcagcgagctgttcaacgactgcggcctgctggacagcagcaagctgtgcgactacgagaacagattcaacaccagcaagggcggcgagctgcccgacagacccgccggcgtgggcgtgtacagcgccatgtggcagctggccctgaccctgatcctgaagatcgtgatcaccatcttcaccttcggcatgaagatccccagcggcctgttcatccccagcatggccgtgggcgccatcgccggcagactgctgggcgtgggcatggagcagctggcctactaccaccaggagtggaccgtgttcaacagctggtgcagccagggcgccgactgcatcacccccggcctgtacgccatggtgggcgccgccgcctgcctgggcggcgtgaccagaatgaccgtgagcctggtggtgatcatgttcgagctgaccggcggcctggagtacatcgtgcccctgatggccgccgccatgaccagcaagtgggtggccgacgccctgggcagagagggcatctacgacgcccacatcagactgaacggctaccccttcctggaggccaaggaggagttcgcccacaagaccctggccatggacgtgatgaagcccagaagaaacgaccccctgctgaccgtgctgacccaggacagcatgaccgtggaggacgtggagaccatcatcagcgagaccacctacagcggcttccccgtggtggtgagcagagagagccagagactggtgggcttcgtgctgagaagagacctgatcatcagcatcgagaacgccagaaagaagcaggacggcgtggtgagcaccagcatcatctacttcaccgagcacagcccccccctgcccccctacaccccccccaccctgaagctgagaaacatcctggacctgagccccttcaccgtgaccgacctgacccccatggagatcgtggtggacatcttcagaaagctgggcctgagacagtgcctggtgacccacaacggcagactgctgggcatcatcaccaagaaggacgtgctgaagcacatcgcccagatggccaaccaggaccccgacagcatcctgttcaactag

SEQ ID NO: 76553 - DNA, 2451 bp, synthetic construct
  misc_feature 1..2451: note = Description of Artificial Sequence: Synthetic coding sequence
  source 1..2451: mol_type = other DNA
atggccatgtggcagggcgccatggacaacagaggcttccagcagggcagcttcagcagcttccagaacagcagcagcgacgaggacctgatggacatccccgccaccgccatggacttcagcatgagagacgacgtgccccccctggacagagaggtgggcgaggacaagagctacaacggcggcggcatcggcagcagcaacagaatcatggacttcctggaggagcccatccccggcgtgggcacctacgacgacttcaacaccatcgactgggtgagagagaagagcagagacagagacagacacagagagatcaccaacaagagcaaggagagcacctgggccctgatccacagcgtgagcgacgccttcagcggctggctgctgatgctgctgatcggcctgctgagcggcagcctggccggcctgatcgacatcagcgcccactggatgaccgacctgaaggagggcatctgcaccggcggcttctggttcaaccacgagcactgctgctggaacagcgagcacgtgaccttcgaggagagagacaagtgccccgagtggaacagctggagccagctgatcatcagcaccgacgagggcgccttcgcctacatcgtgaactacttcatgtacgtgctgtgggccctgctgttcgccttcctggccgtgagcctggtgaaggtgttcgccccctacgcctgcggcagcggcatccccgagatcaagaccatcctgagcggcttcatcatcagaggctacctgggcaagtggaccctggtgatcaagaccatcaccctggtgctggccgtgagcagcggcctgagcctgggcaaggagggccccctggtgcacgtggcctgctgctgcggcaacatcctgtgccactgcttcaacaagtacagaaagaacgaggccaagagaagagaggtgctgagcgccgccgccgccgccggcgtgagcgtggccttcggcgcccccatcggcggcgtgctgttcagcctggaggaggtgagctactacttccccctgaagaccctgtggagaagcttcttcgccgccctggtggccgccttcaccctgagaagcatcaaccccttcggcaacagcagactggtgctgttctacgtggagttccacaccccctggcacctgttcgagctggtgcccttcatcctgctgggcatcttcggcggcctgtggggcgccctgttcatcagaaccaacatcgcctggtgcagaaagagaaagaccacccagctgggcaagtaccccgtgatcgaggtgctggtggtgaccgccatcaccgccatcctggccttccccaacgagtacaccagaatgagcaccagcgagctgatcagcgagctgttcaacgactgcggcctgctggacagcagcaagctgtgcgactacgagaacagattcaacaccagcaagggcggcgagctgcccgacagacccgccggcgtgggcgtgtacagcgccatgtggcagctggccctgaccctgatcctgaagatcgtgatcaccatcttcaccttcggcatgaagatccccagcggcctgttcatccccagcatggccgtgggcgccatcgccggcagactgctgggcgtgggcatggagcagctggcctactaccaccaggagtggaccgtgttcaacagctggtgcagccagggcgccgactgcatcacccccggcctgtacgccatggtgggcgccgccgcctgcctgggcggcgtgaccagaatgaccgtgagcctggtggtgatcatgttcgagctgaccggcggcctggagtacatcgtgcccctgatggccgccgccatgaccagcaagtgggtggccgacgccctgggcagagagggcatctacgacgcccacatcagactgaacggctaccccttcctggaggccaaggaggagttcgcccacaagaccctggccatggacgtgatgaagcccagaagaaacgaccccctgctgaccgtgctgacccaggacagcatgaccgtggaggacgtggagaccatcatcagcgagaccacctacagcggcttccccgtggtggtgagcagagagagccagagactggtgggcttcgtgctgagaagagacctgatcatcagcatcgagaacgccagaaagaagcaggacggcgtggtgagcaccagcatcatctacttcaccgagcacagcccccccctgcccccctacaccccccccaccctgaagctgagaaacatcctggacctgagccccttcaccgtgaccgacctgacccccatggagatcgtggtggacatcttcagaaagctgggcctgagacagtgcctggtgacccacaacggcagactgctgggcatcatcaccaagaaggacgtgctgaagcacatcgcccagatggccaaccaggaccccgacagcatcctgttcaactag

SEQ ID NO: 76554 - DNA, 2451 bp, synthetic construct; identical to SEQ ID NO: 76553
  misc_feature 1..2451: note = Description of Artificial Sequence: Synthetic coding sequence
  source 1..2451: mol_type = other DNA

SEQ ID NO: 76555 - DNA, 2241 bp, synthetic construct; identical to SEQ ID NO: 76552
  misc_feature 1..2241: note = Description of Artificial Sequence: Synthetic coding sequence
  source 1..2241: mol_type = other DNA

SEQ ID NO: 76556 - DNA, 1947 bp, synthetic construct
  misc_feature 1..1947: note = Description of Artificial Sequence: Synthetic coding sequence
  source 1..1947: mol_type = other DNA
atgaacatcgtggccggcaccctgagcatgagccccctgaagagagacaagtgccccgagtggaacagctggagccagctgatcatcagcaccgacgagggcgccttcgcctacatcgtgaactacttcatgtacgtgctgtgggccctgctgttcgccttcctggccgtgagcctggtgaaggtgttcgccccctacgcctgcggcagcggcatccccgagatcaagaccatcctgagcggcttcatcatcagaggctacctgggcaagtggaccctggtgatcaagaccatcaccctggtgctggccgtgagcagcggcctgagcctgggcaaggagggccccctggtgcacgtggcctgctgctgcggcaacatcctgtgccactgcttcaacaagtacagaaagaacgaggccaagagaagagaggtgctgagcgccgccgccgccgccggcgtgagcgtggccttcggcgcccccatcggcggcgtgctgttcagcctggaggaggtgagctactacttccccctgaagaccctgtggagaagcttcttcgccgccctggtggccgccttcaccctgagaagcatcaaccccttcggcaacagcagactggtgctgttctacgtggagttccacaccccctggcacctgttcgagctggtgcccttcatcctgctgggcatcttcggcggcctgtggggcgccctgttcatcagaaccaacatcgcctggtgcagaaagagaaagaccacccagctgggcaagtaccccgtgatcgaggtgctggtggtgaccgccatcaccgccatcctggccttccccaacgagtacaccagaatgagcaccagcgagctgatcagcgagctgttcaacgactgcggcctgctggacagcagcaagctgtgcgactacgagaacagattcaacaccagcaagggcggcgagctgcccgacagacccgccggcgtgggcgtgtacagcgccatgtggcagctggccctgaccctgatcctgaagatcgtgatcaccatcttcaccttcggcatgaagatccccagcggcctgttcatccccagcatggccgtgggcgccatcgccggcagactgctgggcgtgggcatggagcagctggcctactaccaccaggagtggaccgtgttcaacagctggtgcagccagggcgccgactgcatcacccccggcctgtacgccatggtgggcgccgccgcctgcctgggcggcgtgaccagaatgaccgtgagcctggtggtgatcatgttcgagctgaccggcggcctggagtacatcgtgcccctgatggccgccgccatgaccagcaagtgggtggccgacgccctgggcagagagggcatctacgacgcccacatcagactgaacggctaccccttcctggaggccaaggaggagttcgcccacaagaccctggccatggacgtgatgaagcccagaagaaacgaccccctgctgaccgtgctgacccaggacagcatgaccgtggaggacgtggagaccatcatcagcgagaccacctacagcggcttccccgtggtggtgagcagagagagccagagactggtgggcttcgtgctgagaagagacctgatcatcagcatcgagaacgccagaaagaagcaggacggcgtggtgagcaccagcatcatctacttcaccgagcacagcccccccctgcccccctacaccccccccaccctgaagctgagaaacatcctggacctgagccccttcaccgtgaccgacctgacccccatggagatcgtggtggacatcttcagaaagctgggcctgagacagtgcctggtgacccacaacggcagactgctgggcatcatcaccaagaaggacgtgctgaagcacatcgcccagatggccaaccaggaccccgacagcatcctgttcaactag

SEQ ID NO: 76557 - DNA, 1062 bp, synthetic construct
  misc_feature 1..1062: note = Description of Artificial Sequence: Synthetic coding sequence
  source 1..1062: mol_type = other DNA
atggccggctgcagaggcagcctgtgctgctgctgcagatggtgctgctgctgcggcgagagagagaccagaacccccgaggagctgaccatcctgggcgagacccaggaggaggaggacgagatcctgcccagaaaggactacgagagcctggactacgacagatgcatcaacgacccctacctggaggtgctggagaccatggacaacaagaagggcagaagatacgaggccgtgaagtggatggtggtgttcgccatcggcgtgtgcaccggcctggtgggcctgttcgtggacttcttcgtgagactgttcacccagctgaagttcggcgtggtgcagaccagcgtggaggagtgcagccagaagggctgcctggccctgagcctgctggagctgctgggcttcaacctgaccttcgtgttcctggccagcctgctggtgctgatcgagcccgtggccgccggcagcggcatccccgaggtgaagtgctacctgaacggcgtgaaggtgcccggcatcgtgagactgagaaccctgctgtgcaaggtgctgggcgtgctgttcagcgtggccggcggcctgttcgtggagaaggagggccccatgatccacagcggcagcgtggtgggcgccggcctgccccagttccagagcatcagcctgagaaagatccagttcaacttcccctacttcagaagcgacagagacaagagagacttcgtgagcgccggcgccgccgccggcgtggccgccgccttcggcgcccccatcggcggcaccctgttcagcctggaggagggcagcagcttctggaaccagggcctgacctggaaggtgctgttctgcagcatgagcgccaccttcaccctgaacttcttcagaagcggcatccagttcggcagctggggcagcttccagctgcccggcctgctgaacttcggcgagttcaagagcctgagagagcccccctgcgtgagcggcaaccacagaggcggcgtgtgcggcctggacggcgtgagaagaatgcccaccgacgtgctgttcgagagcaacagatag

SEQ ID NO: 76558 - DNA, 2610 bp, synthetic construct
  misc_feature 1..2610: note = Description of Artificial Sequence: Synthetic coding sequence
  source 1..2610: mol_type = other DNA
atggccggctgcagaggcagcctgtgctgctgctgcagatggtgctgctgctgcggcgagagagagaccagaacccccgaggagctgaccatcctgggcgagacccaggaggaggaggacgagatcctgcccagaaaggactacgagagcctggactacgacagatgcatcaacgacccctacctggaggtgctggagaccatggacaacaagaagggcagaagatacgaggccgtgaagtggatggtggtgttcgccatcggcgtgtgcaccggcctggtgggcctgttcgtggacttcttcgtgagactgttcacccagctgaagttcggcgtggtgcagaccagcgtggaggagtgcagccagaagggctgcctggccctgagcctgctggagctgctgggcttcaacctgaccttcgtgttcctggccagcctgctggtgctgatcgagcccgtggccgccggcagcggcatccccgaggtgaagtgctacctgaacggcgtgaaggtgcccggcatcgtgagactgagaaccctgctgtgcaaggtgctgggcgtgctgttcagcgtggccggcggcctgttcgtggagaaggagggccccatgatccacagcggcagcgtggtgggcgccggcctgccccagttccagagcatcagcctgagaaagatccagttcaacttcccctacttcagaagcgacagagacaagagagacttcgtgagcgccggcgccgccgccggcgtggccgccgccttcggcgcccccatcggcggcaccctgttcagcctggaggagggcagcagcttctggaaccagggcctgacctggaaggtgctgttctgcagcatgagcgccaccttcaccctgaacttcttcagaagcggcatccagttcggcagctggggcagcttccagctgcccggcctgctgaacttcggcgagttcaagtgcagcgacagcgacaagaagtgccacctgtggaccgccatggacctgggcttcttcgtggtgatgggcgtgatcggcggcctgctgggcgccaccttcaactgcctgaacaagagactggccaagtacagaatgagaaacgtgcaccccaagcccaagctggtgagagtgctggagagcctgctggtgagcctggtgaccaccgtggtggtgttcgtggccagcatggtgctgggcgagtgcagacagatgagcagcagcagccagatcggcaacgacagcttccagctgcaggtgaccgaggacgtgaacagcagcatcaagaccttcttctgccccaacgacacctacaacgacatggccaccctgttcttcaacccccaggagagcgccatcctgcagctgttccaccaggacggcaccttcagccccgtgaccctggccctgttcttcgtgctgtacttcctgctggcctgctggacctacggcatcagcgtgcccagcggcctgttcgtgcccagcctgctgtgcggcgccgccttcggcagactggtggccaacgtgctgaagagctacatcggcctgggccacatctacagcggcaccttcgccctgatcggcgccgccgccttcctgggcggcgtggtgagaatgaccatcagcctgaccgtgatcctgatcgagagcaccaacgagatcacctacggcctgcccatcatggtgaccctgatggtggccaagtggaccggcgacttcttcaacaagggcatctacgacatccacgtgggcctgagaggcgtgcccctgctggagtgggagaccgaggtggagatggacaagctgagagccagcgacatcatggagcccaacctgacctacgtgtacccccacaccagaatccagagcctggtgagcatcctgagaaccaccgtgcaccacgccttccccgtggtgaccgagaacagaggcaacgagaaggagttcatgaagggcaaccagctgatcagcaacaacatcaagttcaagaagagcagcatcctgaccagagccggcgagcagagaaagagaagccagagcatgaagagctaccccagcagcgagctgagaaacatgtgcgacgagcacatcgccagcgaggagcccgccgagaaggaggacctgctgcagcagatgctggagagaagatacaccccctaccccaacctgtaccccgaccagagccccagcgaggactggaccatggaggagagattcagacccctgaccttccacggcctgatcctgagaagccagctggtgaccctgctggtgagaggcgtgtgctacagcgagagccagagcagcgccagccagcccagactgagctacgccgagatggccgaggactaccccagataccccgacatccacgacctggacctgaccctgctgaaccccagaatgatcgtggacgtgaccccctacatgaaccccagccccttcaccgtgagccccaacacccacgtgagccaggtgttcaacctgttcagaaccatgggcctgagacacctgcccgtggtgaacgccgtgggcgagatcgtgggcatcatcaccagacacaacctgacctacgagttcctgcaggccagactgagacagcactaccagaccatctag

SEQ ID NO: 76559 - DNA, 2544 bp, synthetic construct
  misc_feature 1..2544: note = Description of Artificial Sequence: Synthetic coding sequence
  source 1..2544: mol_type = other DNA
atggccggctgcagaggcagcctgtgctgctgctgcagatggtgctgctgctgcggcgagagagagaccagaacccccgaggagctgaccatcctgggcgagacccaggaggaggaggacgagatcctgcccagaaaggactacgagaagggcagaagatacgaggccgtgaagtggatggtggtgttcgccatcggcgtgtgcaccggcctggtgggcctgttcgtggacttcttcgtgagactgttcacccagctgaagttcggcgtggtgcagaccagcgtggaggagtgcagccagaagggctgcctggccctgagcctgctggagctgctgggcttcaacctgaccttcgtgttcctggccagcctgctggtgctgatcgagcccgtggccgccggcagcggcatccccgaggtgaagtgctacctgaacggcgtgaaggtgcccggcatcgtgagactgagaaccctgctgtgcaaggtgctgggcgtgctgttcagcgtggccggcggcctgttcgtggagaaggagggccccatgatccacagcggcagcgtggtgggcgccggcctgccccagttccagagcatcagcctgagaaagatccagttcaacttcccctacttcagaagcgacagagacaagagagacttcgtgagcgccggcgccgccgccggcgtggccgccgccttcggcgcccccatcggcggcaccctgttcagcctggaggagggcagcagcttctggaaccagggcctgacctggaaggtgctgttctgcagcatgagcgccaccttcaccctgaacttcttcagaagcggcatccagttcggcagctggggcagcttccagctgcccggcctgctgaacttcggcgagttcaagtgcagcgacagcgacaagaagtgccacctgtggaccgccatggacctgggcttcttcgtggtgatgggcgtgatcggcggcctgctgggcgccaccttcaactgcctgaacaagagactggccaagtacagaatgagaaacgtgcaccccaagcccaagctggtgagagtgctggagagcctgctggtgagcctggtgaccaccgtggtggtgttcgtggccagcatggtgctgggcgagtgcagacagatgagcagcagcagccagatcggcaacgacagcttccagctgcaggtgaccgaggacgtgaacagcagcatcaagaccttcttctgccccaacgacacctacaacgacatggccaccctgttcttcaacccccaggagagcgccatcctgcagctgttccaccaggacggcaccttcagccccgtgaccctggccctgttcttcgtgctgtacttcctgctggcctgctggacctacggcatcagcgtgcccagcggcctgttcgtgcccagcctgctgtgcggcgccgccttcggcagactggtggccaacgtgctgaagagctacatcggcctgggccacatctacagcggcaccttcgccctgatcggcgccgccgccttcctgggcggcgtggtgagaatgaccatcagcctgaccgtgatcctgatcgagagcaccaacgagatcacctacggcctgcccatcatggtgaccctgatggtggccaagtggaccggcgacttcttcaacaagggcatctacgacatccacgtgggcctgagaggcgtgcccctgctggagtgggagaccgaggtggagatggacaagctgagagccagcgacatcatggagcccaacctgacctacgtgtacccccacaccagaatccagagcctggtgagcatcctgagaaccaccgtgcaccacgccttccccgtggtgaccgagaacagaggcaacgagaaggagttcatgaagggcaaccagctgatcagcaacaacatcaagttcaagaagagcagcatcctgaccagagccggcgagcagagaaagagaagccagagcatgaagagctaccccagcagcgagctgagaaacatgtgcgacgagcacatcgccagcgaggagcccgccgagaaggaggacctgctgcagcagatgctggagagaagatacaccccctaccccaacctgtaccccgaccagagccccagcgaggactggaccatggaggagagattcagacccctgaccttccacggcctgatcctgagaagccagctggtgaccctgctggtgagaggcgtgtgctacagcgagagccagagcagcgccagccagcccagactgagctacgccgagatggccgaggactaccccagataccccgacatccacgacctggacctgaccctgctgaaccccagaatgatcgtggacgtgaccccctacatgaaccccagccccttcaccgtgagccccaacacccacgtgagccaggtgttcaacctgttcagaaccatgggcctgagacacctgcccgtggtgaacgccgtgggcgagatcgtgggcatcatcaccagacacaacctgacctacgagttcctgcaggccagactgagacagcactaccagaccatctag

SEQ ID NO: 76560 - DNA, 963 bp, synthetic construct
  misc_feature 1..963: note = Description of Artificial Sequence: Synthetic coding sequence
  source 1..963: mol_type = other DNA
atggccggctgcagaggcagcctgtgctgctgctgcagatggtgctgctgctgcggcgagagagagaccagaacccccgaggagctgaccatcctgggcgagacccaggaggaggaggacgagatcctgcccagaaaggactacgagagcctggactacgacagatgcatcaacgacccctacctggaggtgctggagaccatggacaacaagaagggcagaagatacgaggccgtgaagtggatggtggtgttcgccatcggcgtgtgcaccggcctggtgggcctgttcgtggacttcttcgtgagactgttcacccagctgaagttcggcgtggtgcagaccagcgtggaggagtgcagccagaagggctgcctggccctgagcctgctggagctgctgggcttcaacctgaccttcgtgttcctggccagcctgctggtgctgatcgagcccgtggccgccggcagcggcatccccgaggtgaagtgctacctgaacggcgtgaaggtgcccggcatcgtgagactgagaaccctgctgtgcaaggtgctgggcgtgctgttcagcgtggccggcggcctgttcgtggagaaggagggccccatgatccacagcggcagcgtggtgggcgccggcctgccccagttccagagcatcagcctgagaaagatccagttcaacttcccctacttcagaagcgacagatacggcaagagacaggagagactgtgcatcagcagaagcggctgctggagctgctgcagcttcagaggcgccaacagaggctacctggtgcagagcagaggcggcttcgtgctgctggagcccagagcccacgtggagagcgccctgctgttccacgtgtgccacctgcacccccagctgctgcccttctgggacagcgtgtggaagctgggcttcctgcccgccccctggatcgccgagctgtggagagtgtag

SEQ ID NO: 76561 - DNA, 927 bp, synthetic construct
  misc_feature 1..927: note = Description of Artificial Sequence: Synthetic coding sequence
  source 1..927: mol_type = other DNA
atggccggctgcagaggcagcctgtgctgctgctgcagatggtgctgctgctgcggcgagagagagaccagaacccccgaggagctgaccatcctgggcgagacccaggaggaggaggacgagatcctgcccagaaaggactacgagagcctggactacgacagatgcatcaacgacccctacctggaggtgctggagaccatggacaacaagaagggcagaagatacgaggccgtgaagtggatggtggtgttcgccatcggcgtgtgcaccggcctggtgggcctgttcgtggacttcttcgtgagactgttcacccagctgaagttcggcgtggtgcagaccagcgtggaggagtgcagccagaagggctgcctggccctgagcctgctggagctgctgggcttcaacctgaccttcgtgttcctggccagcctgctggtgctgatcgagcccgtggccgccggcagcggcatccccgaggtgaagtgctacctgaacggcgtgaaggtgcccggcatcgtgagactgagaaccctgctgtgcaaggtgctgggcgtgctgttcagcgtggccggcggcctgttcgtggagaaggagggccccatgatccacagcggcagcgtggtgggcgccggcctgccccagttccagagcatcagcctgagaaagatccagttcaacttcccctacttcagaagcgacagaagcggctgctggagctgctgcagcttcagaggcgccaacagaggctacctggtgcagagcagaggcggcttcgtgctgctggagcccagagcccacgtggagagcgccctgctgttccacgtgtgccacctgcacccccagctgctgcccttctgggacagcgtgtggaagctgggcttcctgcccgccccctggatcgccgagctgtggagagtgtag

SEQ ID NO: 76562 - DNA, 1062 bp, synthetic construct; identical to SEQ ID NO: 76557
  misc_feature 1..1062: note = Description of Artificial Sequence: Synthetic coding sequence
  source 1..1062: mol_type = other DNA

SEQ ID NO: 76563 - DNA, 2862 bp, synthetic construct
  misc_feature 1..2862: note = Description of Artificial Sequence: Synthetic coding sequence
  source 1..2862: mol_type = other DNA
atggccggctgcagaggcagcctgtgctgctgctgcagatggtgctgctgctgcggcgagagagagaccagaacccccgaggagctgaccatcctgggcgagacccaggaggaggaggacgagatcctgcccagaaaggactacgagagcctggactacgacagatgcatcaacgacccctacctggaggtgctggagaccatggacaacaagaagggcagaagatacgaggccgtgaagtggatggtggtgttcgccatcggcgtgtgcaccggcctggtgggcctgttcgtggacttcttcgtgagactgttcacccagctgaagttcggcgtggtgcagaccagcgtggaggagtgcagccagaagggctgcctggccctgagcctgctggagctgctgggcttcaacctgaccttcgtgttcctggccagcctgctggtgctgatcgagcccgtggccgccggcagcggcatccccgaggtgaagtgctacctgaacggcgtgaaggtgcccggcatcgtgagactgagaaccctgctgtgcaaggtgctgggcgtgctgttcagcgtggccggcggcctgttcgtggagaaggagggccccatgatccacagcggcagcgtggtgggcgccggcctgccccagttccagagcatcagcctgagaaagatccagttcaacttcccctacttcagaagcgacagagacaagagagacttcgtgagcgccggcgccgccgccggcgtggccgccgccttcggcgcccccatcggcggcaccctgttcagcctggaggagggcagcagcttctggaaccagggcctgacctggaaggtgctgttctgcagcatgagcgccaccttcaccctgaacttcttcagaagcggcatccagttcggcagctggggcagcttccagctgcccggcctgctgaacttcggcgagttcaagtgcagcgacagcgacaagaagtgccacctgtggaccgccatggacctgggcttcttcgtggtgatgggcgtgatcggcggcctgctgggcgccaccttcaactgcctgaacaagagactggccaagtacagaatgagaaacgtgcaccccaagcccaagctggtgagagtgctggagagcctgctggtgagcctggtgaccaccgtggtggtgttcgtggccagcatggtgctgggcgagtgcagacagatgagcagcagcagccagatcggcaacgacagcttccagctgcaggtgaccgaggacgtgaacagcagcatcaagaccttcttctgccccaacgacacctacaacgacatggccaccctgttcttcaacccccaggagagcgccatcctgcagctgttccaccaggacggcaccttcagccccgtgaccctggccctgttcttcgtgctgtacttcctgctggcctgctggacctacggcatcagcgtgcccagcggcctgttcgtgcccagcctgctgtgcggcgccgccttcggcagactggtggccaacgtgctgaagagctacatcggcctgggccacatctacagcggcaccttcgccctgatcggcgccgccgccttcctgggcggcgtggtgagaatgaccatcagcctgaccgtgatcctgatcgagagcaccaacgagatcacctacggcctgcccatcatggtgaccctgatggtggccaagtggaccggcgacttcttcaacaagggcatctacgacatccacgtgggcctgagaggcgtgcccctgctggagtgggagaccgaggtggagatggacaagctgagagccagcgacatcatggagcccaacctgacctacgtgtacccccacaccagaatccagagcctggtgagcatcctgagaaccaccgtgcaccacgccttccccgtggtgaccgagaacagaggcaacgagaaggagttcatgaagggcaaccagctgatcagcaacaacatcaagttcaagaagagcagcatcctgaccagagccggcgagcagagaaagagaagccagagcatgaagagctaccccagcagcgagctgagaaacatgtgcgacgagcacatcgccagcgaggagcccgccgagaaggaggacctgctgcagcagatgctggagagaagatacaccccctaccccaacctgtaccccgaccagagccccagcgaggactggaccatggaggagagattcagacccctgaccttccacggcctgatcctgagaagccagctggtgaccctgctggtgagaggcgtgtgctacagcgagagccagagcagcgccagccagcccagactgagctacgccgagatggccgaggactaccccagataccccgacatccacgacctggacctgaccctgctgaaccccagaatgatcgtggacgtgaccccctacatgaaccccagccccttcaccgtgagccccaacacccacgtgagccaggtgttcaacctgttcagaaccatgggcctgagacacctgcccgtggtgaacgccgtgggcgaggtgagcgaggcccccgccctgcccccccccctgagagaggaccccctggccagatgctgcctgtgcacccaggccagccaccagaagagaagacaccccaccagaagaggcgagtgcggccccaccctggccctgaaccccgccagactgccctgcaccagagaccccttcccctgcctgcccgccgacggcaccagcgtgcccctggccgtgctgagcagccagagcagagccagcaccagactgtgcctgccccccgagatgctgctgttcaccccctaccactggtgcagcctggtgctgcacctgagaagagacctgagaatcagatag

SEQ ID NO: 76564 - DNA, 369 bp, synthetic construct
  misc_feature 1..369: note = Description of Artificial Sequence: Synthetic coding sequence
  source 1..369: mol_type = other DNA
atggccggctgcagaggcagcctgtgctgctgctgcagatggtgctgctgctgcggcgagagagagaccagaacccccgaggagctgaccatcctgggcgagacccaggaggaggaggacgagatcctgcccagaaaggactacgagagcctggactacgacagatgcatcaacgacccctacctggaggtgctggagaccatggacaacaagaagggcagaagatacgaggccgtgaagtggatggtggtgttcgccatcggcgtgtgcaccggcctggtgggcctgttcgtggacttcttcgtgagactgttcacccagctgaagttcggcgtggtgcagacctacaagttccagatgaagatgtag

SEQ ID NO: 76565 - DNA, 2277 bp, synthetic construct
  misc_feature 1..2277: note = Description of Artificial Sequence: Synthetic coding sequence
  source 1..2277: mol_type = other DNA
agccccagaagcgccctgttcagagtgggccacatgagcagcgtggagctggacgacgagctgctggaccccgacatggaccccccccaccccttccccaaggagatcccccacaacgagaagctgctgagcctgaagtacgagagcctggactacgacaacagcgagaaccagctgttcctggaggaggagagaagaatcaaccacaccgccttcagaaccgtggagatcaagagatgggtgatctgcgccctgatcggcatcctgaccggcctggtggcctgcttcatcgacatcgtggtggagaacctggccggcctgaagtacagagtgatcaagggcaacatcgacaagttcaccgagaagggcggcctgagcttcagcctgctgctgtgggccaccctgaacgccgccttcgtgctggtgggcagcgtgatcgtggccttcatcgagcccgtggccgccggcagcggcatcccccagatcaagtgcttcctgaacggcgtgaagatcccccacgtggtgagactgaagaccctggtgatcaaggtgagcggcgtgatcctgagcgtggtgggcggcctggccgtgggcaaggagggccccatgatccacagcggcagcgtgatcgccgccggcatcagccagggcagaagcaccagcctgaagagagacttcaagatcttcgagtacttcagaagagacaccgagaagagagacttcgtgagcgccggcgccgccgccggcgtgagcgccgccttcggcgcccccgtgggcggcgtgctgttcagcctggaggagggcgccagcttctggaaccagttcctgacctggagaatcttcttcgccagcatgatcagcaccttcaccctgaacttcgtgctgagcatctaccacggcaacatgtgggacctgagcagccccggcctgatcaacttcggcagattcgacagcgagaagatggcctacaccatccacgagatccccgtgttcatcgccatgggcgtggtgggcggcgtgctgggcgccgtgttcaacgccctgaactactggctgaccatgttcagaatcagatacatccacagaccctgcctgcaggtgatcgaggccgtgctggtggccgccgtgaccgccaccgtggccttcgtgctgatctacagcagcagagactgccagcccctgcagggcggcagcatgagctaccccctgcagctgttctgcgccgacggcgagtacaacagcatggccgccgccttcttcaacacccccgagaagagcgtggtgagcctgttccacgacccccccggcagctacaaccccctgaccctgggcctgttcaccctggtgtacttcttcctggcctgctggacctacggcctgaccgtgagcgccggcgtgttcatccccagcctgctgatcggcgccgcctggggcagactgttcggcatcagcctgagctacctgaccggcgccgccatctgggccgaccccggcaagtacgccctgatgggcgccgccgcccagctgggcggcatcgtgagaatgaccctgagcctgaccgtgatcatgatggaggccaccagcaacgtgacctacggcttccccatcatgctggtgctgatgaccgccaagatcgtgggcgacgtgttcatcgagggcctgtacgacatgcacatccagctgcagagcgtgcccttcctgcactgggaggcccccgtgaccagccacagcctgaccgccagagaggtgatgagcacccccgtgacctgcctgagaagaagagagaaggtgggcgtgatcgtggacgtgctgagcgacaccgccagcaaccacaacggcttccccgtggtggagcacgccgacgacacccagcccgccagactgcagggcctgatcctgagaagccagctgatcgtgctgctgaagcacaaggtgttcgtggagagaagcaacctgggcctggtgcagagaagactgagactgaaggacttcagagacgcctaccccagattcccccccatccagagcatccacgtgagccaggacgagagagagtgcaccatggacctgagcgagttcatgaaccccagcccctacaccgtgccccaggaggccagcctgcccagagtgttcaagctgttcagagccctgggcctgagacacctggtggtggtggacaacagaaaccaggtggtgggcctggtgaccagaaaggacctggccagatacagactgggcaagagaggcctggaggagctgagcctggcccagacctag

SEQ ID NO: 76566 - DNA, 2418 bp, synthetic construct
  misc_feature 1..2418: note = Description of Artificial Sequence: Synthetic coding sequence
  source 1..2418: mol_type = other DNA
atggccaacgtgagcaagaaggtgagctggagcggcagagacagagacgacgaggaggccgcccccctgctgagaagaaccgccagacccggcggcggcacccccctgctgaacggcgccggccccggcgccgccagacagagccccagaagcgccctgttcagagtgggccacatgagcagcgtggagctggacgacgagctgctggaccccgacatggaccccccccaccccttccccaaggagatcccccacaacgagaagctgctgagcctgaagtacgagagcctggactacgacaacagcgagaaccagctgttcctggaggaggagagaagaatcaaccacaccgccttcagaaccgtggagatcaagagatgggtgatctgcgccctgatcggcatcctgaccggcctggtggcctgcttcatcgacatcgtggtggagaacctggccggcctgaagtacagagtgatcaagggcaacatcgacaagttcaccgagaagggcggcctgagcttcagcctgctgctgtgggccaccctgaacgccgccttcgtgctggtgggcagcgtgatcgtggccttcatcgagcccgtggccgccggcagcggcatcccccagatcaagtgcttcctgaacggcgtgaagatcccccacgtggtgagactgaagaccctggtgatcaaggtgagcggcgtgatcctgagcgtggtgggcggcctggccgtgggcaaggagggccccatgatccacagcggcagcgtgatcgccgccggcatcagccagggcagaagcaccagcctgaagagagacttcaagatcttcgagtacttcagaagagacaccgagaagagagacttcgtgagcgccggcgccgccgccggcgtgagcgccgccttcggcgcccccgtgggcggcgtgctgttcagcctggaggagggcgccagcttctggaaccagttcctgacctggagaatcttcttcgccagcatgatcagcaccttcaccctgaacttcgtgctgagcatctaccacggcaacatgtgggacctgagcagccccggcctgatcaacttcggcagattcgacagcgagaagatggcctacaccatccacgagatccccgtgttcatcgccatgggcgtggtgggcggcgtgctgggcgccgtgttcaacgccctgaactactggctgaccatgttcagaatcagatacatccacagaccctgcctgcaggtgatcgaggccgtgctggtggccgccgtgaccgccaccgtggccttcgtgctgatctacagcagcagagactgccagcccctgcagggcggcagcatgagctaccccctgcagctgttctgcgccgacggcgagtacaacagcatggccgccgccttcttcaacacccccgagaagagcgtggtgagcctgttccacgacccccccggcagctacaaccccctgaccctgggcctgttcaccctggtgtacttcttcctggcctgctggacctacggcctgaccgtgagcgccggcgtgttcatccccagcctgctgatcggcgccgcctggggcagactgttcggcatcagcctgagctacctgaccggcgccgccatctgggccgaccccggcaagtacgccctgatgggcgccgccgcccagctgggcggcatcgtgagaatgaccctgagcctgaccgtgatcatgatggaggccaccagcaacgtgacctacggcttccccatcatgctggtgctgatgaccgccaagatcgtgggcgacgtgttcatcgagggcctgtacgacatgcacatccagctgcagagcgtgcccttcctgcactgggaggcccccgtgaccagccacagcctgaccgccagagaggtgatgagcacccccgtgacctgcctgagaagaagagagaaggtgggcgtgatcgtggacgtgctgagcgacaccgccagcaaccacaacggcttccccgtggtggagcacgccgacgacacccagcccgccagactgcagggcctgatcctgagaagccagctgatcgtgctgctgaagcacaaggtgttcgtggagagaagcaacctgggcctggtgcagagaagactgagactgaaggacttcagagacgcctaccccagattcccccccatccagagcatccacgtgagccaggacgagagagagtgcaccatggacctgagcgagttcatgaaccccagcccctacaccgtgccccaggaggccagcctgcccagagtgttcaagctgttcagagccctgggcctgagacacctggtggtggtggacaacagaaaccaggtggtgggcctggtgaccagaaaggacctggccagatacagactgggcaagagaggcctggaggagctgagcctggcccagacctag

SEQ ID NO: 76567 - DNA, 2244 bp, synthetic construct
  misc_feature 1..2244: note = Description of Artificial Sequence: Synthetic coding sequence
  source 1..2244: mol_type = other DNA
atgagcagcgtggagctggacgacgagctgctggaccccgacatggaccccccccaccccttccccaaggagatcccccacaacgagaagctgctgagcctgaagtacgagagcctggactacgacaacagcgagaaccagctgttcctggaggaggagagaagaatcaaccacaccgccttcagaaccgtggagatcaagagatgggtgatctgcgccctgatcggcatcctgaccggcctggtggcctgcttcatcgacatcgtggtggagaacctggccggcctgaagtacagagtgatcaagggcaacatcgacaagttcaccgagaagggcggcctgagcttcagcctgctgctgtgggccaccctgaacgccgccttcgtgctggtgggcagcgtgatcgtggccttcatcgagcccgtggccgccggcagcggcatcccccagatcaagtgcttcctgaacggcgtgaagatcccccacgtggtgagactgaagaccctggtgatcaaggtgagcggcgtgatcctgagcgtggtgggcggcctggccgtgggcaaggagggccccatgatccacagcggcagcgtgatcgccgccggcatcagccagggcagaagcaccagcctgaagagagacttcaagatcttcgagtacttcagaagagacaccgagaagagagacttcgtgagcgccggcgccgccgccggcgtgagcgccgccttcggcgcccccgtgggcggcgtgctgttcagcctggaggagggcgccagcttctggaaccagttcctgacctggagaatcttcttcgccagcatgatcagcaccttcaccctgaacttcgtgctgagcatctaccacggcaacatgtgggacctgagcagccccggcctgatcaacttcggcagattcgacagcgagaagatggcctacaccatccacgagatccccgtgttcatcgccatgggcgtggtgggcggcgtgctgggcgccgtgttcaacgccctgaactactggctgaccatgttcagaatcagatacatccacagaccctgcctgcaggtgatcgaggccgtgctggtggccgccgtgaccgccaccgtggccttcgtgctgatctacagcagcagagactgccagcccctgcagggcggcagcatgagctaccccctgcagctgttctgcgccgacggcgagtacaacagcatggccgccgccttcttcaacacccccgagaagagcgtggtgagcctgttccacgacccccccggcagctacaaccccctgaccctgggcctgttcaccctggtgtacttcttcctggcctgctggacctacggcctgaccgtgagcgccggcgtgttcatccccagcctgctgatcggcgccgcctggggcagactgttcggcatcagcctgagctacctgaccggcgccgccatctgggccgaccccggcaagtacgccctgatgggcgccgccgcccagctgggcggcatcgtgagaatgaccctgagcctgaccgtgatcatgatggaggccaccagcaacgtgacctacggcttccccatcatgctggtgctgatgaccgccaagatcgtgggcgacgtgttcatcgagggcctgtacgacatgcacatccagctgcagagcgtgcccttcctgcactgggaggcccccgtgaccagccacagcctgaccgccagagaggtgatgagcacccccgtgacctgcctgagaagaagagagaaggtgggcgtgatcgtggacgtgctgagcgacaccgccagcaaccacaacggcttccccgtggtggagcacgccgacgacacccagcccgccagactgcagggcctgatcctgagaagccagctgatcgtgctgctgaagcacaaggtgttcgtggagagaagcaacctgggcctggtgcagagaagactgagactgaaggacttcagagacgcctaccccagattcccccccatccagagcatccacgtgagccaggacgagagagagtgcaccatggacctgagcgagttcatgaaccccagcccctacaccgtgccccaggaggccagcctgcccagagtgttcaagctgttcagagccctgggcctgagacacctggtggtggtggacaacagaaaccaggtggtgggcctggtgaccagaaaggacctggccagatacagactgggcaagagaggcctggaggagctgagcctggcccagacctag

SEQ ID NO: 76568 - DNA, 2346 bp, synthetic construct
  misc_feature 1..2346: note = Description of Artificial Sequence: Synthetic coding sequence
  source 1..2346: mol_type = other DNA
atggccaacgtgagcaagaaggtgagctggagcggcagagacagagacgacgaggaggccgcccccctgctgagaagaaccgccagacccggcggcggcacccccctgctgaacggcgccggccccggcgccgccagacaggacatggaccccccccaccccttccccaaggagatcccccacaacgagaagctgctgagcctgaagtacgagagcctggactacgacaacagcgagaaccagctgttcctggaggaggagagaagaatcaaccacaccgccttcagaaccgtggagatcaagagatgggtgatctgcgccctgatcggcatcctgaccggcctggtggcctgcttcatcgacatcgtggtggagaacctggccggcctgaagtacagagtgatcaagggcaacatcgacaagttcaccgagaagggcggcctgagcttcagcctgctgctgtgggccaccctgaacgccgccttcgtgctggtgggcagcgtgatcgtggccttcatcgagcccgtggccgccggcagcggcatcccccagatcaagtgcttcctgaacggcgtgaagatcccccacgtggtgagactgaagaccctggtgatcaaggtgagcggcgtgatcctgagcgtggtgggcggcctggccgtgggcaaggagggccccatgatccacagcggcagcgtgatcgccgccggcatcagccagggcagaagcaccagcctgaagagagacttcaagatcttcgagtacttcagaagagacaccgagaagagagacttcgtgagcgccggcgccgccgccggcgtgagcgccgccttcggcgcccccgtgggcggcgtgctgttcagcctggaggagggcgccagcttctggaaccagttcctgacctggagaatcttcttcgccagcatgatcagcaccttcaccctgaacttcgtgctgagcatctaccacggcaacatgtgggacctgagcagccccggcctgatcaacttcggcagattcgacagcgagaagatggcctacaccatccacgagatccccgtgttcatcgccatgggcgtggtgggcggcgtgctgggcgccgtgttcaacgccctgaactactggctgaccatgttcagaatcagatacatccacagaccctgcctgcaggtgatcgaggccgtgctggtggccgccgtgaccgccaccgtggccttcgtgctgatctacagcagcagagactgccagcccctgcagggcggcagcatgagctaccccctgcagctgttctgcgccgacggcgagtacaacagcatggccgccgccttcttcaacacccccgagaagagcgtggtgagcctgttccacgacccccccggcagctacaaccccctgaccctgggcctgttcaccctggtgtacttcttcctggcctgctggacctacggcctgaccgtgagcgccggcgtgttcatccccagcctgctgatcggcgccgcctggggcagactgttcggcatcagcctgagctacctgaccggcgccgccatctgggccgaccccggcaagtacgccctgatgggcgccgccgcccagctgggcggcatcgtgagaatgaccctgagcctgaccgtgatcatgatggaggccaccagcaacgtgacctacggcttccccatcatgctggtgctgatgaccgccaagatcgtgggcgacgtgttcatcgagggcctgtacgacatgcacatccagctgcagagcgtgcccttcctgcactgggaggcccccgtgaccagccacagcctgaccgccagagaggtgatgagcacccccgtgacctgcctgagaagaagagagaaggtgggcgtgatcgtggacgtgctgagcgacaccgccagcaaccacaacggcttccccgtggtggagcacgccgacgacacccagcccgccagactgcagggcctgatcctgagaagccagctgatcgtgctgctgaagcacaaggtgttcgtggagagaagcaacctgggcctggtgcagagaagactgagactgaaggacttcagagacgcctaccccagattcccccccatccagagcatccacgtgagccaggacgagagagagtgcaccatggacctgagcgagttcatgaaccccagcccctacaccgtgccccaggaggccagcctgcccagagtgttcaagctgttcagagccctgggcctgagacacctggtggtggtggacaacagaaaccaggtggtgggcctggtgaccagaaaggacctggccagatacagactgggcaagagaggcctggaggagctgagcctggcccagacctag

SEQ ID NO: 76569 - DNA, 1545 bp, synthetic construct
  misc_feature 1..1545: note = Description of Artificial Sequence: Synthetic coding sequence
  source 1..1545: mol_type = other DNA
atggtgctggacctggacctgttcagagtggacaagggcggcgaccccgccctgatcagagagacccaggagaagagattcaaggaccccggcctggtggaccagctggtgaaggccgacagcgagtggagaagatgcagattcagagccgacaacctgaacaagctgaagaacctgtgcagcaagaccatcggcgagaagatgaagaagaaggagcccgtgggcgacgacgagagcgtgcccgagaacgtgctgagcttcgacgacctgaccgccgacgccctggccaacctgaaggtgagccagatcaagaaggtgagactgctgatcgacgaggccatcctgaagtgcgacgccgagagaatcaagctggaggccgagagattcgagaacctgagagagatcggcaacctgctgcaccccagcgtgcccatcagcaacgacgaggacgtggacaacaaggtggagagaatctggggcgactgcaccgtgagaaagaagtacagccacgtggacctggtggtgatggtggacggcttcgagggcgagaagggcgccgtggtggccggcagcagaggctacttcctgaagggcgtgctggtgttcctggagcaggccctgatccagtacgccctgagaaccctgggcagcagaggctacatccccatctacacccccttcttcatgagaaaggaggtgatgcaggaggtggcccagctgagccagttcgacgaggagctgtacaaggtgatcggcaagggcagcgagaagagcgacgacaacagctacgacgagaagtacctgatcgccaccagcgagcagcccatcgccgccctgcacagagacgagtggctgagacccgaggacctgcccatcaagtacgccggcctgagcacctgcttcagacaggaggtgggcagccacggcagagacaccagaggcatcttcagagtgcaccagttcgagaagatcgagcagttcgtgtacagcagcccccacgacaacaagagctgggagatgttcgaggagatgatcaccaccgccgaggagttctaccagagcctgggcatcccctaccacatcgtgaacatcgtgagcggcagcctgaaccacgccgccagcaagaagctggacctggaggcctggttccccggcagcggcgccttcagagagctggtgagctgcagcaactgcaccgactaccaggccagaagactgagaatcagatacggccagaccaagaagatgatggacaaggtggagttcgtgcacatgctgaacgccaccatgtgcgccaccaccagaaccatctgcgccatcctggagaactaccagaccgagaagggcatcaccgtgcccgagaagctgaaggagttcatgccccccggcctgcaggagctgatccccttcgtgaagcccgcccccatcgagcaggagcccagcaagaagcagaagaagcagcacgagggcagcaagaagaaggccgccgccagagacgtgaccctggagaacagactgcagaacatggaggtgaccgacgcctag

SEQ ID NO: 76570 - DNA, 2745 bp, synthetic construct
  misc_feature 1..2745: note = Description of Artificial Sequence: Synthetic coding sequence
  source 1..2745: mol_type = other DNA
atgggccccttcaagagcagcgtgttcatcctgatcctgcacctgctggagggcgccctgagcaacagcctgatccagctgaacaacaacggctacgagggcatcgtggtggccatcgaccccaacgtgcccgaggacgagaccctgatccagcagatcaaggacatggtgacccaggccagcctgtacctgctggaggccaccggcaagagattctacttcaagaacgtggccatcctgatccccgagacctggaagaccaaggccgactacgtgagacccaagctggagacctacaagaacgccgacgtgctggtggccgagagcaccccccccggcaacgacgagccctacaccgagcagatgggcaactgcggcgagaagggcgagagaatccacctgacccccgacttcatcgccggcaagaagctggccgagtacggcccccagggcagagccttcgtgcacgagtgggcccacctgagatggggcgtgttcgacgagtacaacaacgacgagaagttctacctgagcaacggcagaatccaggccgtgagatgcagcgccggcatcaccggcaccaacgtggtgaagaagtgccagggcggcagctgctacaccaagagatgcaccttcaacaaggtgaccggcctgtacgagaagggctgcgagttcgtgctgcagagcagacagaccgagaaggccagcatcatgttcgcccagcacgtggacagcatcgtggagttctgcaccgagcagaaccacaacaaggaggcccccaacaagcagaaccagaagtgcaacctgagaagcacctgggaggtgatcagagacagcgaggacttcaagaagaccacccccatgaccacccagccccccaaccccaccttcagcctgctgcagatcggccagagaatcgtgtgcctggtgctggacaagagcggcagcatggccaccggcaacagactgaacagactgaaccaggccggccagctgttcctgctgcagaccgtggagctgggcagctgggtgggcatggtgaccttcgacagcgccgcccacgtgcagaacgagctgatccagatcaacagcggcagcgacagagacaccctggccaagagactgcccgccgccgccagcggcggcaccagcatctgcagcggcctgagaagcgccttcaccgtgatcagaaagaagtaccccaccgacggcagcgagatcgtgctgctgaccgacggcgaggacaacaccatcagcggctgcttcaacgaggtgaagcagagcggcgccatcatccacaccgtggccctgggccccagcgccgcccaggagctggaggagctgagcaagatgaccggcggcctgcagacctacgccagcgaccaggtgcagaacaacggcctgatcgacgccttcggcgccctgagcagcggcaacggcgccgtgagccagagaagcatccagctggagagcaagggcctgaccctgcagaacagccagtggatgaacggcaccgtgatcgtggacagcaccgtgggcaaggacaccctgttcctgatcacctggaccatgcagcccccccagatcctgctgtgggaccccagcggccagaagcagggcggcttcgtggtggacaagaacaccaagatggcctacctgcagatccccggcatcgccaaggtgggcacctggaagtacagcctgcaggccagcagccagaccctgaccctgaccgtgaccagcagagccagcaacgccaccctgccccccatcaccgtgaccagcaagaccaacaaggacaccagcaagttccccagccccctggtggtgtacgccaacatcagacagggcgccagccccatcctgagagccagcgtgaccgccctgatcgagagcgtgaacggcaagaccgtgaccctggagctgctggacaacggcgccggcgccgacgccaccaaggacgacggcgtgtacagcagatacttcaccacctacgacaccaacggcagatacagcgtgaaggtgagagccctgggcggcgtgaacgccgccagaagaagagtgatcccccagcagagcggcgccctgtacatccccggctggatcgagaacgacgagatccagtggaacccccccagacccgagatcaacaaggacgacgtgcagcacaagcaggtgtgcttcagcagaaccagcagcggcggcagcttcgtggccagcgacgtgcccaacgcccccatccccgacctgttcccccccggccagatcaccgacctgaaggccgagatccacggcggcagcctgatcaacctgacctggaccgcccccggcgacgactacgaccacggcaccgcccacaagtacatcatcagaatcagcaccagcatcctggacctgagagacaagttcaacgagagcctgcaggtgaacaccaccgccctgatccccaaggaggccaacagcgaggaggtgttcctgttcaagcccgagaacatcaccttcgagaacggcaccgacctgttcatcgccatccaggccgtggacaaggtggacctgaagagcgagatcagcaacatcgccagagtgagcctgttcatccccccccagaccccccccgagacccccagccccgacgagaccagcgccccctgccccaacatccacatcaacagcaccatccccggcatccacatcctgaagatcatgtggaagtggatcggcgagctgcagctgagcatcgcctag

SEQ ID NO: 76571 - DNA, 987 bp, synthetic construct
  misc_feature 1..987: note = Description of Artificial Sequence: Synthetic coding sequence
  source 1..987: mol_type = other DNA
atgaccacccagccccccaaccccaccttcagcctgctgcagatcggccagagaatcgtgtgcctggtgctggacaagagcggcagcatggccaccggcaacagactgaacagactgaaccaggccggccagctgttcctgctgcagaccgtggagctgggcagctgggtgggcatggtgaccttcgacagcgccgcccacgtgcagaacgagctgatccagatcaacagcggcagcgacagagacaccctggccaagagactgcccgccgccgccagcggcggcaccagcatctgcagcggcctgagaagcgccttcaccgtgatcagaaagaagtaccccaccgacggcagcgagatcgtgctgctgaccgacggcgaggacaacaccatcagcggctgcttcaacgaggtgaagcagagcggcgccatcatccacaccgtggccctgggccccagcgccgcccaggagctggaggagctgagcaagatgaccggcggcctgcagacctacgccagcgaccaggtgcagaacaacggcctgatcgacgccttcggcgccctgagcagcggcaacggcgccgtgagccagagaagcatccagctggagagcaagggcctgaccctgcagaacagccagtggatgaacggcaccgtgatcgtggacagcaccgtgggcaaggacaccctgttcctgatcacctggaccatgcagcccccccagatcctgctgtgggaccccagcggccagaagcagggcggcttcgtggtggacaagaacaccaagatggcctacctgcagatccccggcatcgccaaggtgggcacctggaagtacagcctgcaggccagcagccagaccctgaccctgaccgtgaccagcagagccagcaacgccaccctgccccccatcaccgtgaccagcaagaccaacaaggacaccagcaacctgcccaacagccagggccagtgccacagccccgactag

SEQ ID NO: 76572 - DNA, 2064 bp, synthetic construct
  misc_feature 1..2064: note = Description of Artificial Sequence: Synthetic coding sequence
  source 1..2064: mol_type = other DNA
atggaggagctggtgggcctgagagagggcttcagcggcgaccccgtgaccctgcaggagctgtggggcccctgcccccacatcagaagagccatccagggcggcctggagtggctgaagcagaaggtgttcagactgggcgaggactggtacttcctgatgaccctgggcgtgctgatggccctggtgagctacgccatgaacttcgccatcggctgcgtggtgagagcccaccagtggctgtacagagagatcggcgacagccacctgctgagatacctgagctggaccgtgtaccccgtggccctggtgagcttcagcagcggcttcagccagagcatcacccccagcagcggcggcagcggcatccccgagctgaagaccatgctggccggcgtgatcctggaggactacctggacatcaagaacttcggcgccaaggtggtgggcctgagctgcaccctggccaccggcagcaccctgttcctgggcaaggtgggccccttcgtgcacctgagcgtgatgatcgccgcctacctgggcagagtgagaaccaccaccatcggcgagcccgagaacaagagcaagcagaacgagatgctggtggccgccgccgccgtgggcgtggccaccgtgttcgccgcccccttcagcggcgtgctgttcagcatcgaggtgatgagcagccacttcagcgtgagagactactggagaggcttcttcgccgccacctgcggcgccttcatcttcagactgctggccgtgttcaacagcgagcaggagaccatcaccagcctgtacaagaccagcttcagagtggacgtgcccttcgacctgcccgagatcttcttcttcgtggccctgggcggcatctgcggcgtgctgagctgcgcctacctgttctgccagagaaccttcctgagcttcatcaagaccaacagatacagcagcaagctgctggccaccagcaagcccgtgtacagcgccctggccaccctgctgctggccagcatcacctacccccccggcgtgggccacttcctggccagcagactgagcatgaagcagcacctggacagcctgttcgacaaccacagctgggccctgatgacccagaacagcagccccccctggcccgaggagctggacccccagcacctgtggtgggagtggtaccaccccagattcaccatcttcggcaccctggccttcttcctggtgatgaagttctggatgctgatcctggccaccaccatccccatgcccgccggctacttcatgcccatcttcatcctgggcgccgccatcggcagactgctgggcgaggccctggccgtggccttccccgagggcatcgtgaccggcggcgtgaccaaccccatcatgcccggcggctacgccctggccggcgccgccgccttcagcggcgccgtgacccacaccatcagcaccgccctgctggccttcgagctgaccggccagatcgtgcacgccctgcccgtgctgatggccgtgctggccgccaacgccatcgcccagagctgccagcccagcttctacgacggcaccatcatcgtgaagaagctgccctacctgcccagaatcctgggcagaaacatcggcagccaccacgtgagagtggagcacttcatgaaccacagcatcaccaccctggccaaggacacccccctggaggaggtggtgaaggtggtgaccagcaccgacgtgaccgagtaccccctggtggagagcaccgagagccagatcctggtgggcatcgtgcagagagcccagctggtgcaggccctgcaggccgagccccccagcagagcccccggccaccagcagtgcctgcaggacatcctggccagaggctgccccaccgagcccgtgaccctgaccctgttcagcgagaccaccctgcaccaggcccagaacctgttcaagctgctgaacctgcagagcctgttcgtgaccagcagaggcagagccgtgggctgcgtgagctgggtggagatgaagaaggccatcagcaacctgaccaacccccccgcccccaagtag

SEQ ID NO: 76573 - DNA, 2061 bp, synthetic construct
  misc_feature 1..2061: note = Description of Artificial Sequence: Synthetic coding sequence
  source 1..2061: mol_type = other DNA
atggaggagctggtgggcctgagagagggcttcagcggcgaccccgtgaccctgcaggagctgtggggcccctgcccccacatcagaagagccatccagggcggcctggagtggctgaagcagaaggtgttcagactgggcgaggactggtacttcctgatgaccctgggcgtgctgatggccctggtgagctacgccatgaacttcgccatcggctgcgtggtgagagcccaccagtggctgtacagagagatcggcgacagccacctgctgagatacctgagctggaccgtgtaccccgtggccctggtgagcttcagcagcggcttcagccagagcatcacccccagcagcggcggcagcggcatccccgagctgaagaccatgctggccggcgtgatcctggaggactacctggacatcaagaacttcggcgccaaggtggtgggcctgagctgcaccctggccaccggcagcaccctgttcctgggcaaggtgggccccttcgtgcacctgagcgtgatgatcgccgcctacctgggcagagtgagaaccaccaccatcggcgagcccgagaacaagagcaagcagaacgagatgctggtggccgccgccgccgtgggcgtggccaccgtgttcgccgcccccttcagcggcgtgctgttcagcatcgaggtgatgagcagccacttcagcgtgagagactactggagaggcttcttcgccgccacctgcggcgccttcatcttcagactgctggccgtgttcaacagcgagcaggagaccatcaccagcctgtacaagaccagcttcagagtggacgtgcccttcgacctgcccgagatcttcttcttcgtggccctgggcggcatctgcggcgtgctgagctgcgcctacctgttctgccagagaaccttcctgagcttcatcaagaccaacagatacagcagcaagctgctggccaccagcaagcccgtgtacagcgccctggccaccctgctgctggccagcatcacctacccccccggcgtgggccacttcctggccagcagactgagcatgaagcagcacctggacagcctgttcgacaaccacagctgggccctgatgacccagaacagcagccccccctggcccgaggagctggacccccagcacctgtggtgggagtggtaccaccccagattcaccatcttcggcaccctggccttcttcctggtgatgaagttctggatgctgatcctggccaccaccatccccatgcccgccggctacttcatgcccatcttcatcctgggcgccgccatcggcagactgctgggcgaggccctggccgtggccttccccgagggcatcgtgaccggcggcgtgaccaaccccatcatgcccggcggctacgccctggccggcgccgccgccttcagcggcgccgtgacccacaccatcagcaccgccctgctggccttcgagctgaccggccagatcgtgcacgccctgcccgtgctgatggccgtgctggccgccaacgccatcgcccagagctgccagcccagcttctacgacggcaccatcatcgtgaagaagctgccctacctgcccagaatcctgggcagaaacatcggcagccaccacgtgagagtggagcacttcatgaaccacagcatcaccaccctggccaaggacacccccctggaggaggtggtgaaggtggtgaccagcaccgacgtgaccgagtaccccctggtggagagcaccgagagccagatcctggtgggcatcgtgcagagagcccagctggtgcaggccctgcaggccgagccccccagcagagcccccggccaccagtgcctgcaggacatcctggccagaggctgccccaccgagcccgtgaccctgaccctgttcagcgagaccaccctgcaccaggcccagaacctgttcaagctgctgaacctgcagagcctgttcgtgaccagcagaggcagagccgtgggctgcgtgagctgggtggagatgaagaaggccatcagcaacctgaccaacccccccgcccccaagtag

SEQ ID NO: 76574 - DNA, 2061 bp, synthetic construct; identical to SEQ ID NO: 76573
  misc_feature 1..2061: note = Description of Artificial Sequence: Synthetic coding sequence
  source 1..2061: mol_type = other DNA

SEQ ID NO: 76575 - DNA, 1935 bp, synthetic construct
  misc_feature 1..1935: note = Description of Artificial Sequence: Synthetic coding sequence
  source 1..1935: mol_type = other DNA
atggaggagctggtgggcctgagagagggcttcagcggcgaccccgtgaccctgcaggagctgtggggcccctgcccccacatcagaagagccatccagggcggcctggagtggctgaagcagaaggtgttcagactgggcgaggactggtacttcctgatgaccctgggcgtgctgatggccctggtgagctacgccatgaacttcgccatcggctgcgtggtgagaggcagcggcatccccgagctgaagaccatgctggccggcgtgatcctggaggactacctggacatcaagaacttcggcgccaaggtggtgggcctgagctgcaccctggccaccggcagcaccctgttcctgggcaaggtgggccccttcgtgcacctgagcgtgatgatcgccgcctacctgggcagagtgagaaccaccaccatcggcgagcccgagaacaagagcaagcagaacgagatgctggtggccgccgccgccgtgggcgtggccaccgtgttcgccgcccccttcagcggcgtgctgttcagcatcgaggtgatgagcagccacttcagcgtgagagactactggagaggcttcttcgccgccacctgcggcgccttcatcttcagactgctggccgtgttcaacagcgagcaggagaccatcaccagcctgtacaagaccagcttcagagtggacgtgcccttcgacctgcccgagatcttcttcttcgtggccctgggcggcatctgcggcgtgctgagctgcgcctacctgttctgccagagaaccttcctgagcttcatcaagaccaacagatacagcagcaagctgctggccaccagcaagcccgtgtacagcgccctggccaccctgctgctggccagcatcacctacccccccggcgtgggccacttcctggccagcagactgagcatgaagcagcacctggacagcctgttcgacaaccacagctgggccctgatgacccagaacagcagccccccctggcccgaggagctggacccccagcacctgtggtgggagtggtaccaccccagattcaccatcttcggcaccctggccttcttcctggtgatgaagttctggatgctgatcctggccaccaccatccccatgcccgccggctacttcatgcccatcttcatcctgggcgccgccatcggcagactgctgggcgaggccctggccgtggccttccccgagggcatcgtgaccggcggcgtgaccaaccccatcatgcccggcggctacgccctggccggcgccgccgccttcagcggcgccgtgacccacaccatcagcaccgccctgctggccttcgagctgaccggccagatcgtgcacgccctgcccgtgctgatggccgtgctggccgccaacgccatcgcccagagctgccagcccagcttctacgacggcaccatcatcgtgaagaagctgccctacctgcccagaatcctgggcagaaacatcggcagccaccacgtgagagtggagcacttcatgaaccacagcatcaccaccctggccaaggacacccccctggaggaggtggtgaaggtggtgaccagcaccgacgtgaccgagtaccccctggtggagagcaccgagagccagatcctggtgggcatcgtgcagagagcccagctggtgcaggccctgcaggccgagccccccagcagagcccccggccaccagcagtgcctgcaggacatcctggccagaggctgccccaccgagcccgtgaccctgaccctgttcagcgagaccaccctgcaccaggcccagaacctgttcaagctgctgaacctgcagagcctgttcgtgaccagcagaggcagagccgtgggctgcgtgagctgggtggagatgaagaaggccatcagcaacctgaccaacccccccgcccccaagtag

SEQ ID NO: 76576 - DNA, 1389 bp, synthetic construct
  misc_feature 1..1389: note = Description of Artificial Sequence: Synthetic coding sequence
  source 1..1389: mol_type = other DNA
atggaggagttcgtgggcctgagagagggcagcagcggcaaccccgtgaccctgcaggagctgtggggcccctgccccagaatcagaagaggcatcagaggcggcctggagtggctgaagcagaagctgttcagactgggcgaggactggtacttcctgatgaccctgggcgtgctgatggccctggtgagctgcgccatggacctggccgtggagagcgtggtgagagcccaccagtggctgtacagagagatcggcgacagccacctgctgagatacctgagctggaccgtgtaccccgtggccctggtgagcttcagcagcggcttcagccagagcatcacccccagcagcggcggcagcggcatccccgaggtgaagaccatgctggccggcgtggtgctggaggactacctggacatcaagaacttcggcgccaaggtggtgggcctgagctgcaccctggcctgcggcagcaccctgttcctgggcaaggtgggccccttcgtgcacctgagcgtgatgatggccgcctacctgggcagagtgagaaccaccaccatcggcgagcccgagaacaagagcaagcccgtgtacagcgccctggccaccctggtgctggccagcatcacctacccccccagcgccggcagattcctggccagcagactgagcatgaagcagcacctggacagcctgttcgacaaccacagctgggccctgatgacccagaacagcagccccccctggcccgaggagctggacccccagcacctgtggtgggagtggtaccaccccagattcaccatcttcggcaccctggccttcttcctggtgatgaagttctggatgctgatcctggccaccaccatccccatgcccgccggctacttcatgcccatcttcgtgtacggcgccgccatcggcagactgttcggcgagaccctgagcttcatcttccccgagggcatcgtggccggcggcatcaccaaccccatcatgcccggcggctacgccctggccggcgccgccgccttcagcggcgccgtgacccacaccatcagcaccgccctgctggccttcgaggtgaccggccagatcgtgcacgccctgcccgtgctgatggccgtgctggccgccaacgccatcgcccagagctgccagcccagcttctacgacggcaccgtgatcgtgaagaagctgccctacctgcccagaatcctgggcagaaacatcggcagccacagagtgagagtggagcacttcatgaaccacagcatcaccaccctggccatcaccctgatgaacgacgagatcggcgtgcactgccaccagggccaggcccagatgcccagcggcgtggtgtggttccccgtgagaggcagctag

SEQ ID NO: 76577 - DNA, 1554 bp, synthetic construct
  misc_feature 1..1554: note = Description of Artificial Sequence: Synthetic coding sequence
  source 1..1554: mol_type = other DNA
atgccctgcccccccctgctgagcgtgcccgtgagagccgccggcgagcaggacagatgggtgagagaggaggtgacctggggcggcggccccaccgtgaccggcggctggggctggagagcccacctgagaagcgtgagcccccccggcgtgctgttcagcatcgaggtgatgagcagccacttcagcgtgtgggactactggagaggcttcttcgccgccacctgcggcgccttcatgttcagactgctggccgtgttcaacagcgagcaggagaccatcaccagcctgtacaagaccagcttcagagtggacgtgcccttcgacctgcccgagatcttcttcttcgtggccctgggcggcctgtgcggcatcctgggcagcgcctacctgttctgccagagaatcttcttcggcttcatcagaaacaacagattcagcagcaagctgctggccaccagcaagcccgtgtacagcgccctggccaccctggtgctggccagcatcacctacccccccagcgccggcagattcctggccagcagactgagcatgaagcagcacctggacagcctgttcgacaaccacagctgggccctgatgacccagaacagcagccccccctggcccgaggagctggacccccagcacctgtggtgggagtggtaccaccccagattcaccatcttcggcaccctggccttcttcctggtgatgaagttctggatgctgatcctggccaccaccatccccatgcccgccggctacttcatgcccatcttcgtgtacggcgccgccatcggcagactgttcggcgagaccctgagcttcatcttccccgagggcatcgtggccggcggcatcaccaaccccatcatgcccggcggctacgccctggccggcgccgccgccttcagcggcgccgtgacccacaccatcagcaccgccctgctggccttcgaggtgaccggccagatcgtgcacgccctgcccgtgctgatggccgtgctggccgccaacgccatcgcccagagctgccagcccagcttctacgacggcaccgtgatcgtgaagaagctgccctacctgcccagaatcctgggcagaaacatcggcagccacagagtgagagtggagcacttcatgaaccacagcatcaccaccctggccaaggacatgcccctggaggaggtggtgaaggtggtgaccagcaccgacgtggccaagtaccccctggtggagagcaccgagagccagatcctggtgggcatcgtgagaagagcccagctggtgcaggccctgaaggccgagccccccagctgggcccccggccaccagtgcctgcaggacatcctggccgccggctgccccaccgagcccgtgaccctgaagctgagccccgagaccagcctgcacgaggcccacaacctgttcgagctgctgaacctgcacagcctgttcgtgaccagcagaggcagagccgtgggctgcgtgagctgggtggagatgaagaaggccatcagcaacctgaccaacccccccgcccccaagtag

SEQ ID NO: 76578 - DNA, 468 bp, synthetic construct
  misc_feature 1..468: note = Description of Artificial Sequence: Synthetic coding sequence
  source 1..468: mol_type = other DNA
atggccgtgctggccgccaacgccatcgcccagagctgccagcccagcttctacgacggcaccgtgatcgtgaagaagctgccctacctgcccagaatcctgggcagaaacatcggcagccacagagtgagagtggagcacttcatgaaccacagcatcaccaccctggccaaggacatgcccctggaggaggtggtgaaggtggtgaccagcaccgacgtggccaagtaccccctggtggagagcaccgagagccagatcctggtgggcatcgtgagaagagcccagctggtgcaggccctgaaggccgagccccccagctgggcccccggccaccagtgcctgcaggacatcctggccgccggctgccccaccgagcccgtgaccctgaagctgagccccgagaccagcctgcacgaggcccagatgcccagcggcgtggtgtggttccccgtgagaggcagctag

SEQ ID NO: 76579 - DNA, 2064 bp, synthetic construct
  misc_feature 1..2064: note = Description of Artificial Sequence: Synthetic coding sequence
  source 1..2064: mol_type = other DNA
atggaggagttcgtgggcctgagagagggcagcagcggcaaccccgtgaccctgcaggagctgtggggcccctgccccagaatcagaagaggcatcagaggcggcctggagtggctgaagcagaagctgttcagactgggcgaggactggtacttcctgatgaccctgggcgtgctgatggccctggtgagctgcgccatggacctggccgtggagagcgtggtgagagcccaccagtggctgtacagagagatcggcgacagccacctgctgagatacctgagctggaccgtgtaccccgtggccctggtgagcttcagcagcggcttcagccagagcatcacccccagcagcggcggcagcggcatccccgaggtgaagaccatgctggccggcgtggtgctggaggactacctggacatcaagaacttcggcgccaaggtggtgggcctgagctgcaccctggcctgcggcagcaccctgttcctgggcaaggtgggccccttcgtgcacctgagcgtgatgatggccgcctacctgggcagagtgagaaccaccaccatcggcgagcccgagaacaagagcaagcagaacgagatgctggtggccgccgccgccgtgggcgtggccaccgtgttcgccgcccccttcagcggcgtgctgttcagcatcgaggtgatgagcagccacttcagcgtgtgggactactggagaggcttcttcgccgccacctgcggcgccttcatgttcagactgctggccgtgttcaacagcgagcaggagaccatcaccagcctgtacaagaccagcttcagagtggacgtgcccttcgacctgcccgagatcttcttcttcgtggccctgggcggcctgtgcggcatcctgggcagcgcctacctgttctgccagagaatcttcttcggcttcatcagaaacaacagattcagcagcaagctgctggccaccagcaagcccgtgtacagcgccctggccaccctggtgctggccagcatcacctacccccccagcgccggcagattcctggccagcagactgagcatgaagcagcacctggacagcctgttcgacaaccacagctgggccctgatgacccagaacagcagccccccctggcccgaggagctggacccccagcacctgtggtgggagtggtaccaccccagattcaccatcttcggcaccctggccttcttcctggtgatgaagttctggatgctgatcctggccaccaccatccccatgcccgccggctacttcatgcccatcttcgtgtacggcgccgccatcggcagactgttcggcgagaccctgagcttcatcttccccgagggcatcgtggccggcggcatcaccaaccccatcatgcccggcggctacgccctggccggcgccgccgccttcagcggcgccgtgacccacaccatcagcaccgccctgctggccttcgaggtgaccggccagatcgtgcacgccctgcccgtgctgatggccgtgctggccgccaacgccatcgcccagagctgccagcccagcttctacgacggcaccgtgatcgtgaagaagctgccctacctgcccagaatcctgggcagaaacatcggcagccacagagtgagagtggagcacttcatgaaccacagcatcaccaccctggccaaggacatgcccctggaggaggtggtgaaggtggtgaccagcaccgacgtggccaagtaccccctggtggagagcaccgagagccagatcctggtgggcatcgtgagaagagcccagctggtgcaggccctgaaggccgagccccccagctgggcccccggccaccagcagtgcctgcaggacatcctggccgccggctgccccaccgagcccgtgaccctgaagctgagccccgagaccagcctgcacgaggcccacaacctgttcgagctgctgaacctgcacagcctgttcgtgaccagcagaggcagagccgtgggctgcgtgagctgggtggagatgaagaaggccatcagcaacctgaccaacccccccgcccccaagtag

SEQ ID NO: 76580 - DNA, 441 bp, synthetic construct
  misc_feature 1..441: note = Description of Artificial Sequence: Synthetic coding sequence
  source 1..441: mol_type = other DNA
gcccagagctgccagcccagcttctacgacggcaccgtgatcgtgaagaagctgccctacctgcccagaatcctgggcagaaacatcggcagccacagagtgagagtggagcacttcatgaaccacagcatcaccaccctggccaaggacatgcccctggaggaggtggtgaaggtggtgaccagcaccgacgtggccaagtaccccctggtggagagcaccgagagccagatcctggtgggcatcgtgagaagagcccagctggtgcaggccctgaaggccgagccccccagctgggcccccggccaccagtgcctgcaggacatcctggccgccggctgccccaccgagcccgtgaccctgaagctgagccccgagaccagcctgcacgaggcccagatgcccagcggcgtggtgtggttccccgtgagaggcagctag

SEQ ID NO: 76581 - DNA, 2646 bp, synthetic construct
  misc_feature 1..2646: note = Description of Artificial Sequence: Synthetic coding sequence
  source 1..2646: mol_type = other DNA
atggccgccgccgccgccgaggagggcatggagcccagagccctgcagtacgagcagaccctgatgtacggcagatacacccaggacctgggcgccttcgccaaggaggaggccgccagaatcagactgggcggccccgagccctggaagggcccccccagcagcagagccgcccccgagctgctggagtacggcagaagcagatgcgccagatgcagagtgtgcagcgtgagatgccacaagttcctggtgagcagagtgggcgaggactggatcttcctggtgctgctgggcctgctgatggccctggtgagctgggtgatggactacgccatcgccgcctgcctgcaggcccagcagtggatgagcagaggcctgaacaccagcatcctgctgcagtacctggcctgggtgacctaccccgtggtgctgatcaccttcagcgccggcttcacccagatcctggccccccaggccgtgggcagcggcatccccgagatgaagaccatcctgagaggcgtggtgctgaaggagtacctgaccctgaagaccttcatcgccaaggtgatcggcctgacctgcgccctgggcagcggcatgcccctgggcaaggagggccccttcgtgcacatcgccagcatgtgcgccgccctgctgagcaagttcctgagcctgttcggcggcatctacgagaacgagagcagaaacaccgagatgctggccgccgcctgcgccgtgggcgtgggctgctgcttcgccgcccccatcggcggcgtgctgttcagcatcgaggtgaccagcaccttcttcgccgtgagaaactactggagaggcttcttcgccgccaccttcagcgccttcatcttcagagtgctggccgtgtggaacagagacgaggagaccatcaccgccctgttcaagaccagattcagactggacttccccttcgacctgcaggagctgcccgccttcgccgtgatcggcatcgccagcggcttcggcggcgccctgttcgtgtacctgaacagaaagatcgtgcaggtgatgagaaagcagaagaccatcaacagattcctgatgagaaagagactgctgttccccgccctggtgaccctgctgatcagcaccctgaccttcccccccggcttcggccagttcatggccggccagctgagccagaaggagaccctggtgaccctgttcgacaacagaacctgggtgagacagggcctggtggaggagctggagccccccagcaccagccaggcctggaacccccccagagccaacgtgttcctgaccctggtgatcttcatcctgatgaagttctggatgagcgccctggccaccaccatccccgtgccctgcggcgccttcatgcccgtgttcgtgatcgacggcatccacaccgacagcagcacctacagaatcgtgcccggcggctacgccgtggtgggcgccgccgccctggccggcgccgtgacccacaccgtgagcaccgccgtgatcgtgttcgagctgaccggccagatcgcccacatcctgcccgtgatgatcgccgtgatcctggccaacgccgtggcccagagcctgcagcccagcctgtacgacagcatcatcagaatcaagaagctgccctacctgcccgagctgggctggggcagacaccagcagtacagagtgagagtggaggacatcatggtgagagacgtgccccacgtggccctgagctgcaccttcagagacctgagactggccctgcacagaaccaagggcagaatgctggccctggtggagagccccgagagcatgatcctgctgggcagcatcgagagaagccaggtggtggccctgctgggcgcccagctgagccccgccagaagaagacagcacatgcaggagagaagagccacccagaccagccccctgagcgaccaggagggcccccccacccccgaggccagcgtgtgcttccaggtgaacaccgaggacagcgccttccccgccgccagaggcgagacccacaagcccctgaagcccgccctgaagagaggccccagcgtgaccagaaacctgggcgagagccccaccggcagcgccgagagcgccggcatcgccctgagaagcctgttctgcggcagccccccccccgaggccgccagcgagaagctggagagctgcgagaagagaaagctgaagagagtgagaatcagcctggccagcgacgccgacctggagggcgagatgagccccgaggagatcctggagtgggaggagcagcagctggacgagcccgtgaacttcagcgactgcaagatcgaccccgcccccttccagctggtggagagaaccagcctgcacaagacccacaccatcttcagcctgctgggcgtggaccacgcctacgtgaccagcatcggcagactgatcggcatcgtgaccctgaaggagctgagaaaggccatcgagggcagcgtgaccgcccagggcgtgaaggtgagaccccccctggccagcttcagagacagcgccaccagcagcagcgacaccgagaccaccgaggtgcacgccctgtggggcccccacagcagacacggcctgcccagagagggcagccccagcgacagcgacgacaagtgccagtag

SEQ ID NO: 76582 - DNA, 2565 bp, synthetic construct
  misc_feature 1..2565: note = Description of Artificial Sequence: Synthetic coding sequence
  source 1..2565: mol_type = other DNA
atggccgccgccgccgccgaggagggcatggagcccagagccctgcagtacgagcagaccctgatgtacggcagatacacccaggacctgggcgccttcgccaaggaggaggccgccagaatcagactgggcggccccgagccctggaagggcccccccagcagcagagccgcccccgagctgctggagtacggcagaagcagatgcgccagatgcagagcccagcagtggatgagcagaggcctgaacaccagcatcctgctgcagtacctggcctgggtgacctaccccgtggtgctgatcaccttcagcgccggcttcacccagatcctggccccccaggccgtgggcagcggcatccccgagatgaagaccatcctgagaggcgtggtgctgaaggagtacctgaccctgaagaccttcatcgccaaggtgatcggcctgacctgcgccctgggcagcggcatgcccctgggcaaggagggccccttcgtgcacatcgccagcatgtgcgccgccctgctgagcaagttcctgagcctgttcggcggcatctacgagaacgagagcagaaacaccgagatgctggccgccgcctgcgccgtgggcgtgggctgctgcttcgccgcccccatcggcggcgtgctgttcagcatcgaggtgaccagcaccttcttcgccgtgagaaactactggagaggcttcttcgccgccaccttcagcgccttcatcttcagagtgctggccgtgtggaacagagacgaggagaccatcaccgccctgttcaagaccagattcagactggacttccccttcgacctgcaggagctgcccgccttcgccgtgatcggcatcgccagcggcttcggcggcgccctgttcgtgtacctgaacagaaagatcgtgcaggtgatgagaaagcagaagaccatcaacagattcctgatgagaaagagactgctgttccccgccctggtgaccctgctgatcagcaccctgaccttcccccccggcttcggccagttcatggccggccagctgagccagaaggagaccctggtgaccctgttcgacaacagaacctgggtgagacagggcctggtggaggagctggagccccccagcaccagccaggcctggaacccccccagagccaacgtgttcctgaccctggtgatcttcatcctgatgaagttctggatgagcgccctggccaccaccatccccgtgccctgcggcgccttcatgcccgtgttcgtgatcggcgccgccttcggcagactggtgggcgagagcatggccgcctggttccccgacggcatccacaccgacagcagcacctacagaatcgtgcccggcggctacgccgtggtgggcgccgccgccctggccggcgccgtgacccacaccgtgagcaccgccgtgatcgtgttcgagctgaccggccagatcgcccacatcctgcccgtgatgatcgccgtgatcctggccaacgccgtggcccagagcctgcagcccagcctgtacgacagcatcatcagaatcaagaagctgccctacctgcccgagctgggctggggcagacaccagcagtacagagtgagagtggaggacatcatggtgagagacgtgccccacgtggccctgagctgcaccttcagagacctgagactggccctgcacagaaccaagggcagaatgctggccctggtggagagccccgagagcatgatcctgctgggcagcatcgagagaagccaggtggtggccctgctgggcgcccagctgagccccgccagaagaagacagcacatgcaggagagaagagccacccagaccagccccctgagcgaccaggagggcccccccacccccgaggccagcgtgtgcttccaggtgaacaccgaggacagcgccttccccgccgccagaggcgagacccacaagcccctgaagcccgccctgaagagaggccccagcgtgaccagaaacctgggcgagagccccaccggcagcgccgagagcgccggcatcgccctgagaagcctgttctgcggcagccccccccccgaggccgccagcgagaagctggagagctgcgagaagagaaagctgaagagagtgagaatcagcctggccagcgacgccgacctggagggcgagatgagccccgaggagatcctggagtgggaggagcagcagctggacgagcccgtgaacttcagcgactgcaagatcgaccccgcccccttccagctggtggagagaaccagcctgcacaagacccacaccatcttcagcctgctgggcgtggaccacgcctacgtgaccagcatcggcagactgatcggcatcgtgaccctgaaggagctgagaaaggccatcgagggcagcgtgaccgcccagggcgtgaaggtgagaccccccctggccagcttcagagacagcgccaccagcagcagcgacaccgagaccaccgaggtgcacgccctgtggggcccccacagcagacacggcctgcccagagagggcagccccagcgacagcgacgacaagtgccagtag

SEQ ID NO: 76583 - DNA, 2610 bp, synthetic construct
  misc_feature 1..2610: note = Description of Artificial Sequence: Synthetic coding sequence
  source 1..2610: mol_type = other DNA
atggccgccgccgccgccgaggagggcatggagcccagagccctgcagtacgagcagaccctgatgtacggcagatacacccaggacctgggcgccttcgccaaggaggaggccgccagaatcagactgggcggccccgagccctggaagggcccccccagcagcagagccgcccccgagctgctggagtacggcagaagcagatgcgccagatgcagagtgtgcagcgtgagatgccacaagttcctggtgagcagagtgggcgaggactggatcttcctggtgctgctgggcctgctgatggccctggtgagctgggtgatggactacgccatcgccgcctgcctgcaggcccagcagtggatgagcagaggcctgaacaccagcatcctgctgcagtacctggcctgggtgacctaccccgtggtgctgatcaccttcagcgccggcttcacccagatcctggccccccaggccgtgggcagcggcatccccgagatgaagaccatcctgagaggcgtggtgctgaaggagtacctgaccctgaagaccttcatcgccaaggtgatcggcctgacctgcgccctgggcagcggcatgcccctgggcaaggagggccccttcgtgcacatcgccagcatgtgcgccgccctgctgagcaagttcctgagcctgttcggcggcatctacgagaacgagagcagaaacaccgagatgctggccgccgcctgcgccgtgggcgtgggctgctgcttcgccgcccccatcggcggcgtgctgttcagcatcgaggtgaccagcaccttcttcgccgtgagaaactactggagaggcttcttcgccgccaccttcagcgccttcatcttcagagtgctggccgtgtggaacagagacgaggagaccatcaccgccctgttcaagaccagattcagactggacttccccttcgacctgcaggagctgcccgccttcgccgtgatcggcatcgccagcggcttcggcggcgccctgttcgtgtacctgaacagaaagatcgtgcaggtgatgagaaagcagaagaccatcaacagattcctgatgagaaagagactgctgttccccgccctggtgaccctgctgatcagcaccctgaccttcccccccggcttcggccagttcatggccggccagctgagccagaaggagaccctggtgaccctgttcgacaacagaacctgggtgagacagggcctggtggaggagctggagccccccagcaccagccaggcctggaacccccccagagccaacgtgttcctgaccctggtgatcttcatcctgatgaagttctggatgagcgccctggccaccaccatccccgtgccctgcggcgccttcatgcccgtgttcgtgatcggcgccgccttcggcagactggtgggcgagagcatggccgcctggttccccgacggcatccacaccgacagcagcacctacagaatcgtgcccggcggctacgccgtggtgggcgccgccgccctggccggcgccgtgacccacaccgtgagcaccgccgtgatcgtgttcgagctgaccggccagatcgcccacatcctgcccgtgatgatcgccgtgatcctggccaacgccgtggcccagagcctgcagcccagcctgtacgacagcatcatcagaatcaagaagctgccctacctgcccgagctgggctggggcagacaccagcagtacagagtgagagtggaggacatcatggtgagagacgtgccccacgtggccctgagctgcaccttcagagacctgagactggccctgcacagaaccaagggcagaatgctggccctggtggagagccccgagagcatgatcctgctgggcagcatcgagagaagccaggtggtggccctgctgggcgcccagctgagccccgccagaagaagacagcacatgcaggagagaagagccacccagaccagccccctgagcgaccaggagggcccccccacccccgaggccagcgtgtgcttccaggtgaacaccgaggacagcgccttccccgccgccagaggcgagacccacaagcccctgaagcccgccctgaagagaggccccagcgtgaccagaaacctgggcgagagccccaccggcagcgccgagagcgccggcatcgccctgagaagcctgttctgcggcagccccccccccgaggccgccagcgagaagctggagagctgcgagaagagaaagctgaagagagtgagaatcagcctggccagcgacgccgacctggagggcgagatgagccccgaggagatcctggagtgggaggagcagcagctggacgagcccgtgaacttcagcgactgcaagatcgaccccgcccccttccagctggtggagagaaccagcctgcacaagctgagaaaggccatcgagggcagcgtgaccgcccagggcgtgaaggtgagaccccccctggccagcttcagagacagcgccaccagcagcagcgacaccgagaccaccgaggtgcacgccctgtggggcccccacagcagacacggcctgcccagagagggcagccccagcgacagcgacgacaagtgccagtag

SEQ ID NO: 76584 - DNA, 714 bp, synthetic construct
  misc_feature 1..714: note = Description of Artificial Sequence: Synthetic coding sequence
  source 1..714: mol_type = other DNA
atgagcttcctgaagagcttccccccccccggccccgccgagggcctgctgagacagcagcccgacaccgaggccgtgctgaacggcaagggcctgggcaccggcaccctgtacatcgccgagagcagactgagctggctggacggcagcggcctgggcttcagcctggagtaccccaccatcagcctgcacgccctgagcagagacagaagcgactgcctgggcgagcacctgtacgtgatggtgaacgccaagttcgaggaggagagcaaggagcccgtggccgacgaggaggaggaggacagcgacgacgacgtggagcccatcaccgagttcagattcgtgcccagcgacaagagcgccctggaggccatgttcaccgccatgtgcgagtgccaggccctgcaccccgaccccgaggacgaggacagcgacgactacgacggcgaggagtacgacgtggaggcccacgagcagggccagggcgacatccccaccttctacacctacgaggagggcctgagccacctgaccgccgagggccaggccaccctggagagactggagggcatgctgagccagagcgtgagcagccagtacaacatggccggcgtgagaaccgaggacagcatcagagactacgaggacggcatggaggtggacaccacccccaccgtggccggccagttcgaggacgccgacgtggaccactag

SEQ ID NO: 76585 - DNA, 714 bp, synthetic construct; identical to SEQ ID NO: 76584
  misc_feature 1..714: note = Description of Artificial Sequence: Synthetic coding sequence
  source 1..714: mol_type = other DNA

SEQ ID NO: 76586 - DNA, 504 bp, synthetic construct
  misc_feature 1..504: note = Description of Artificial Sequence: Synthetic coding sequence
  source 1..504: mol_type = other DNA
atggtgctgctgctgaagggcgtgcccttcaccctgaccaccgtggacaccagaagaagccccgacgtgctgaaggacttcgcccccggcagccagctgcccatcctgctgtacgacagcgacgccaagaccgacaccctgcagatcgaggacttcctggaggagaccctgggcccccccgacttccccagcctggcccccagatacagagagagcaacaccgccggcaacgacgtgttccacaagttcagcgccttcatcaagaaccccgtgcccgcccaggacgaggccctgtaccagcagctgctgagagccctggccagactggacagctacctgagagcccccctggagcacgagctggccggcgagccccagctgagagagagcagaagaagattcctggacggcgacagactgaccctggccgactgcagcctgctgcccaagctgcacatcgtggacaccgtgtgcgcccacttcagacaggcccccatcccctag

SEQ ID NO: 76587 - DNA, 711 bp, synthetic construct
  misc_feature 1..711: note = Description of Artificial Sequence: Synthetic coding sequence
  source 1..711: mol_type = other DNA
atggccgagaccaagctgcagctgttcgtgaaggccagcgaggacggcgagagcgtgggccactgccccagctgccagagactgttcatggtgctgctgctgaagggcgtgcccttcaccctgaccaccgtggacaccagaagaagccccgacgtgctgaaggacttcgcccccggcagccagctgcccatcctgctgtacgacagcgacgccaagaccgacaccctgcagatcgaggacttcctggaggagaccctgggcccccccgacttccccagcctggcccccagatacagagagagcaacaccgccggcaacgacgtgttccacaagttcagcgccttcatcaagaaccccgtgcccgcccaggacgaggccctgtaccagcagctgctgagagccctggccagactggacagctacctgagagcccccctggagcacgagctggccggcgagccccagctgagagagagcagaagaagattcctggacggcgacagactgaccctggccgactgcagcctgctgcccaagctgcacatcgtggacaccgtgtgcgcccacttcagacaggcccccatccccgccgagctgagaggcgtgagaagatacctggacagcgccatgcaggagaaggagttcaagtacacctgcccccacagcgccgagatcctggccgcctacagacccgccgtgcaccccagatag

SEQ ID NO: 76588 - DNA, 348 bp, synthetic construct
  misc_feature 1..348: note = Description of Artificial Sequence: Synthetic coding sequence
  source 1..348: mol_type = other DNA
atgaacagcggcgtgtgcctgtgcgtgctgatggccgtgctggccgccggcgccctgacccagcccgtgccccccgccgaccccgccggcagcggcctgcagagagccgaggaggcccccagaagacagctgagagtgagccagagaaccgacggcgagagcagagcccacctgggcgccctgctggccagatacatccagcaggccagaaaggcccccagcggcagaatgagcatcgtgaagaacctgcagaacctggaccccagccacagaatcagcgacagagactacatgggctggatggacttcggcagaagaagcgccgaggagtacgagtaccccagctag

SEQ ID NO: 76589 - DNA, 348 bp, synthetic construct; identical to SEQ ID NO: 76588
  misc_feature 1..348: note = Description of Artificial Sequence: Synthetic coding sequence
  source 1..348: mol_type = other DNA

SEQ ID NO: 76590 - DNA, 348 bp, synthetic construct; identical to SEQ ID NO: 76588
  misc_feature 1..348: note = Description of Artificial Sequence: Synthetic coding sequence
  source 1..348: mol_type = other DNA

SEQ ID NO: 76591 - DNA, 1287 bp, synthetic construct
  misc_feature 1..1287: note = Description of Artificial Sequence: Synthetic coding sequence
  source 1..1287: mol_type = other DNA
atggacgtggtggacagcctgctggtgaacggcagcaacatcacccccccctgcgagctgggcctggagaacgagaccctgttctgcctggaccagcccagacccagcaaggagtggcagcccgccgtgcagatcctgctgtacagcctgatcttcctgctgagcgtgctgggcaacaccctggtgatcaccgtgctgatcagaaacaagagaatgagaaccgtgaccaacatcttcctgctgagcctggccgtgagcgacctgatgctgtgcctgttctgcatgcccttcaacctgatccccaacctgctgaaggacttcatcttcggcagcgccgtgtgcaagaccaccacctacttcatgggcaccagcgtgagcgtgagcaccttcaacctggtggccatcagcctggagagatacggcgccatctgcaagcccctgcagagcagagtgtggcagaccaagagccacgccctgaaggtgatcgccgccacctggtgcctgagcttcaccatcatgaccccctaccccatctacagcaacctggtgcccttcaccaagaacaacaaccagaccgccaacatgtgcagattcctgctgcccaacgacgtgatgcagcagagctggcacaccttcctgctgctgatcctgttcctgatccccggcatcgtgatgatggtggcctacggcctgatcagcctggagctgtaccagggcatcaagttcgaggccagccagaagaagagcgccaaggagagaaagcccagcaccaccagcagcggcaagtacgaggacagcgacggctgctacctgcagaagaccagaccccccagaaagctggagctgagacagctgagcaccggcagcagcagcagagccaacagaatcagaagcaacagcagcgccgccaacctgatggccaagaagagagtgatcagaatgctgatcgtgatcgtggtgctgttcttcctgtgctggatgcccatcttcagcgccaacgcctggagagcctacgacaccgccagcgccgagagaagactgagcggcacccccatcagcttcatcctgctgctgagctacaccagcagctgcgtgaaccccatcatctactgcttcatgaacaagagattcagactgggcttcatggccaccttcccctgctgccccaaccccggcccccccggcgccagaggcgaggtgggcgaggaggaggagggcggcaccaccggcgccagcctgagcagattcagctacagccacatgagcgccagcgtgcccccccagtag

SEQ ID NO: 76592 - DNA, 1344 bp, synthetic construct
  misc_feature 1..1344: note = Description of Artificial Sequence: Synthetic coding sequence
  source 1..1344: mol_type = other DNA
atggagctgctgaagctgaacagaagcgtgcagggcaccggccccggccccggcgccagcctgtgcagacccggcgcccccctgctgaacagcagcagcgtgggcaacctgagctgcgagccccccagaatcagaggcgccggcaccagagagctggagctggccatcagaatcaccctgtacgccgtgatcttcctgatgagcgtgggcggcaacatgctgatcatcgtggtgctgggcctgagcagaagactgagaaccgtgaccaacgccttcctgctgagcctggccgtgagcgacctgctgctggccgtggcctgcatgcccttcaccctgctgcccaacctgatgggcaccttcatcttcggcaccgtgatctgcaaggccgtgagctacctgatgggcgtgagcgtgagcgtgagcaccctgagcctggtggccatcgccctggagagatacagcgccatctgcagacccctgcaggccagagtgtggcagaccagaagccacgccgccagagtgatcgtggccacctggctgctgagcggcctgctgatggtgccctaccccgtgtacaccgtggtgcagcccgtgggccccagagtgctgcagtgcgtgcacagatggcccagcgccagagtgagacagacctggagcgtgctgctgctgctgctgctgttcttcatccccggcgtggtgatggccgtggcctacggcctgatcagcagagagctgtacctgggcctgagattcgacggcgacagcgacagcgacagccagagcagagtgagaaaccagggcggcctgcccggcgccgtgcaccagaacggcagatgcagacccgagaccggcgccgtgggcgaggacagcgacggctgctacgtgcagctgcccagaagcagacccgccctggagctgaccgccctgaccgcccccggccccggcagcggcagcagacccacccaggccaagctgctggccaagaagagagtggtgagaatgctgctggtgatcgtggtgctgttcttcctgtgctggctgcccgtgtacagcgccaacacctggagagccttcgacggccccggcgcccacagagccctgagcggcgcccccatcagcttcatccacctgctgagctacgccagcgcctgcgtgaaccccctggtgtactgcttcatgcacagaagattcagacaggcctgcctggagacctgcgccagatgctgccccagaccccccagagccagacccagagccctgcccgacgaggacccccccacccccagcatcgccagcctgagcagactgagctacaccaccatcagcaccctgggccccggctag

SEQ ID NO: 76593 - DNA, 1551 bp, synthetic construct
  misc_feature 1..1551: note = Description of Artificial Sequence: Synthetic coding sequence
  source 1..1551: mol_type = other DNA
atggagctgctgaagctgaacagaagcgtgcagggcaccggccccggccccggcgccagcctgtgcagacccggcgcccccctgctgaacagcagcagcgtgggcaacctgagctgcgagccccccagaatcagaggcgccggcaccagagagctggagctggccatcagaatcaccctgtacgccgtgatcttcctgatgagcgtgggcggcaacatgctgatcatcgtggtgctgggcctgagcagaagactgagaaccgtgaccaacgccttcctgctgagcctggccgtgagcgacctgctgctggccgtggcctgcatgcccttcaccctgctgcccaacctgatgggcaccttcatcttcggcaccgtgatctgcaaggccgtgagctacctgatgggcgtgagcgtgagcgtgagcaccctgagcctggtggccatcgccctggagagatacagcgccatctgcagacccctgcaggccagagtgtggcagaccagaagccacgccgccagagtgatcgtggccacctggctgctgagcggcctgctgatggtgccctaccccgtgtacaccgtggtgcagcccgtgggccccagagtgctgcagtgcgtgcacagatggcccagcgccagagtgagacagacctggagcgtgctgctgctgctgctgctgttcttcatccccggcgtggtgatggccgtggcctacggcctgatcagcagagagctgtacctgggcctgagattcgacggcgacagcgacagcgacagccagagcagagtgagaaaccagggcggcctgcccggcggcgccggccccagagagcagaacctgggcgaggccgagctgtggagagccaccggccccgccggcgtgggcggcaccgagatgaaggtgagagtgagaagaaagctggagatggagctgagctgggagagaagaagcggcggcgactgggccggcgactggggcgacagccccttcagcctgaccgcccaccccctgtgcagcggcgccgtgcaccagaacggcagatgcagacccgagaccggcgccgtgggcgaggacagcgacggctgctacgtgcagctgcccagaagcagacccgccctggagctgaccgccctgaccgcccccggccccggcagcggcagcagacccacccaggccaagctgctggccaagaagagagtggtgagaatgctgctggtgatcgtggtgctgttcttcctgtgctggctgcccgtgtacagcgccaacacctggagagccttcgacggccccggcgcccacagagccctgagcggcgcccccatcagcttcatccacctgctgagctacgccagcgcctgcgtgaaccccctggtgtactgcttcatgcacagaagattcagacaggcctgcctggagacctgcgccagatgctgccccagaccccccagagccagacccagagccctgcccgacgaggacccccccacccccagcatcgccagcctgagcagactgagctacaccaccatcagcaccctgggccccggctag

SEQ ID NO: 76594 - DNA, 819 bp, synthetic construct
  misc_feature 1..819: note = Description of Artificial Sequence: Synthetic coding sequence
  source 1..819: mol_type = other DNA
atgagctgccacaactgcagcgacccccaggtgctgtgcagcagcggccagctgttcctgcagcccctgtgggaccacctgagaagctgggaggccctgctgcagagccccttcttccccgtgatcttcagcatcaccacctacgtgggcttctgcctgcccttcgtggtgctggacatcctgtgcagctgggtgcccgccctgagaagatacaagatccaccccgacttcagccccagcgcccagcagctgctgccctgcctgggccagaccctgtaccagcacgtgatgttcgtgttccccgtgaccctgctgcactgggccagaagccccgccctgctgccccacgaggcccccgagctgctgctgctgctgcaccacatcctgttctgcctgctgctgttcgacatggagttcttcgtgtggcacctgctgcaccacaaggtgccctggctgtacagaaccttccacaaggtgcaccaccagaacagcagcagcttcgccctggccacccagtacatgagcgtgtgggagctgttcagcctgggcttcttcgacatgatgaacgtgaccctgctgggctgccaccccctgaccaccctgaccttccacgtggtgaacatctggctgagcgtggaggaccacagcggctacaacttcccctggagcacccacagactggtgcccttcggctggtacggcggcgtggtgcaccacgacctgcaccacagccacttcaactgcaacttcgccccctacttcacccactgggacaagatcctgggcaccctgagaaccgccagcgtgcccgccagatag

SEQ ID NO: 76595 - DNA, 1482 bp, synthetic construct
  misc_feature 1..1482: note = Description of Artificial Sequence: Synthetic coding sequence
  source 1..1482: mol_type = other DNA
atgctggccgccaccgtgctgaccctggccctgctgggcaacgcccacgcctgcagcaagggcaccagccacgaggccggcatcgtgtgcagaatcaccaagcccgccctgctggtgctgaaccacgagaccgccaaggtgatccagaccgccttccagagagccagctaccccgacatcaccggcgagaaggccatgatgctgctgggccaggtgaagtacggcctgcacaacatccagatcagccacctgagcatcgccagcagccaggtggagctggtggaggccaagagcatcgacgtgagcatccagaacgtgagcgtggtgttcaagggcaccctgaagtacggctacaccaccgcctggtggctgggcatcgaccagagcatcgacttcgagatcgacagcgccatcgacctgcagatcaacacccagctgacctgcgacagcggcagagtgagaaccgacgcccccgactgctacctgagcttccacaagctgctgctgcacctgcagggcgagagagagcccggctggatcaagcagctgttcaccaacttcatcagcttcaccctgaagctggtgctgaagggccagatctgcaaggagatcaacgtgatcagcaacatcatggccgacttcgtgcagaccagagccgccagcatcctgagcgacggcgacatcggcgtggacatcagcctgaccggcgaccccgtgatcaccgccagctacctggagagccaccacaagggccacttcatctacaagaacgtgagcgaggacctgcccctgcccaccttcagccccaccctgctgggcgacagcagaatgctgtacttctggttcagcgagagagtgttccacagcctggccaaggtggccttccaggacggcagactgatgctgagcctgatgggcgacgagttcaaggccgtgctggagacctggggcttcaacaccaaccaggagatcttccaggaggtggtgggcggcttccccagccaggcccaggtgaccgtgcactgcctgaagatgcccaagatcagctgccagaacaagggcgtggtggtgaacagcagcgtgatggtgaagttcctgttccccagacccgaccagcagcacagcgtggcctacaccttcgaggaggacatcgtgaccaccgtgcaggccagctacagcaagaagaagctgttcctgagcctgctggacttccagatcacccccaagaccgtgagcaacctgaccgagagcagcagcgagagcgtgcagagcttcctgcagagcatgatcaccgccgtgggcatccccgaggtgatgagcagactggaggtggtgttcaccgccctgatgaacagcaagggcgtgagcctgttcgacatcatcaaccccgagatcatcaccagagacggcttcctgctgctgcagatggacttcggcttccccgagcacctgctggtggacttcctgcagagcctgagctag

SEQ ID NO: 76596 - DNA, 1302 bp, synthetic construct
  misc_feature 1..1302: note = Description of Artificial Sequence: Synthetic coding sequence
  source 1..1302: mol_type = other DNA
atgctggccgccaccgtgctgaccctggccctgctgggcaacgcccacgcctgcagcaagggcaccagccacgaggccggcatcgtgtgcagaatcaccaagcccgccctgctggtgctgaaccacgagaccgccaaggtgatccagaccgccttccagagagccagctaccccgacatcaccggcgagaaggccatgatgctgctgggccaggtgaagtacggcctgcacaacatccagatcagccacctgagcatcgccagcagccaggtggagctggtggaggccaagagcatcgacgtgagcatccagaacgtgagcgtggtgttcaagggcaccctgaagtacggctacaccaccgcctggtggctgggcatcgaccagagcatcgacttcgagatcgacagcgccatcgacctgcagatcaacacccagctgacctgcgacagcggcagagtgagaaccgacgcccccgactgctacctgagcttccacaagctgctgctgcacctgcagggcgagagagagcccggctggatcaagcagctgttcaccaacttcatcagcttcaccctgaagctggtgctgaagggccagatctgcaaggagatcaacgtgatcagcaacatcatggccgacttcgtgcagaccagagccgccagcatcctgagcgacggcgacatcggcgtggacatcagcctgaccggcgaccccgtgatcaccgccagctacctggagagccaccacaaggccgtgctggagacctggggcttcaacaccaaccaggagatcttccaggaggtggtgggcggcttccccagccaggcccaggtgaccgtgcactgcctgaagatgcccaagatcagctgccagaacaagggcgtggtggtgaacagcagcgtgatggtgaagttcctgttccccagacccgaccagcagcacagcgtggcctacaccttcgaggaggacatcgtgaccaccgtgcaggccagctacagcaagaagaagctgttcctgagcctgctggacttccagatcacccccaagaccgtgagcaacctgaccgagagcagcagcgagagcgtgcagagcttcctgcagagcatgatcaccgccgtgggcatccccgaggtgatgagcagactggaggtggtgttcaccgccctgatgaacagcaagggcgtgagcctgttcgacatcatcaaccccgagatcatcaccagagacggcttcctgctgctgcagatggacttcggcttccccgagcacctgctggtggacttcctgcagagcctgagctag

SEQ ID NO: 76597 - DNA, 1374 bp, synthetic construct
  misc_feature 1..1374: note = Description of Artificial Sequence: Synthetic coding sequence
  source 1..1374: mol_type = other DNA
atgaagaccaagttctgcaccggcggcgaggccgagcccagccccctgggcctgctgctgagctgcggcagcggcagcgccgcccccgcccccggcgtgggccagcagagagacgccgccagcgacctggagagcaagcagctgggcggccagcagccccccctggccctgcccccccccccccccctgcccctgcccctgcccctgccccagcccccccccccccagccccccgccgacgagcagcccgagcccagaaccagaagaagagcctacctgtggtgcaaggagttcctgcccggcgcctggagaggcctgagagaggacgagttccacatcagcgtgatcagaggcggcctgagcaacatgctgttccagtgcagcctgcccgacaccaccgccaccctgggcgacgagcccagaaaggtgctgctgagactgtacggcgccatcctgcagatgagaagctgcaacaaggagggcagcgagcaggcccagaaggagaacgagttccagggcgccgaggccatggtgctggagagcgtgatgttcgccatcctggccgagagaagcctgggccccaagctgtacggcatcttcccccagggcagactggagcagttcatccccagcagaagactggacaccgaggagctgagcctgcccgacatcagcgccgagatcgccgagaagatggccaccttccacggcatgaagatgcccttcaacaaggagcccaagtggctgttcggcaccatggagaagtacctgaaggaggtgctgagaatcaagttcaccgaggagagcagaatcaagaagctgcacaagctgctgagctacaacctgcccctggagctggagaacctgagaagcctgctggagagcacccccagccccgtggtgttctgccacaacgactgccaggagggcaacatcctgctgctggagggcagagagaacagcgagaagcagaagctgatgctgatcgacttcgagtacagcagctacaactacagaggcttcgacatcggcaaccacttctgcgagtggatgtacgactacagctacgagaagtaccccttcttcagagccaacatcagaaagtaccccaccaagaagcagcagctgcacttcatcagcagctacctgcccgccttccagaacgacttcgagaacctgagcaccgaggagaagagcatcatcaaggaggagatgctgctggaggtgaacagattcgccctggccagccacttcctgtggggcctgtggagcatcgtgcaggccaagatcagcagcatcgagttcggctacatggactacgcccaggccagattcgacgcctacttccaccagaagagaaagctgggcgtgtag

SEQ ID NO: 76598 - DNA, 1320 bp, synthetic construct
  misc_feature 1..1320: note = Description of Artificial Sequence: Synthetic coding sequence
  source 1..1320: mol_type = other DNA
atgaagaccaagttctgcaccggcggcgaggccgagcccagccccctgggcctgctgctgagctgcggcagcggcagcgccgcccccgcccccggcgtgggccagcagagagacgccgccagcgacctggagagcaagcagctgggcggccagcagccccccctggccctgcccccccccccccccctgcccctgcccctgcccctgccccagcccccccccccccagccccccgccgacgagcagcccgagcccagaaccagaagaagagcctacctgtggtgcaaggagttcctgcccggcgcctggagaggcctgagagaggacgagttccacatcagcgtgatcagaggcggcctgagcaacatgctgttccagtgcagcctgcccgacaccaccgccaccctgggcgacgagcccagaaaggtgctgctgagactgtacggcgccatcctgcagatgggcgccgaggccatggtgctggagagcgtgatgttcgccatcctggccgagagaagcctgggccccaagctgtacggcatcttcccccagggcagactggagcagttcatccccagcagaagactggacaccgaggagctgagcctgcccgacatcagcgccgagatcgccgagaagatggccaccttccacggcatgaagatgcccttcaacaaggagcccaagtggctgttcggcaccatggagaagtacctgaaggaggtgctgagaatcaagttcaccgaggagagcagaatcaagaagctgcacaagctgctgagctacaacctgcccctggagctggagaacctgagaagcctgctggagagcacccccagccccgtggtgttctgccacaacgactgccaggagggcaacatcctgctgctggagggcagagagaacagcgagaagcagaagctgatgctgatcgacttcgagtacagcagctacaactacagaggcttcgacatcggcaaccacttctgcgagtggatgtacgactacagctacgagaagtaccccttcttcagagccaacatcagaaagtaccccaccaagaagcagcagctgcacttcatcagcagctacctgcccgccttccagaacgacttcgagaacctgagcaccgaggagaagagcatcatcaaggaggagatgctgctggaggtgaacagattcgccctggccagccacttcctgtggggcctgtggagcatcgtgcaggccaagatcagcagcatcgagttcggctacatggactacgcccaggccagattcgacgcctacttccaccagaagagaaagctgggcgtgtag

SEQ ID NO: 76599 - DNA, 1188 bp, synthetic construct
  misc_feature 1..1188: note = Description of Artificial Sequence: Synthetic coding sequence
  source 1..1188: mol_type = other DNA
atggccgccgaggccaccgccgtggccggcagcggcgccgtgggcggctgcctggccaaggacggcctgcagcagagcaagtgccccgacaccacccccaagagaagaagagccagcagcctgagcagagacgccgagagaagagcctaccagtggtgcagagagtacctgggcggcgcctggagaagagtgcagcccgaggagctgagagtgtaccccgtgagcggcggcctgagcaacctgctgttcagatgcagcctgcccgaccacctgcccagcgtgggcgaggagcccagagaggtgctgctgagactgtacggcgccatcctgcagggcgtggacagcctggtgctggagagcgtgatgttcgccatcctggccgagagaagcctgggcccccagctgtacggcgtgttccccgagggcagactggagcagtacatccccagcagacccctgaagacccaggagctgagagagcccgtgctgagcgccgccatcgccaccaagatggcccagttccacggcatggagatgcccttcaccaaggagccccactggctgttcggcaccatggagagatacctgaagcagatccaggacctgccccccaccggcctgcccgagatgaacctgctggagatgtacagcctgaaggacgagatgggcaacctgagaaagctgctggagagcacccccagccccgtggtgttctgccacaacgacatccaggagggcaacatcctgctgctgagcgagcccgagaacgccgacagcctgatgctggtggacttcgagtacagcagctacaactacagaggcttcgacatcggcaaccacttctgcgagtgggtgtacgactacacccacgaggagtggcccttctacaaggccagacccaccgactaccccacccaggagcagcagctgcacttcatcagacactacctggccgaggccaagaagggcgagaccctgagccaggaggagcagagaaagctggaggaggacctgctggtggaggtgagcagatacgccctggccagccacttcttctggggcctgtggagcatcctgcaggccagcatgagcaccatcgagttcggctacctggactacgcccagagcagattccagttctacttccagcagaagggccagctgaccagcgtgcacagcagcagctag

SEQ ID NO: 76600 - DNA, 2247 bp, synthetic construct
  misc_feature 1..2247: note = Description of Artificial Sequence: Synthetic coding sequence
  source 1..2247: mol_type = other DNA
atgggcctgagaaccgccaagaagagaggcctgggcggcggcggcaagtggaagagagaggagggcggcggcaccagaggcagaagagaggtgagacccgcctgcttcctgcagagcggcggcagaggcgaccccggcgacgtgggcggccccgccggcaaccccggctgcagcccccaccccagagccgccaccagacccccccccctgcccgcccacacccccgcccacacccccgagtggtgcggcgccgccagcgccgaggccgccgagcccagaagagccggcccccacctgtgcatccccgcccccggcctgaccaagacccccatcctggagaaggtgcccagaaagatggccgccaagacccccagcagcgaggagagcggcctgcccaagctgcccgtgccccccctgcagcagaccctggccacctacctgcagtgcatgagacacctggtgagcgaggagcagttcagaaagagccaggccatcgtgcagcagttcggcgcccccggcggcctgggcgagaccctgcagcagaagctgctggagagacaggagaagaccgccaactgggtgagcgagtactggctgaacgacatgtacctgaacaacagactggccctgcccgtgaacagcagccccgccgtgatcttcgccagacagcacttccccggcaccgacgaccagctgagattcgccgccagcctgatcagcggcgtgctgagctacaaggccctgctggacagccacagcatccccaccgactgcgccaagggccagctgagcggccagcccctgtgcatgaagcagtactacggcctgttcagcagctacagactgcccggccacacccaggacaccctggtggcccagaacagcagcatcatgcccgagcccgagcacgtgatcgtggcctgctgcaaccagttcttcgtgctggacgtggtgatcaacttcagaagactgagcgagggcgacctgttcacccagctgagaaagatcgtgaagatggccagcaacgaggacgagagactgccccccatcggcctgctgaccagcgacggcagaagcgagtgggccgaggccagaaccgtgctggtgaaggacagcaccaacagagacagcctggacatgatcgagagatgcatctgcctggtgtgcctggacgcccccggcggcgtggagctgagcgacacccacagagccctgcagctgctgcacggcggcggctacagcaagaacggcgccaacagatggtacgacaagagcctgcagttcgtggtgggcagagacggcacctgcggcgtggtgtgcgagcacagccccttcgacggcatcgtgctggtgcagtgcaccgagcacctgctgaagcacgtgacccagagcagcagaaagctgatcagagccgacagcgtgagcgagctgcccgcccccagaagactgagatggaagtgcagccccgagatccagggccacctggccagcagcgccgagaagctgcagagaatcgtgaagaacctggacttcatcgtgtacaagttcgacaactacggcaagaccttcatcaagaagcagaagtgcagccccgacgccttcatccaggtggccctgcagctggccttctacagactgcacagaagactggtgcccacctacgagagcgccagcatcagaagattccaggagggcagagtggacaacatcagaagcgccacccccgaggccctggccttcgtgagagccgtgaccgaccacaaggccgccgtgcccgccagcgagaagctgctgctgctgaaggacgccatcagagcccagaccgcctacaccgtgatggccatcaccggcatggccatcgacaaccacctgctggccctgagagagctggccagagccatgtgcaaggagctgcccgagatgttcatggacgagacctacctgatgagcaacagattcgtgctgagcaccagccaggtgcccaccaccaccgagatgttctgctgctacggccccgtggtgcccaacggctacggcgcctgctacaacccccagcccgagaccatcctgttctgcatcagcagcttccacagctgcaaggagaccagcagcagcaagttcgccaaggccgtggaggagagcctgatcgacatgagagacctgtgcagcctgctgccccccaccgagagcaagcccctggccaccaaggagaaggccaccagacccagccagggccaccagccctag

SEQ ID NO: 76601 - DNA, 1893 bp, synthetic construct
  misc_feature 1..1893: note = Description of Artificial Sequence: Synthetic coding sequence
  source 1..1893: mol_type = other DNA
atggccgccaagacccccagcagcgaggagagcggcctgcccaagctgcccgtgccccccctgcagcagaccctggccacctacctgcagtgcatgagacacctggtgagcgaggagcagttcagaaagagccaggccatcgtgcagcagttcggcgcccccggcggcctgggcgagaccctgcagcagaagctgctggagagacaggagaagaccgccaactgggtgagcgagtactggctgaacgacatgtacctgaacaacagactggccctgcccgtgaacagcagccccgccgtgatcttcgccagacagcacttccccggcaccgacgaccagctgagattcgccgccagcctgatcagcggcgtgctgagctacaaggccctgctggacagccacagcatccccaccgactgcgccaagggccagctgagcggccagcccctgtgcatgaagcagtactacggcctgttcagcagctacagactgcccggccacacccaggacaccctggtggcccagaacagcagcatcatgcccgagcccgagcacgtgatcgtggcctgctgcaaccagttcttcgtgctggacgtggtgatcaacttcagaagactgagcgagggcgacctgttcacccagctgagaaagatcgtgaagatggccagcaacgaggacgagagactgccccccatcggcctgctgaccagcgacggcagaagcgagtgggccgaggccagaaccgtgctggtgaaggacagcaccaacagagacagcctggacatgatcgagagatgcatctgcctggtgtgcctggacgcccccggcggcgtggagctgagcgacacccacagagccctgcagctgctgcacggcggcggctacagcaagaacggcgccaacagatggtacgacaagagcctgcagttcgtggtgggcagagacggcacctgcggcgtggtgtgcgagcacagccccttcgacggcatcgtgctggtgcagtgcaccgagcacctgctgaagcacgtgacccagagcagcagaaagctgatcagagccgacagcgtgagcgagctgcccgcccccagaagactgagatggaagtgcagccccgagatccagggccacctggccagcagcgccgagaagctgcagagaatcgtgaagaacctggacttcatcgtgtacaagttcgacaactacggcaagaccttcatcaagaagcagaagtgcagccccgacgccttcatccaggtggccctgcagctggccttctacagactgcacagaagactggtgcccacctacgagagcgccagcatcagaagattccaggagggcagagtggacaacatcagaagcgccacccccgaggccctggccttcgtgagagccgtgaccgaccacaaggccgccgtgcccgccagcgagaagctgctgctgctgaaggacgccatcagagcccagaccgcctacaccgtgatggccatcaccggcatggccatcgacaaccacctgctggccctgagagagctggccagagccatgtgcaaggagctgcccgagatgttcatggacgagacctacctgatgagcaacagattcgtgctgagcaccagccaggtgcccaccaccaccgagatgttctgctgctacggccccgtggtgcccaacggctacggcgcctgctacaacccccagcccgagaccatcctgttctgcatcagcagcttccacagctgcaaggagaccagcagcagcaagttcgccaaggccgtggaggagagcctgatcgacatgagagacctgtgcagcctgctgccccccaccgagagcaagcccctggccaccaaggagaaggccaccagacccagccagggccaccagccctag

SEQ ID NO: 76602 - DNA, 1893 bp, synthetic construct; identical to SEQ ID NO: 76601
  misc_feature 1..1893: note = Description of Artificial Sequence: Synthetic coding sequence
  source 1..1893: mol_type = other DNA

SEQ ID NO: 76603 - DNA, 1893 bp, synthetic construct; identical to SEQ ID NO: 76601
  misc_feature 1..1893: note = Description of Artificial Sequence: Synthetic coding sequence
  source 1..1893: mol_type = other DNA

SEQ ID NO: 76604 - DNA, 2001 bp, synthetic construct
  misc_feature 1..2001: note = Description of Artificial Sequence: Synthetic coding sequence
  source 1..2001: mol_type = other DNA
atgtggcccgagtgcagagacgaggccctgagcaccgtgggcccccacctgtgcatccccgcccccggcctgaccaagacccccatcctggagaaggtgcccagaaagatggccgccaagacccccagcagcgaggagagcggcctgcccaagctgcccgtgccccccctgcagcagaccctggccacctacctgcagtgcatgagacacctggtgagcgaggagcagttcagaaagagccaggccatcgtgcagcagttcggcgcccccggcggcctgggcgagaccctgcagcagaagctgctggagagacaggagaagaccgccaactgggtgagcgagtactggctgaacgacatgtacctgaacaacagactggccctgcccgtgaacagcagccccgccgtgatcttcgccagacagcacttccccggcaccgacgaccagctgagattcgccgccagcctgatcagcggcgtgctgagctacaaggccctgctggacagccacagcatccccaccgactgcgccaagggccagctgagcggccagcccctgtgcatgaagcagtactacggcctgttcagcagctacagactgcccggccacacccaggacaccctggtggcccagaacagcagcatcatgcccgagcccgagcacgtgatcgtggcctgctgcaaccagttcttcgtgctggacgtggtgatcaacttcagaagactgagcgagggcgacctgttcacccagctgagaaagatcgtgaagatggccagcaacgaggacgagagactgccccccatcggcctgctgaccagcgacggcagaagcgagtgggccgaggccagaaccgtgctggtgaaggacagcaccaacagagacagcctggacatgatcgagagatgcatctgcctggtgtgcctggacgcccccggcggcgtggagctgagcgacacccacagagccctgcagctgctgcacggcggcggctacagcaagaacggcgccaacagatggtacgacaagagcctgcagttcgtggtgggcagagacggcacctgcggcgtggtgtgcgagcacagccccttcgacggcatcgtgctggtgcagtgcaccgagcacctgctgaagcacgtgacccagagcagcagaaagctgatcagagccgacagcgtgagcgagctgcccgcccccagaagactgagatggaagtgcagccccgagatccagggccacctggccagcagcgccgagaagctgcagagaatcgtgaagaacctggacttcatcgtgtacaagttcgacaactacggcaagaccttcatcaagaagcagaagtgcagccccgacgccttcatccaggtggccctgcagctggccttctacagactgcacagaagactggtgcccacctacgagagcgccagcatcagaagattccaggagggcagagtggacaacatcagaagcgccacccccgaggccctggccttcgtgagagccgtgaccgaccacaaggccgccgtgcccgccagcgagaagctgctgctgctgaaggacgccatcagagcccagaccgcctacaccgtgatggccatcaccggcatggccatcgacaaccacctgctggccctgagagagctggccagagccatgtgcaaggagctgcccgagatgttcatggacgagacctacctgatgagcaacagattcgtgctgagcaccagccaggtgcccaccaccaccgagatgttctgctgctacggccccgtggtgcccaacggctacggcgcctgctacaacccccagcccgagaccatcctgttctgcatcagcagcttccacagctgcaaggagaccagcagcagcaagttcgccaaggccgtggaggagagcctgatcgacatgagagacctgtgcagcctgctgccccccaccgagagcaagcccctggccaccaaggagaaggccaccagacccagccagggccaccagccctag

SEQ ID NO: 76605 - DNA, 1638 bp, synthetic construct
  misc_feature 1..1638: note = Description of Artificial Sequence: Synthetic coding sequence
  source 1..1638: mol_type = other DNA
atggccgccaagacccccagcagcgaggagagcggcctgcccaagctgcccgtgccccccctgcagcagaccctggccacctacctgcagtgcatgagacacctggtgagcgaggagcagttcagaaagagccaggccatcgtgcagcagttcggcgcccccggcggcctgggcgagaccctgcagcagaagctgctggagagacaggagaagaccgccaactgggtgagcgagtactggctgaacgacatgtacctgaacaacagactggccctgcccgtgaacagcagccccgccgtgatcttcgccagacagcacttccccggcaccgacgaccagctgagattcgccgccagcctgatcagcggcgtgctgagctacaaggccctgctggacagccacagcatccccaccgactgcgccaagggccagctgagcggccagcccctgtgcatgaagcagtactacggcctgttcagcagctacagactgcccggccacacccaggacaccctggtggcccagaacagcagcatcatgcccgagcccgagcacgtgatcgtggcctgctgcaaccagttcttcgtgctggacgtggtgatcaacttcagaagactgagcgagggcgacctgttcacccagctgagaaagatcgtgaagatggccagcaacgaggacgagagactgccccccatcggcctgctgaccagcgacggcagaagcgagtgggccgaggccagaaccgtgctggtgaaggacagcaccaacagagacagcctggacatgatcgagagatgcatctgcctggtgtgcctggacgcccccggcggcgtggagctgagcgacacccacagagccctgcagctgctgcacggcggcggctacagcaagaacggcgccaacagatggtacgacaagagcctgcagttcgtggtgggcagagacggcacctgcggcgtggtgtgcgagcacagccccttcgacggcatcgtgctggtgcagtgcaccgagcacctgctgaagcacgtgacccagagcagcagaaagctgatcagagccgacagcgtgagcgagctgcccgcccccagaagactgagatggaagtgcagccccgagatccagggccacctggccagcagcgccgagaagctgcagagaatcgtgaagaacctggacttcatcgtgtacaagttcgacaactacggcaagaccttcatcaagaagcagaagtgcagccccgacgccttcatccaggtggccctgcagctggccttctacagactgcacagaagactggtgcccacctacgagagcgccagcatcagaagattccaggagggcagagtggacaacatcagaagcgccacccccgaggccctggccttcgtgagagccgtgaccgaccacaaggccgccgtgcccgccagcgagaagctgctgctgctgaaggacgccatcagagcccagaccgcctacaccgtgatggccatcaccggcatggccatcgacaaccacctgctggccctgagagagctggccagagccatgtgcaaggagctgcccgagatgttcatggacgagacctacctgatgagcaacagattcgtgctgagcaccagccagctgtgctggccctag

SEQ ID NO: 76606 - DNA, 1383 bp, synthetic construct
  misc_feature 1..1383: note = Description of Artificial Sequence: Synthetic coding sequence
  source 1..1383: mol_type = other DNA
atgaacaccagcgccccccccgccgtgagccccaacatcaccgtgctggcccccggcaagggcccctggcaggtggccttcatcggcatcaccaccggcctgctgagcctggccaccgtgaccggcaacctgctggtgctgatcagcttcaaggtgaacaccgagctgaagaccgtgaacaactacttcctgctgagcctggcctgcgccgacctgatcatcggcaccttcagcatgaacctgtacaccacctacctgctgatgggccactgggccctgggcaccctggcctgcgacctgtggctggccctggactacgtggccagcaacgccagcgtgatgaacctgctgctgatcagcttcgacagatacttcagcgtgaccagacccctgagctacagagccaagagaacccccagaagagccgccctgatgatcggcctggcctggctggtgagcttcgtgctgtgggcccccgccatcctgttctggcagtacctggtgggcgagagaaccgtgctggccggccagtgctacatccagttcctgagccagcccatcatcaccttcggcaccgccatggccgccttctacctgcccgtgaccgtgatgtgcaccctgtactggagaatctacagagagaccgagaacagagccagagagctggccgccctgcagggcagcgagacccccggcaagggcggcggcagcagcagcagcagcgagagaagccagcccggcgccgagggcagccccgagaccccccccggcagatgctgcagatgctgcagagcccccagactgctgcaggcctacagctggaaggaggaggaggaggaggacgagggcagcatggagagcctgaccagcagcgagggcgaggagcccggcagcgaggtggtgatcaagatgcccatggtggaccccgaggcccaggcccccaccaagcagccccccagaagcagccccaacaccgtgaagagacccaccaagaagggcagagacagagccggcaagggccagaagcccagaggcaaggagcagctggccaagagaaagaccttcagcctggtgaaggagaagaaggccgccagaaccctgagcgccatcctgctggccttcatcctgacctggaccccctacaacatcatggtgctggtgagcaccttctgcaaggactgcgtgcccgagaccctgtgggagctgggctactggctgtgctacgtgaacagcaccatcaaccccatgtgctacgccctgtgcaacaaggccttcagagacaccttcagactgctgctgctgtgcagatgggacaagagaagatggagaaagatccccaagagacccggcagcgtgcacagaacccccagcagacagtgctag

SEQ ID NO: 76607 - DNA, 405 bp, synthetic construct
  misc_feature 1..405: note = Description of Artificial Sequence: Synthetic coding sequence
  source 1..405: mol_type = other DNA
atgaacaccagcgccccccccgccgtgagccccaacatcaccgtgctggcccccggcaagggcccctggcaggtggccttcatcggcatcaccaccggcctgctgagcctggccaccgtgaccggcaacctgctggtgctgatcagcttcaaggtgaacaccgagctgaagaccgtgaacaactacttcctgctgagcctggcctgcgccgacctgatcatcggcaccttcagcatgaacctgtacaccacctacctgctgatgggccactgggccctgggcaccctggcctgcgacctgtggctggccctggactacgtggccagcaacgccagcgtgatgaacctgctgctgatcagcttcgacagatacttcagcgtgaccagacccctgagctacagatag

SEQ ID NO: 76608 - DNA, 1365 bp, synthetic construct
  misc_feature 1..1365: note = Description of Artificial Sequence: Synthetic coding sequence
  source 1..1365: mol_type = other DNA
atgaacaccagcgccccccccgccgtgagccccaacatcaccgtgctggcccccggcaagggcccctggcaggtggccttcatcggcatcaccaccggcctgctgagcctggccaccgtgaccggcaacctgctggtgctgatcagcttcaaggtgaacaccgagctgaagaccgtgaacaactacttcctgctgagcctggcctgcgccgacctgatcatcggcaccttcagcatgaacctgtacaccacctacctgctgatgggccactgggccctgggcaccctggcctgcgacctgtggctggccctggactacgtggccagcaacgccagcgtgatgaacctgctgctgatcagcttcgacagatacttcagcgtgaccagacccctgagctacagagccaagagaacccccagaagagccgccctgatgatcggcctggcctggctggtgagcttcgtgctgtgggcccccgccatcctgttctggcagtacctggtgggcgagagaaccgtgctggccggccagtgctacatccagttcctgagccagcccatcatcaccttcggcaccgccatggccgccttctacctgcccgtgaccgtgatgtgcaccctgtactggagaatctacagagagaccgagaacagagccagagagctggccgccctgcagggcagcgagacccccggcaagggcggcggcagcagcagcagcagcgagagaagccagcccggcgccgagggcagccccgagaccccccccggcagatgctgcagatgctgcagagcccccagactgctgcaggcctacagctggaaggaggaggaggaggaggacgagggcagcatggagagcctgaccagcagcgagggcgaggagcccggcagcgaggtggtgatcaagatgcccatggtggaccccgaggcccaggcccccaccaagcagccccccagaagcagccccaacaccgtgaagagacccaccaagaagggcagagacagagccggcaagggccagaagcccagaggcaaggagcagctggccaagagaaagaccttcagcctggtgaaggagaagaaggccgccagaaccctgagcgccatcctgctggccttcatcctgacctggaccccctacaacatcatggtgctggtgagcaccttctgcaaggactgcgtgcccgagaccctgtgggagctgggctactggctgtgctacgtgaacagcaccatcaaccccatgtgctacgccctgtgcaacaaggccttcagagacaccttcagactgctgctgctgtgcagatgggacaagagaagatggagaaagatccccaagagacccggcagcgtgcacagatag

SEQ ID NO: 76609 - DNA, 1401 bp, synthetic construct
  misc_feature 1..1401: note = Description of Artificial Sequence: Synthetic coding sequence
  source 1..1401: mol_type = other DNA
atgaacaacagcaccaacagcagcaacaacagcctggccctgaccagcccctacaagaccttcgaggtggtgttcatcgtgctggtggccggcagcctgagcctggtgaccatcatcggcaacatcctggtgatggtgagcatcaaggtgaacagacacctgcagaccgtgaacaactacttcctgttcagcctggcctgcgccgacctgatcatcggcgtgttcagcatgaacctgtacaccctgtacaccgtgatcggctactggcccctgggccccgtggtgtgcgacctgtggctggccctggactacgtggtgagcaacgccagcgtgatgaacctgctgatcatcagcttcgacagatacttctgcgtgaccaagcccctgacctaccccgtgaagagaaccaccaagatggccggcatgatgatcgccgccgcctgggtgctgagcttcatcctgtgggcccccgccatcctgttctggcagttcatcgtgggcgtgagaaccgtggaggacggcgagtgctacatccagttcttcagcaacgccgccgtgaccttcggcaccgccatcgccgccttctacctgcccgtgatcatcatgaccgtgctgtactggcacatcagcagagccagcaagagcagaatcaagaaggacaagaaggagcccgtggccaaccaggaccccgtgagccccagcctggtgcagggcagaatcgtgaagcccaacaacaacaacatgcccagcagcgacgacggcctggagcacaacaagatccagaacggcaaggcccccagagaccccgtgaccgagaactgcgtgcagggcgaggagaaggagagcagcaacgacagcaccagcgtgagcgccgtggccagcaacatgagagacgacgagatcacccaggacgagaacaccgtgagcaccagcctgggccacagcaaggacgagaacagcaagcagacctgcatcagaatcggcaccaagacccccaagagcgacagctgcacccccaccaacaccaccgtggaggtggtgggcagcagcggccagaacggcgacgagaagcagaacatcgtggccagaaagatcgtgaagatgaccaagcagcccgccaagaagaagcccccccccagcagagagaagaaggtgaccagaaccatcctggccatcctgctggccttcatcatcacctgggccccctacaacgtgatggtgctgatcaacaccttctgcgccccctgcatccccaacaccgtgtggaccatcggctactggctgtgctacatcaacagcaccatcaaccccgcctgctacgccctgtgcaacgccaccttcaagaagaccttcaagcacctgctgatgtgccactacaagaacatcggcgccaccagatag

SEQ ID NO: 76610 - DNA, 1401 bp, synthetic construct; identical to SEQ ID NO: 76609
  misc_feature 1..1401: note = Description of Artificial Sequence: Synthetic coding sequence
  source 1..1401: mol_type = other DNA

SEQ ID NO: 76611 - DNA, 1401 bp, synthetic construct; identical to SEQ ID NO: 76609
  misc_feature 1..1401: note = Description of Artificial Sequence: Synthetic coding sequence
  source 1..1401: mol_type = other DNA

SEQ ID NO: 76612 - DNA, 1401 bp, synthetic construct; identical to SEQ ID NO: 76609
  misc_feature 1..1401: note = Description of Artificial Sequence: Synthetic coding sequence
  source 1..1401: mol_type = other DNA

SEQ ID NO: 76613 - DNA, 1401 bp, synthetic construct; identical to SEQ ID NO: 76609
  misc_feature 1..1401: note = Description of Artificial Sequence: Synthetic coding sequence
  source 1..1401: mol_type = other DNA

SEQ ID NO: 76614 - DNA, 1401 bp, synthetic construct; identical to SEQ ID NO: 76609
  misc_feature 1..1401: note = Description of Artificial Sequence: Synthetic coding sequence
  source 1..1401: mol_type = other DNA
